United States Patent Application Publication US 2009/0075829 A1 - sequence listing, part 3

SEQ ID NO: 72 - DNA, 85690 bp, Arabidopsis thaliana
gatcctacgatgatttgtggtggaagattagggtatggttttgttgaatcatgatcgattagttttgaacacatttctcgtaggatgattcacagaattggaagatcctaggttgttgatgcttgcttgtgttctctatgtgaattgaatgttgatatctagtgtttttggttgttttaaaacctcttttctcttaattttttgttgctttgcattcatattttgggatatagtattgcatttgcatttgcatttggttttcttaggtacatgagtggagtttagaattttgaaagtaaaatgcagcaaatggagcaaacaaatgagctaagacaatgtaaagtgaccaaggaggagaagctaggaggacaatagaccaagtggtcgattgcgtggtcgattgcgtggtcgattggtcaggaccagagctacgaagaaaatttaaatctaccaaagtggtcgattgcgtggtcgattggtcaggaccagagctatggaggaaatttgaatctaccaaagtggtcgattgcgtggtcgattggtcaaggattaatgatggggacgatatttgaatctaccaagtgatctattgcttggtcgcttgctttcctaaaccgggtcaaaatccgatttgttccgtgttgatccggtttattttctcattactataaatactcttaacctagttttagagaggcgagcttttgttttagagatcaaaacttcttttaaggttctttatcttaagtttttgtatgaatcttggttagttgcgttttgaatcaaagtttaccttttaaatctcttatctaccttctctaattatgattacacaaagaccaaacctattcctttgtgctttcatgatcatgagtgagtagtcatttagagttctttggttagggtagattaggatgatttagatgttgggttatggagtttagggctagatcactacaagaaaagtgagtattaatagcactgagttatagcgttttatgtagtattgctattaatgagtaaccactgatttttagatagcgtttagaatttataaaacgctatgaaaggtttttactaaaaaacgtgtttattaaagttggtatataagagttttgattgcagatccatattaaaacgctacggaatcataagcgggaactaaaaaattttgggctccaaaaagcctttgaccaaagacttaggctccaaaaataattttcctcgactgttcttctcctttgactgttcttctccttttcatctctctctagctcttgaacttcttcactgctaaaaaattaagaggttctatcttcactcttccttaccatctgagattgtcgcatctatcttcactcttgctctctcgtcgaaattcgtactcgaccacaaatcccatccatcgtcttcgtccgcttcaaggttgtaatttttagggttaatgcatgtatgattttggggtttagatcttgttttgttttgtttcaattgaagttttaagagtttggggttttgatttgtcacaattttgcttctttttaattgaatcgatttgggttctcgatttagttcactaggctttgaaattctttctttgatgtttcgattaggggtcttggcaactcacattcgccgaacattgtctgaaactgacaccagtatttagggttttgcttcatcaaaattgttattgtttcgatttgtatttggatttttagatctataaattgtacagcacgaatagttatagtcgattatgatgtcttgtttttggtttgattcttgtgttgtctttattttagtggtttgattcatgtcttgttttctgcagttcgagtttcgcatagacgaaggactagcactagcaggtaatggttgagtggtttagttcttctcttaactcagctgtattgcgattcatggaataaaagtttgtgtttttttgcagtctcgggttttacaattcacaagatccctcatagattcttcttctgtgcaggtatttggtttctctttgtgtgattacctttatttgatcctcatggttggtgtctgacatatagagtaactctaatacttgtgtgtttaactgctggtcgagctttggagttattgttttaatatggagaagtcttgggtttggctgccaaggtaagcttatgattgttatttacgttgttctcttatacttacagtgattatattggagttaatttgttaattttattgactaacagggctagccctgaatatggagaaggagctaataattttgttgaggcgccagccaggagattgggtaatcctgaggatattttatgtccctgcagtgattgccggaatgtttgccatcaaccattagggacagtagtagatcatttggtgattagaggtatggatcaagagtataagatgaatacttgttggagcaaacatggagatatcagggatcatcagcggactgatgttcagacttctgagtttgaggcttatgacttgattaggactgcattttatcagggagaagaaaatctgcagtctcagactgagagtggtgatcagggttctcatgttgagagtaaagaagaatcaaagagtttaggcagaaactgattgatgcagaaactcctctatactcgacgtgtcccagctatactaaagtttctgcaatcatggcactctatcgcataaaggttaaaagtggtatgtctgagaactacttcgatcagctcttgtcattagtgcacgacatgctacccgtggataatgttctaccaaaatccacagatgagatgaagaagttcttgaagctatttggttttggttatgaaatgattcacgcatgccagaatgattgcattctgtataggaagcagtatgagcagttagtaagctgtccacgatgtagtgcatcaagatgggaaaaggataagcacacaggagaggaaaagaaagggattccagcgaaggttttacggtattttccaatcaaggatagattcaggaggatgtttagatcaaagagaatttctgaggagttgcgttggcatttcagtaatgcaagtgtagacgggtcaatgagacatccagttgattcattgacttggtttcaggtgagggataaatatccaaagtttccagctgaactaaggaaccttcgtcttgggctttccacagatgggatgaatccattctcaatgcagaatacgaagtacagtacatggccggttatgttggtgaactataacatgtgtccgactaagtgtatgaaagctgagaacatcatgttaactatgctcattccaggacctactgcgccgagtaacaacatagacgtgtatcttgcacctcttatagatgatctaaatgatctttggaaagaaggaattgaggtttatgattcttatgctaaggagaattttagacttaaagctatattattgtggactatcagtgattatccggctttaaggactctagctggctgtaaggttaaagggaaacaggcgtgtaacgtttgtggcaaagatacaccacataggtggctaaagtttagtcggaagcatgtttatttgggaaacaggaagcgactaaggccaggacatccctacagaaggaaaaaggcttggtttgacaacacagttgaggatggaactgtgaatagaattcagacaggatctgacatatttgagacacttaaggactttagaaatgatttcggaagacttttggataagaaaacaaagaggagcagaacagatttgggagatgaggatctggttttagaagaagaatatgaagaatatacagatcagtggcggtggaagaagaggtcaatactctatgaattagcatactggaaggtttagttcattcagaagaagtatagtgttttctttgtgaactagttttgttgtttgtcctaacttatttttcttatttttcaggatatgtcagtccgtcacaacatagatgtgatgcatgtggagaagaactgctttgatgcattattgtccactctaatgcaaagttctaaatccaaagatggatgaaggcaaggaaggatttggaagacataggaattcgatcacacttacacacagaggtaagaggaaagaagacttacttgcatcctgcagcttattggttatctaagacatagaaaaagggtttttgcagtaggctagctaaattcagagggcctgatggttattgcgctaatatctcaaattgtgtttcagtagatcctccaataattggtggcctgaagtcacacgatcatcatgtacttatgcaaaatctcttgcatgtggcgttgcaagggtttctgcctaaaggccccagaattgcagttacccgtctatgcaattacttcagtagactgtgtcagcgtgtccttgatccagagaagcttcttgcattagaagctgaagttgttgagacaatgtgtgaaatggagaggttctttcctccttcacttttcgatattatgttccaccttcccatacatttagcaagggaagcacgattgggtggccctgttcattttcgttggatgtatccatttgaaaggtacattttcttgaagctttgtttggtctgtctcaattttaaaagtgaaaaccacttaactttatttgtactgttttgaatgatgatgtcaggtacatgaaaacactgaaagcatatgttaaaaactatgctaggccagaggcatgtatggctgaggggtatttggctggagaatgcatagcattctgtactgagtttcttcagaattcattaccaccccaagaagaagtcaatcaaaatgaagaccttgaaacagatgagaatatcctagagggtcgaccgctgaataaggctactgaagttactctaacagagagagagagagatattgcacatcgatatgttttaatgaacatggcaatagtagatccatatattgagtaagttctatcttcattcttgtcagtttgttcagcttaacttgtataatcaacttacagaccttgttactgcaagatgcatctagaggaattgcaagcagtcgatgctagatgctctaaaaacgaaactttgttatggaaacttcataacgacaggtttcctcagtggatcaaagagaaggtaatgttgtcatcgattagagaatgtttggtctgttgataaaagagactttatgtgtcattgattagtattttgtactgttttcctgttagatacctactaattcaaaggagcattctacaaagctgagatggcttgcatttggtccaagacttgttgctcagacctataagggctatattataaatggtaatcggttccacacagaggatgtaaggcgaaagactcaaaacagtggtttaacatatgaagctttcagtatgtgtagatcaagtgccaaagatactagacaccaagcagacatagtagcattttacggagtgattaaggatatcataatgttggactaccacatgttccagattcccattttcaattgtagttgggccaacaaagggaatggtgtgaaagaagaagatggatttacacttgtgaatcttcatttgagtcaagctgcgtttctgcaagatccttacatcctggcatcacaagcaaaacaagttttctattctagagaaagtgacttgagtcagtggtatgttgttatgaaggcgccaccaagagggtatcatgaattagagacagaagaggagagtgttagtcagttgttagtccacccaatagaagacatgggaaatcaatcttcagatgatgaaagtttttgtgctagagatgattgtgaagggctcttagtattagaatagttgttgacttgtcatttttaatcactttttaaaaattgatcttgttgcaggggaaccagaatgatgtcaagtcaagctaacaccaaaccacgtcgcagtaagcgtcaacagggacttgaggtgagtccttttgaagtaagaaaagttaggaaaaacaagaagcaagcgagtcctcttaagcctgtgagagaggaaaacaatgagttgagtgttgatgagggagatgagcaagtttcagaccttaatgaagaagatgcagaccttaatgaaagcaatcaggatttacctgctgatgataatgcacagcatgagagcattcaggagccaatcgaagaagacacaactagagtttcaaaccagagtgaagaagcacaatcccatcagtcagggactaacaaatagagaactagaggtccatctaagatgcgtaaactggctaaacatctagatgataaggtcgatgttgaatttacagaattgggtgaacactttgggaatggttcagtcaaactgtcgtcctttcttggtgcactagtcagggagcatgtacttgtgatacttgatgattggaagcaccttgatgaacttacaagacacgcactttgggaggaaattcaggtatgtataacaatttatttagtttaccagaacgttcccttgtgactcttagttaacaatctaaacttatgtaggggaggtttaatctgcaagaagaatggcaaaaacaagctatttttaggcagatgggttgtttgtggaggtcccataaatctaagattctctcaaaggttaaagctgcaaagacaaagcttagagtacttgagctaagaccaagcaacatcccatatgtcgcagtttggagcaattgggtgaagagtaggactagcagcacttttaaggttgtattcattgtgaaatttgattttctaaagtaaatttacaagaaaatgttaataatgttgcattgggtttgatttgtaggtacaaagtgacaaatttaggcaattaaggagggcacaaattccacatactaccagtcgaaaaggaatgattcgcctggctcaagagatggtaagtttatatagtttttggttacgaatatctccttgaaaacaatagtgagttctgctgctatttaaattaatatttggtcgtcgaaaaaaacgagtttagacccaaggaaggtgacaagaagcaaggtttgggtagcaggacacacacattctgatgggagacctgtgaagccagagtttgaagagaccattgtaagaagttgtcctttattctattatcattttcttgatcaatttgtttatcaagatttgtgttttgtttcaggaaaaaataaagtcaattgacagtgaaatggactccacatctaatactaatattagagaagatgttgttagtcaagtattaggaaaggacaaacccgggagagtcagagggatgggcagaggggttactttttctaagctagctttcatgcaagttagagattcacatgtgcagcagcttgaagctaaacaagctgaattgatcagcaaacttgaagacttgcagaatgtcgttcatgacttagctggcaaaaatgtatgtttctcacctctgttatgatagtgatgtagtctttattttactgatgcccttttttgttcttcacagtttccaacagatagtcactcaaaatcagaagcaactagtatagtaaagtagttagatgtcagctactggattggaatgcgtctactgaagttgttgttggagaaggagaattctgctaattgaacaaacttacaagattggtcgtataagacttggtccaaacgcagcagctattattgtgaggtctgtcctagtcgaagatgcatatgtctggagacctacaccaaccatttgctcacttgggcaagctttggggagtaaaattgcatggccagctgataaggtgatattggacaatgatgagcacacaactgaaaataagactgctagctccacggtactttctaacttctaacttgatttattcttaaatgtggaacttaagtggaactttgctgatatatatgcctgattacataggatacatcaacagatagagttcgcattattgattggacttttgatgaagttatagctgaaggtatattatgttcaactgatccaaaagaaatggtgaacaatactcaactaggtctgaatgttgcagttgttaaagttgatctggtaattaaaggcgatgcttttttgtggagaccaagtattgaaatgtcaatgatgagtgaagcacttaatgagaacatcgtctggcctattcagaagatacaatttataagttcatcgtcggtacatgaatcagctaacagaccatcaccactacaggaatcacctaccagaccatcatcaacggtatgatatttcatcttctgtgaatttgtttagatacagttgagtagctgcaatggtgagaactgctctaatacatatatacattcaaattttaaattgacagactctaagtaacacttcgggtaacatcaatggtgggaaacagaagtgtattttgctggatatcaataactttagccaaagagttgcagaaggcaaggtttgttcatctaaacctgcagatgttgtccaccatgtccccttaggtcagaatgctagcaaggtatgggtcgaagtttcaaagattggagatgcaaaagtgtggaggccaaattcagaaattcaattcatttccgatgcaataggcactattgtagcttggcctaatgacagactcatgttactctgaacttgctgaacttgatgtaatttttttacttttttatcacaaacaaagattgtatgaattttagatgttttattgattttatgaaatttaatttcttttcaaattgatttttacaatttggttgacctgtcacaacaattatttctgaaattgaaattattaattcgtaaaacgaaattaaattttatatatttccagaattcagtgagatatatagtaacatttcactaacgctatttatgaattattaataacaaaacaatagtgctattataaaatctacagtagcaaacaaataaacgctattaaagataattttaagatagcataaacaaaaagcgctatataaagtgttcgacctattatcgcggttgatgagatagcgtttttattaacgctatctatttatacgatagcgttattcagatgttattaattctcgtttttcctgtagtggattacttaagatccttgtttattggttgcttttaaggatagatcaaccttgatcatgttgatttagacactaggaatttcatgcccggaaggtgttcgatgaatttcccgaaccaaaatctttaagtgattttcataccttacctttggaaattgttgattagggtgattaatggctagatagacttgttatttatgcttattgatcaactgattgcctttggaaattgttgatgatagattgattagtaaagggattaatatcatggaaatatgttagtcttgcttagtgttctatggcctaaggatcattgcttgttagaagttgtttgatgctccatctctttatcatttctaatcgattaccttaacccgagaattcgtctttagttatcacttagtaatttgttaattttccgctttgtttacatttgaaacttgttagtcttttgtttcttgctttcttttatcttgttttgcattgtttgcttgataatgcattgttactaagatttagaatacttaaaatcatcttgttagcttagattaagcaattgtgtgtattcttggtgagttgattaattgcaaattatggttccataaacaattgaaaacaaatgctacatcaaatgttatgtgatgctggattacatgcttgcttgggagaagtgtttgttcatagcccttatcacagtgattatgtcttcggaggaaactgtgatgtcaatgatcgagtaaagactgtgtggtaagtgtcaataccaagtagttaatttggaatttgtgtttcatataatcttaatacaattttgttgtgtcacagctggaggcaacgcttattcaactctaatgtctgcaagttcctcttatgaattactttcatatttcaagaccttgagagcacattatctgctcatgacatatgcttcacacaagctgcggattcgctctaccttattatgcttgaatttctacagcaagttcacgctcctgtctatggttagattctgataaacatatataattaaccttgttgtcaatgatcaagtaatgactgtagtagttgtagtatttgcgtttcatttgacattaatattgttttgttctatcatagctggagcatgacagaaagaagttgcaactcagtgatacatgaggcaatgtgaaggagttgttcaatgaacgcagagcaatagtgtaagtctctacatttgggaaaaacgctctatttcccgccgagaactatggacatcacgccagatagagcatgttctttcacctcggtctatttacccatgagttggaagttaaatgctgatttccccaccaaatcaaagttctacagcttaatgtccccgagactgtgttttcttggtttggtgagtaaaccctatagaaaacgaaatactggtcataagtaaaccaaaaatatatcttattccttttaaaaaccagacccaatattcatccccaaatttttaaaatcattgctcgataaattcccatctaagaaccctgaaacatcaaaattttaattcccttcagttcgattagaaaactcgaattcaatttcgatgagcaatctatctactagtttgacgggatctacaagttctcgtggaagaggaagagtcgacagaatgccaaaaagatgttggtgtagggaaggaattgttgccctaacatccaaatccgatacgaatccttaaagaagatactttcgttgtggttttgctgcaacaaacaaggtaatttcattgatattcatcaatgtttaagctgaattagatttttttacttatgaattttattgttcattgatagctaaggaatgatgaacacactttcaagtgggttgatgaagctttgatcaatgatttagacaagtttaatgcaaagattggggaagttgaacaacaagtgagagagcttagaacacagagtttggagtttgagaaaatggtttgtgagaaagtccaaatgaagattgagaatgagttatttgagaaagtggacgatgctttggctgaatcaaaagaaggcaataagaagatgatgatcgtcgtagtgataggatgtatgatcatgattggattgagcaaattagtcggatgaatgtttatgtctcggtttagattgaacaaagtagtgttaggatgctttgtgttgttactcttgtttgttactttgtttgacttttatgattaaggtattttgttcggatgtttaagaatggtatgttgtttcgatgaatgtttatgtctcggttttcatctcttgttgtccttttgtttggcatacaactatgaacattaatccacaaaagatgcaataacaaaataaatacaatattcaaaagtagtacataacagccaaggatacataagagtcaaaacaagtacccataatatctgagaatacaaaagaactaaggttcataacatccgagataaaagaagtgccatactagccctactaagctattacatagagatcaaacttgagtgagtgaatcttgacttggttcaggttgaaaaagctgtgaagctgattgagaagcctgtaaaaaaagctgaattatgttagtataatccaacagtagccacatacataaagagaatgtcacaattttgttaccacatgtaaagcattttttcatattttttatttaaatttaatattgtttatttgtgctccatattaaaaactttcctggatccgccaacggtagtgtttttacgtatatcatttttgcatttatctttttaaaaaaatttggatttcaaatccaaattccaacaaaaagttgctatgtccaactcatcccaaacctagaactaagtccacatcccatatagatgatgtgtcaaaatacaatctgaatcatattaataaaagagctgatagatcgacttctagttgaaagaaaatgttagaaagacatgggttttagtttaactatattggttatatttttcctgaaataatttcataaatctattaaaaatattgataaactgaaacactaattttcttatagtcaaatttagtgactcgggtgtcggaaagtttttgaaataaacaatcctcatatattttcatacttagacataaggttttttgttgccgacctatatgatcttttcttaatttgcgaaaaagcccacgtaatccccaaaaaaataaaaaaagtataaatgtactgtaaaataatccgggctacgtacggacatacaaatctccaattttatattttatgttattgaaaaatcaacttatatattataaaattgtctttttaacaataaaaaccaacgtgtttattgtttggctggaaacagaagtcgcacggtcttgccattggttactatcttactggtggtggtagataccatcatcaacacgaatattctttggttgtcggctagaatattttaacaggccatatttagcttttggttgttggctagaatattttaacaggccatataaaatcactttaggtttcttctctacaaatcatgtatttggtaacataagctagactaaataaacattagttgaaagtaataatatggcagaaattaacagcaccttgtaaattatttgagattacatataatattaatcttagttgacgaattttcaatacatatttattttattcgtttgtctgtcgctagactcagccatattaaccagcgacaaattacattgttcgtttgtctgctgttatattcatcgatcaattgcagcgactataattgttgctatctttgcggtttagtctcctgagccggttttatgtcttgcgaaccgattcttcaactccatcatttattctatcattagtcaaaaataatatctcttacgaactacttcgtttaacctataaaaatcgttaaaaaaaaacccagctatctcatacacgaagctgtctaaactccgaagcaatttataacaacgtacctcatacgtgagagtggtgcaagttaatcccaccatcactataatagacggttttctaaaagcttgaaaatatgagagatgacaaagctcgacattgataagctttgatagaagttgaaatatgactgttccaaataacgtaacagttagagatatatgagctttccaaataacggaacagttagaaatatatgagcttctttatatctattcattatatcattctgaaacgactcataacaaacaaaataaatctacatcttcacatgattgtgatataaacacaatgtattaatcagagaaattggaaaaaaaaaaaaggaacttgctaaacatcaacaacacccaacgaaaacccctagtggttaaagatagataccactaagactaacagtaacatatgaagttcaaaaaacacaagtaatctaaataatcgagcattcttatggtcatcgcccaaactggatatttgatcacgtttgtatcaattcgtaaggattataataataaaaaatataaaaatcataagatcacttttgtcgcttgtactggtcaccaaactgattatgcacactgataagcaatatactatcaatctttgtcccaacatctgcttgagaagttttttttttttttctacaatgttatatatgcctcgtcaattctacagcttaacactattatcaatggtagtttctcatgctagctcttagataaattaggtattaaatttcatgtttaaaatgattaattgttaagaatgacttttatataagagtcagatctaatatttcttagattagttcttagataaattaagtattaaatccaatatttcaattcaattaatcttagttcttagataaattaggtatactaaatctagtcgttttcgtttatgtttacgtcatatttgtttaaacttttatgtcatggatcttttaaattttatgagttgtactgattattaagtttttcaaaattaaaatgtttatattttttattttaaaatatatttttttaagaactccaaattaagaggccacaactgcatatcgtcaaaattttaatctcttagccaaaatcttaacatcaaaatttttaaaatcaattataaaaatattcctaagaactatattaagattatgctaagaaactaccgttgattatcctccgagtccgatttacttttgttccttgaaaagaaaaaaaaaacacagaagaattagatactgccaaaaaataacaataacatgcaaacctttatgtgaattccctaagacctgcctgcaatctaatccgtatgatggattaacctctgaaatctaacccataaattttgatgtgtctctagagagcattgagaagcctaatttatattgaattttattcgtttgtgatgaaatttagaagacgaaagggtaatctggaagagaaagagaggcgaggaagtgaagagatgaaacgcttcggaaacctaattttttccgtttacttgcaactattggatccttaaaatgttaagctaagagattgtgaatcacattttaagagtctttggtttcttaaaaactaactaattatttaaaaacaattgttgctttcacagtatattgtcatattgtggtgtatatcaaaaaggcaaaatcttaactaaactccaatattttggaaaaatgtgaactacttccaattttggatatatcaacaaaaacaaaagacactacatcatgacaaagaaaaaaaaaaagagtcacttttgatgaccagtgatagagatgaagatttggtcgtaaagtagggaagattcaaaaattcacgactcattactatatactattaactttcctttagaagaaataacaccgtatctctccaatattttaaactatagttagaatatagcttgttaatattttgtacagcgcatagagatttccttattgattctgttgtctagtctatatatatcgttgaaaggtgtatctcgagaaacacaaccatcttactctacatttcccatttttgagactcctaaatcattttaaccttcttcctcaatcgtgaccatcaccaatgacgctacacgtcattgagactgcccgagtcacccccaccgactactcagtcatcaactcagccaacttgcacaaacttcctttaactttcttcgaccttccatggctactattccagccagtcaaaagagtcttcttctacgagctcaccgagtctactcgtgaccatttccactccattatcctccctaagctcaaggactctctgtcccttatcctccgtaactatctccctctcactggccacatcacttgggagccaaacgagccaaaaccgagcataatcgtctcggaaaacggcgtcgttttggtgactatagccgagagtgacgctgacttttctcatctttccggttatggacagcgtcctttgtcagagttacatgccttggttcccaagttaccggtttctgatgactcagcgaccgctttctccatacaaatcacgttgtttcctaaccaaggattctccataggtgttgcagcacaccatgctgttttagacgggaaaacgtcaagcacttttatcaaagcttgggctcaaatctgcaaacaagaacttcaaagcatgccggagaatctaactccgtcttatgaccggtctttgatcaaatatccgacctatcttgatgaaaagatgatagagttagtgagatctctcaaagaggaccaaaccaacatcagaagcttgacttcgcttccctctagtaaactcggagacgatgtcgtgttagccacgctagttctctctcgggctgatattgagagacttagggaacaagtcaagaacgtgtcaccgagcctccacttgtcgacttttgtcattgcttacgcttacgcgtggacttgtttcgtgaaggcacgtggaggtaataaagacagatcagtgagtctcttgttcgtaggagatttcagagaccggttagatccgaagctcccggggacttacttcggaaactgtatgattccggtgggctgttataaccgtaaggcggcggagtttatggaagagaagggatttgtgacggcggctgagattattagcgatttggtgaaagggttgagttcaagaaagatagagaccattgcggacactttcgtggaaggatttagttttcagagttggagtacacagtttgggacgatagccgggtcgacccggttgggagtatacgaggcggatttcgggtggggaagacccgttaaagttgatattgtctccattgaccaaggagaagcgatcgcaatggctgagagacgtgatgagtcaggtggcgttgagattggaatgtgtttgaaaaagactgaaatggattcggtcgtgtcttttttcaacaatggtttacatagctaaactcttgttttgtaagattttaataataaggtaatgcttggttagttattcttgtttttttctcacaagaagtattgggcataattctccactaataaataagtttaaataaagatatattagtaaaagtctccaaaaacacatatagaagaaaacaagatttcttcagaaactagaacatttatacactagaaaaacatctcaagccatctcttaaaaaaagatgagaattttagactatcactcttccactatgaaaaatgttataagtcattccaacctattcatcgttataatcattttttcatcaagtatatctctaattcattacttgtatctccaattttttagattatacaaaaaaatatatcattttgacagccatcatcataaaaatgtctcagtcacttgattcatctttatctataggaagatctagagacaaaagataatgttctagcataatcacggacaaagataatgtcctagcatcacatccattcatcactactggatcccgtattgtcatatattatgcactatcatatatcatggaccaattatgaaaatagcacttaaatgcttatccctttgtatgaagcgacacttttttgtatcttataactttaggtatttcttccacttttttttacggttttattcttacgttccaccaaatttcttccacctacaaattatttctctatctttctaccattcccagaccagatcaaattcaaactgatttgtagtaacggttctttcattttggaatatagaactcaaaatcgatatttttattatgattttggattttctaactgattcatattgagtttcctaaataaaaaatccataaattaccaacaaaactcagcagcaacatataaacaaattaaatcgaatataaacttccaaaggagacaaattaggcaaaaccccaaataaatttcaaaacccagaaaacgaaccaatcaaatttcaaattcgaaatctcaaaatcaaatttttatcaaaagtctatttaaggtttttccttgggttccctatatactatcatcctagggtttacttatattgagacaatgggtatttgtataagaaataattttttgggataaacagattaaaattttctggaaaaaattagaacgagaagcataggaagaaaatgaaaaaagaaggaaacgataagatattccaggagcaaaatcgttaaaccatcagttgagaaatacccattcttataagccatgataaatgtacattttctcaagtttttaggcttaaatatgcctatttgaacaaaagcccccatagatcatacaaaatttcaaaacaaaatgattcaaaatgcatctttttccttgacccaaaataaataaaagtttaagtaaatacaatgctatgagatttaccattacctaaacccatcaaattccacaaaaatacaattcttcactcgaatctgtgagcataacttttatcttccactttatttcgttttcaacaacaactagtgcgttgaagcttttaaatagtgaaagtttctgatttttctatcataaaatatatgaaaattgcactcaacggccataaaaatttaacaatatgccaactaacaacaaaaatctaacaactattaaaaatagatgcgtttatggataatctgtgactggctgtagcaataacgattaacataaattaaaatctacaaaaatacatacaaactataatttaaattgaaaaccaaaaactatattattataataaaacttcaaaattcttaaactaattaaaaatattgattaactttaacagtttcaaccgtttttccatattttgaatgatctcaaaaaaatgtaaaaacactataattaatcataaagacgtcggtcaagaaacactgcttaataatcaaagtataccaaaaactttagaacactaattcaacattacaataaaataacaaataaatgtgcactaaattctttgcttggactttggatttttaatgatccattccatctaatggtaacatttcatttttttgtacttttaacaactcgaaattcatttataagaagatgataaaatgtaattcttcatgtaattgcgaaatttatttgacataggaatatttatttgtagatatcgaaatcactggtaaataaagaaagaaaaacattcatctcacatttcttcaaagagataccaatctccaaaccaccaatctcatccctccttgccgacatagaaaactcattgttcttgtaaagagacataacatcagtcttaacaggtcttccccacccgaaatccgacccgtatatcccaaattggtttgatcctgtaacagtcacattctgtgtatccaatttcatattttttgttccatcctcatacacttcccatattgactcaatgtttcgtgaacccaaacctctaaccgaatcacttaaaatctcaactccgttaacgtatccatcttttcctagaaacgttgtcgctttgtatccattgaaatcaattggtaagacacaattcccaaaatatgtcaaaggaaccggtggatctaaccggtttctgaaatcagcagcatacataaaccgaaccggtcgattcgcgtctcctccacacgacttaaccatgcaagtcaacacataagcgtacgagactacgaacgttgataaatgaagatcggaccgggttgactcgttcttggctcgttctttaagtttttcgatatccacttccgtcaactcgagcgtgacccgaacaacgtcgttatcgatctctttagccggaggaagcgttaaggttcttgcatagtctttctcctctgagatatacgaagagagctgaaagatcttttgctcgagtccggccggaacattgatgaccgtacgatctaaaaccgtaggtagatcaaaatcttgaggtgtggttccgtgtttacatatatgagcccaagatttatgaaactttgacgcagttttgccgtccatgacgacatggtgaactgttgttccgatggagaaaccttggtttggaaagagagtgatttgtagagaaagaagagacgctgagtcagaggaaacttgtaactcggggacaagaggacgtaattcagtctccagacgaagttctttgctagagatataagagaagtcagcttcggactcgaccactgtgagagagacagtgtctttggggaagatgactatgtgtggtttaggatcttgggggttccatttgaggtgaccggagagtgggaggaagtgggagaggacgagggagagggattgttcgagtttggggaggatggaagagaagaaggagtcacgagatgactcggtgagtttgtagaaggtaactcgctctatgggattgagttttagccatagtaaatcaaagaaagtgagtgggagaacgagtggttcgactgagttagttacaaggctgactcgagagatcttgatcacgtttaaggccatcgttgacggagacaatctcacttggactcttttttttcagacagttttcaaacagactactgttttggtgtgccaaataaacatctattcacttaattatcaaaagcatgggaataaaatatgacaatcccactaccatatgaaagatgcttttggtaggtaaagatgttttttagttatatcatactgcatttcaaaacaaaatgatgcaaaaaaaattccttagacctcaatgattaaaagttttaggtgattacaatgttatgagattttccattacctaaacccatcaaattccctttgaatacaatttttcactagaatatgtgcgcataacttttattttcctctttgtttcgttttcaactaaaactaatgctttgaagcttttaaaaatgagaaaaatgtcagaaaaaattcccagttgtgcaaaagtattgaaaaacaaaatcttcaccttactaggtgatgaaatatataatcaactttcgttcatttctaattaaatcattaaattttgttggtttcttagtttaatagtgaaatttagcactttgccaaaatagtcaattagtcatcatgaatttgactaacgaaataaattaacataattaagtctcggctgaaaatcttaataagtgaacgtagatttcaacagagacgtaacactgttaatttatttcgtcatgcaagcttaacgacgtgactattttggaaaactgaacaaaagtttacgattaaaatgagaagtcaacaaaactttacgatttaactgaaaaatcagcaaaaattgattatatattccattgaagccaaagttggggatttctttcaacattttttcacagttcaagatttttccgacatttttctttttaaaaatagggaaatttctttttgtttttctatcataaaatataggatagttgcactgaaccagcataaaaattaaataatatgccatcaaaccataatttttttaataactattaaaaatttgtgactctttcacagctttcacagcagtagcaacaatgttttacataaaatataccaaaaatacatactatgtataatatattttgagaacccataattatttcctctaaaaaaatttcttcaaatttgttaaaaagttttaagagatttacaacatttgaatatacaaaacatttttaatagttataaatatcttttcatttaatttatatatatatatatatatattatgtatataatatttaagaatctgttatgatagtgtttaacaagagaaaacaattatttatttatttttagtgaattattatgactaatgtagataaaaggaattttttaattttggcggaaaaaagctttcaaaatatttagttcaaacaaatatatagatttgtagcagtataaaatgatttgcgtgattgttgttaaaagctaacaaccgtaaccgcctacaaaacataatgtttgctggtaattggcgaaaaaccaatcaagcaaatttaaaacatgaaaaaaacaaaatcatacattaaacagtggaaattggagagatttgaactaaaaaaaaaaaaatacattccccatcaaaattagaactgacacctccacaattattaaactatccaaactttaaaatatatctcgactaagagaaatcaaaacctcttcatcgatattctctttcaggcctcctccggaaatgatcacctcttatatctatactaagttttcttcatactaaaaagtacatattgtcttgcatcataagatgatcttcttaaagagacaagtgcatattcactcgttcaagttagtagaaatccgacttttcttcttgggatggaatagaacacaatctctcttaataattcattcagatttatggttttcggtagggatgttaaagatgggtaaaagtccagtgggaacccgaaacccgcttaaaatttaaagcctaaagatcaatgtattgttaaaaataaagtaggctcaaaacgagcggatcttatttacgtagagttgtatgtgggctttaccctgtcgggttatggatatccatggacttttttccttctaaacttaatgtactaaaacgacatcattttttctctcctaaaatccctaaatccccaaatttggtttctctacgtgttcttcttctctaccaattttaattcctaaatttgattcatctctatcactctctctcttcaatttgatttgtgataaaccctagtctctaggctccgaagctcactctcgcctctctaggataaaaaaacagagaagaaactcagaaacagagcatttgggaggaagaaaacggacccaattccctttgacccaccggttacaagagtagtcataccttgaagactccacctgttaatatccattgttgtgttgtgtgtgttacgacacttagtcactatagccacaagtataatcagttagaatgataagtttaactagaatctaacccgtggtacaccacggagcaaatattttatttatatatataataatattaaattttaccgttttatatttagtattaaagttatattattttctattaatagtataattaaaaaaattagtgatgataaaaaaataaaataaatatttaacatgtgttatatcaatccaaacccgtctccttgtatttcatatcaatctaaacccgtcctgttatacttctcgtctcatgatattttaatttttatgtttaaatattaataatgtttcataaaattaaaatatatcaataatattctttaaaaataataattgtttttgactttaatgtaatgacattctttataaattcttactttacttcaaaaatacttcaaaaaggtactacaaaagtacttcaaaaaggtacttcaaaatttttaatatatataatgttatgttttggtaaaaattattataaataaagatttagtttaatcataatttgggattgatatacaatacttgtgtttttgactatctattttttattctaataacctaaatttagacattttgttaatcctactatattatttgggaagtacattttaaatgtaaccttaatttttgtaagtaattacataggtatgccattagaaataaaattttaaagagtatctctttaaggattaaaaagtcaaatactagtttaattaattaaatttaattaaaaaacgaaatacattattaatttccaaaaataataaccaatcaaaatcaacatataagatttgatatctaaattttaattaatttaatttaattagaaaaacgaaatacattattaatttccaaaaaagtaaccaattaaaatcaacaaattatatttgatatctaaattatcatattaattttttattaattattatagttcatttctcatctttatatgattctatttttgcggaaaaataatatcatcattataaaaaaataattagagttttttcccatatgtcataatttgaatttttaaaaacaaatataaactgttcaatacataaaaaaatattataacggataaaaaatagatttaagaaaattttctactgagtaacgggtcataatttgaaatatttatattcaatttcatacatattatattgaaaatttataatcttatatactacaataattaataacatattagatgtgattcaatttttaatacaagttgaaaatcctagaattgcatgtttagatcgatattaatacaagatggtatactacaggtgaaactcttaaattaacaatcaaactacaagtgtataatcttaaacactaaacaatatagataatatcaacaaaacatatacaactcacagtttactatacatttaaaatcaaataaaataatatcaaatatttttaaatcatctttataataaaaaaatttagtttaactaaaatatataccgcaggttaatatctagattatagggcttattggatctaaagacggatcatcaaagatttcttaaactgaagcaaaatatattgaatattcaaatatctatctgttaccaaattataaacaaataagtcaatttaatattttatatacgaaatcaattaaatcttaatcacataaaaattagcacaaaaaagtattcatcaattaaaaaaatatcaaatctctgtgttatataagttttgatactatattcgaataaagtgtaatataccttttcaatttgtattctttaactaacttaagctaactaatatatttgctaatcttatacctatcaaaaccgactatcgtttcttatctctatagtatttttgcaagacttttttggtggatttggataaaagtgcattcgggtcatatggtacattctcctattaaataaatatggtgcactcctatgttattatctaaaatatttacattctaattcagagtcatatcattaataaaattaatattaataaaattaatattaacaaaataaatagctttttggcaagacggatttggagggacggatttttgaatcaacattaataaaaaagtaaaatataattaatccatcgttttaatacgggttagatctttaatttattattttttaagaccactaatattaaacatatcaaatcatcctaatttagaaaagattatataaaaccaaaaatgtaatgtggtatgtataatgttactatatataaaattaaactatagatataaatgtattagagaatgatacaatttgcaaaacttttctatataaaaaattattcttaaattttaaaaattactattttaaaaaaaaatcacgggacggtaaaaaaattacagaacgagttctattttggaattgggttatatggtggatgtatttgaatcaatatttataaaattttaaaatattattaatatgctgttttaataggggttaaaacttcagttttttaacaattatctcatggattcgtggtataccgttacttaataacaattataaactgtataatataaatattttataaaagtaaaatttgcaagttttaatatatactacttttaaaaaaaaaatcatcccacgggttacaatctagtctatattattaattgggaagcattgtgtgattgaagggtagtttataactaattaaataaattttttacataggtaatatagtaatttaacaactaatccaaaacacattaatgagtttaataggctaacaaatagtatggatcttttaacacacacgcaaaataattcaaaaatagaattcatgtttgaattgattcgactaattgtatttgactaccttgcgcacccaactttattgttcttcatggatgtactttgaaaaatatgcatagataatcatatattatttatataaatttgtgtttgaactatataatataaatcgtatatagttacaatatgatacgtacaaacatatatatgcaatatggttcagttcatatggtcacatggaagctcaactaatataattatagaaatctgtttcgaattagattagtttgttatataaattatacggagcattttgaattagatttgtttgttatataaattataaaaatctgtataaatctaaactaatatatatggtaatcatttaatgctcaataatatcctattcgtttgttgtaaattctaacaacacggagaatattgtagcaacatgaataatcatttaatatttctaacaattatcataactctaaaattttggatcattctgaaagtaaaaaaccacacacacgttttgaacaatctctttttactaataccattgcttatacaaaaatgaatgtacttgctttggtcacagaccttgctaacgtaaagcctttcaaaatcgaatggaaaaatccaagttaagattttgtattcatggacttaatacacggaatactcagaagaaaccatggaaatgatcctacctgataaaaatgtaagtattgattttcgtttaaatctaggttatatcaggattgtatcttttatattattaacacaattgtatttcactaatttactaatttacagggaactttgatacatgctactattaagaaacaacatatgagagcacgcaaaaccaaactatttatataaataaaacactaataaatgatgcaaaaattgttaaactttaaataactaaaatttctattcaaattttaaaactaagaaacagaaaataaacgtgtaaaccaaagtaattttaagaacaaaagaaaaatttccaatgaaatattactattatgatatctctgctactatataattcactaacccaaaataaaataaaatcttaactaaaagtttttgcaaaaaatattgtttttacattaccttccatacatcttattttcaaatattatgataactgataaatttatgatatatatactattatataattcactaacacaaaaaaattaatacaaacttttatcaaaaccatatgataatacttataactcgcatattgtgcggttcacaacattagctattgtatcataaataacaattatacacttttctatgcacattataatttatatattacaatatctttcactaaaaaattattccaatacatttcttaaaatacgaaaccccgcacgtacgtgcgggtcagaatctagtattatttgaatcagcaatatcaacttaatacatgtacaatttatttatgccaaaaaaaaaaacaaaattattttgtacaattgcaaatttaaaacgaaaaatatggattgagataatttgggtttcaattttttattacgtaattaaatttttaatgaaaatattaaagcatatattgtaatataagatttgattcattttattaactgaaaataaatgatttaaaacaaaaaatcagggtgattaatgctaattggaaagatttaaatgtttttgtgattttttttttagtttcctaaactttagtaacataatagattttatatttagatttaaaaataagtttagtaaaacaataaatgtcgatggcatgccattataaatcagtgtcaggatttatttattaaagtggctgcaaaaatgtatatgtagatgacgctaaatataaatatattcagaaaatacagaaaatgaatacaatttaaaatatatctctatataattcgagtacttacagatagtttcaaaacacatggatttttgggattttacccacaagttctaaaatccattcgagtttttttaaaatttgagatttttatgggtgggttcaatttgggttagggctggactgtttttttttaccacgacaacatccctagcttccggagatgtcactaaacttcatgtccaattctggtggaaactttagtgaaaattggtggaaacttgggctaatgggtacaaagaagaaagtctcatgaatcaaatcaagactgtattgaataaattatttatccgaaacgggtctagatcatattatttcacatcttactgtaatgattgactttaaagaatatagatcaaaaacctatagtatcacacacataatactccaaaatcatttaaaaataaaaccaaaggaatgttatttttatttatagaaattctaataaatcaccaaaaatttatagaattcacataaatcccaccaatctaaaatccacaaaatctttgaatcactctttcaatacaaagtgtgtattacacataactttttcaactttacattcaaaatatacacctaactactttaccaaaatctttaaaacacaaatatatgacatacaatgatacaaatataacggataaatctgcattaaattctttgcttggactttggattttttttcatgccccatcgaatgaattcaagatacagatttttccttttaacaactgaactcacttatttagaagacgatacaatgtaatgatcatttaaatccagatttaactttcaattgtcaaatccattactaaataaagaaaggaaaacaatcatctcacatctcttcaaagagaccccaatctcatccctcctcgctgacatagaaaagctattgttcttgtaaagagacataacatcagtattaactggtcttccccacccaaaatccgccccatatatcccaaactggttcgacccggtaacagtcaatacttttgtaccaaccttcatgtttttagttccttcctcgtacacctcccaaactgactcaagacttcgtgaacccaaacctttgaccgaatcacttaaaatctcaacaccgttgacgaatccatcttctcccaaaaaggtcgtcgcttcatatccattaaaatcaattggtaaaacacaattcccaaaatatgttaaaggaaccggtggatctaaccggtttctaaaatcagcagcataaataaaccgaatcggtctatccacactgccccatgcgccttaatcacacaagtcaacacataagtgtacgtgacgaatgatcatttcttgtgtccttttttgggacaactaatctgcaaaaccactttagagtcttcatatcccctttgagttaatgatttgtgttaagacgaatttatccctgtaatttattttgaatgaataattagaataattaatagaaaacattttgaaaaaaaaaaaaacggaaaaagaaaaaaaaaaagctcgagcacgagctcgacttcttcttcgggattcttcctccggcgagctccggcaagctccggcgagccgcattgtcgtttttctcctcctgcaagctgcatcaatctactaagtccaggtatgaagagagcttcaaaagctttgaattacatattttgaggattttgagattcaatccaattagatttgggttattgtgttttagcacctatattagaagtttaagtatagatttaggcttcatttggtctgttaatgggtaagcaattgatttcacatgctgattcatactaaattgaactcaaatcgaatatttgttcttgtcgcgaaaataatactggtcgaactagctatagtagtaccgtaatttatatagatagtatgttttaatagcaccaatattacttaaacacgtagtatttcatatatgtaatagtattactcacacatgtaatatttcagaattagtactagtattactgtaaatgtactagaatcggtaatactagtaatattgactgagtatgtgtattgttttggcaggttacaatgaaagagaacatgatcatatattttaaattccaaggtcgcatgtataatgtgatgatgaagagattaagggagaagattactctctcagtgttagaagataggataatgacgaagcttggattagatgcaaataaggtaaaattgcatatgaggtacaatccacggttgttcggagtagaggaagaaatgaacgtttgtgatgatgaggatgtctttgtttatgtaacatccgcaaaaaataatcggagaagtgttttggttgtggaggagatctctaaaccgcccgagccggggcaattgcccgagcaattgtctagagttggtaaaagttctgttggtaagaactatacggagttgaattcagaggaggatgaaatgagagtggatgatggtgcactcatcgtcttattagaagaggaacaaggaactcaacatcaacttgaggcaatagtggaggatcacgggactcaatattaacttgaggcaatagtggaggatcacggaactcaacatcaacttgaggcaatagtggaggatcacgggactcaagaagatgaaacacgctatgatgagtctatggataattctgataggggggaacagtatgttgagtcgccacctgctgtagaaccgggtatgtttaaaaaagaatgggaagacggaattgggttgaccttacgtcaagaatttccaaacaaggcggcattgcacgaggtggtggattgagctgcatttgctaacagttttggttatgtgattaagaagtcggataaggagcgctatgtcctaaagtgtgccaaagagagctgttcttggcgtttacgagcgtccaatatcagtaatactgatatattctcgattagaaggtacaataagatgcatagttgcactcggctaagtaaaggtagtagtaggctcaggaaaaaaaacgcaacccacaattagtcgcagctctccttcatgatcattttccgggatagttggaaactccggttccaagaattatcatggagctagttcagacgaagttaggtgtgaaagtatcatactcgacagcgctaagggggaaatatcatgcgatttatgatttaaaaggtaccccggaagaaagctacaaggatatcaattgttatttatacatgttgaagaaggtaaatgatggtacagttacttatctgaaattggatgagaatgataaatttcagtacgtatttgtagctttgggagctagcattgaaggttttagagtgatgaggaaagttttaattgtggacgtattcgtagctttgggagctagcattgaaggttttagagtgatgaggaaagttttaattgtggatgcaacacatttgaagaacggatatggcggagtgctagtgtttgcctcggctcaagatcctaaccgtcaccattacatcataacgtttgccgtactcgacagtgagaatgatgctagttgggagtggtttttcgagaagctaaaaacggttgtacccgatacttaagaattggttttcatgacggatagaaatgcaagcctcataaaggccatacggaacgtgtataccgcggctcatcacgggtattgtatttggcatttgtcccaaaatgtgaaaggtcatgttactcacaccaaccgagacgtactcgcatggaagtttcaggagttaagtcgggtctacgtcgtggcggacttcaaccgagcgtatgacgggtttaagttgagatatcctaaggcgaccaagtatttggaggatacaaccgtgaaagaaaaatggacaaggtgttgttttcccggagaaagatacaacttagacacaagcaattgtgtggaatctttgaacaatgtgtttaaaaacgcaaggaaatactcgttaataccaatgcttgatgcgatcatcaaaaaaatctccgtttggtttaatgaacatcggatggaagccgcgtctggatctttagaaaataagatggtgcctttggtcgagaattatttgcatgatttgtgggtttttgccgagaatatgtagtcacatgcgacaaaggaatagattatacggtgagcttgcttttgaaaacttgcagttgcaaggttttcgatatccaaaaatatccttgtattcatgcattagccgctttcattaacattatggatgatgaagatcggagaagaggtttggagttacatgatttggttacaaaatattattgggcggagttgtgggtattggcctattataggactatttatcttgttccggataggtcgcagtgggaaataccagatgaagtaaaggcgttgaagatagttccgctgtctaaaaaaccgaagaaaggaaggaaaaatatgctaaggtttccatcaaccggggaaaagcagccaaaacgacaaaggacgcaaaacaaaaggcgtccaaggcaatcgtgtcaatgattattatttgggaatacgcctatctgagttttttactttgtttctgcagtgatttgttgtttttatggtatggacttactatgtaatactgtatttcccctttctgtaatactatgtctgtttctattgtttttttgtaatattggttataacaagtaatatcatgtctgtttctgtcgaatttgtggtcatattagtactactggtaatactaagttggtgttatggagttcgaatttgtttacctcaaaactcaatgaaaatgaatacagtgagttataaacagataaaaatgtattattaatcatttatacttaattaagttagaaattttaatattaaatcgttttaacttatttttagtagactcaatacaacatatcccttatacttttaagctcacttttaatattatcaccaacttaaaatgaaaaattcacattgctacatatatttaatttataattgcacaaaatatttaaacctctatatttataaagttcaatctagtgtactactaaataaacaaattgtaaatataggaaatactgctaaacatgaaaaacatggaaagtaatactatttgagaaattggcactaccaaaaccttagaaaatactatgctgtaaaaaggctgcgcacatgtcaaaaatctccaaaaaacggcgcacacgtggggaattaatttttttggttttcccccaaaatttttggcgcctaacaaattttgagattccctccaaaaccaaaaatttcacttttttctttttcctctttctttttcgatcttttcttacaactttctttcatctctcatctctcttctcccacatctctcatctctctcttcgactcgaattctctcacatctctcatctttctttcatctttctaccatggatagactgtgtgagagagacccctactacgatgatatgaaagtggcgaagagagccattgagcaaatggaaatggttgcgatgatggaagggattcctaagttttgtccatgcggtggtagcattgtcgacactcgaaaggatgaaaagagatactatcaatgcgagaagtttaaggtatgttgatgtagagcacaagtttttcaagtttgtgtagatctagatctagatatatttggtatttcagagtatttcccgttatggtaatactgcctagaacaagtaatactgcacaagtttttctaggttttgtagatctagatctatatttgataaatatttggtactttgtaggatgatagaactgattgtatgcacatccgtaaactttgggataaggctatggaagaagaggtgagtagcttaagggagagtgttgattacaatcggaagaaagttctaagtcatgagtatctcatagaagaaatgcaaaaagaattgaaagcccaccgtgcagagattgtgaacgtgagcaaagtgttattccgtaatcctatggctccaaagaagtaatgtgttatcctattgttccttaatcttattgttaatttgcttgtaagactttccctatgctttgtaagactttctgtatgctttgtaagactttcccttcgattgtaagacttctctttgattggtaatactatggttgttcagtttgatatttccagtatatctcttagtagtaatagcacgaggtatttcccgtatttcagttaacaatatcataaaacatcctaatacattaattgaatacaaacatagttttacgagtacttgcgaaatcctaaaacaaagtcaaagtacaagaaatcaaaatacaaatccggagaagttacacgaatagttttcacacgttactagactttgcacgggttgaacgggtcactcgtttgggcacaacaggagcagccgcattttccttaattgttgattcctcctcatctggtgggttctgagacatctacattgttaatttagttaaaccttggtattacgcgatattaccaattatggaacagtatatccggtattacccagatttaccttggctttcatctcatccataaatgcttcgaacgttgcttgtttttcctctatttccataagcaccaacaaagcttcattcagcttatcattgatggaatggagcttctccattacatcaactaacgtcgggtctcccggtccaacagctgtgggaacttcctcttcatttggggcttccattcgtgcctgcacatcctcgttgtacacctcctcaaatctaatttcacgcccttgaccaagacgcttcatccaactatcaactacaacatcgtgcttatcaacatcatcctctactcccgtgatttcagccaaaagaggtacttcttcagccttctctctaattatactctcaatgacctatggaaataatagacaatgaaatattagaaagaaataaaatcatatttgctcaaggaataataggaaatactaacctcagttgttccgagtacatggttgatttgctcaagggtaaatcctttcatctcgatcctcttgaaattcaccttgcacatcctttgacaaccggcatgtgcaccctctttttcttctatgaatctttccctaagtgatggaatggcttcaaatgctaaaaactacacaaaccacatgaaatttaattgttagcttcaattacgaaaatgtaacaaggataaaacatgtgacttacctcaagcggcacacagaatccgggaacaggccatggtgactgagtgttcgggacgacaccgttaaaatgatccaatttgtgtgagatcgattttaacatgtactcaaatgaatatctccccgatggaaatatcttacaaaacgtaagatcacttgcagacctcacacagaaatcatcaattggactagccctttctccggtcttagtaggcatgacaatgatgctagttagaaaatagagggccgccatccgcaacctatcctttgatctagccggttccatctccattagcttggttttcacgtcttcacgtctaattaccccggttttgaagtacctgttggcgaagttcatattaccagcactctgataactagctggataggccttgcagttgaaaccagagatcaaagcatgctccctaataccatagcggatgggaactccattaacaacgaaccaaacctccttcttcttctcaatagatgccgttcgaagaaaaagcatccacatccgcattaacttgtgggtatatccggaaggcaggtggtagatgtgcttgaaactcggatgctccataaaataattcttctcaacatgcgttagaggatgttccaagtcagcgaaggtcttcaacacctccgagatataacacctcgttgctaacttcatcttcttgggatactccgacaccgggaagtacataccaagtggctgcattgccatcgcttcctccatatcctgaaagaaacaaacattcattcatatatcactcaattgtaaatagtactgccacagtattactctgtatttccaaaagtattccccgaaattaccagtattacacaaatcctactattcatatatcactcaattgtaaatagtactgccacagtattactctgaatttctcagaagtattccccgtaattaccagtattacacagatactcctattttactatgtagtatttctcaaagttactagtactaactatcgataaatcacaattgtagtattactctaaggtattacccacatccgccaatattacctaaatatcaacatagcatttcccaatgttactagtactgtccacagttcacaattgcattattacccaattagatcggtattacgaaatggaatacttaccacatttgcgatgtcctcgtctatggtcctctcctccccggatttttccactatcacgtcctcgtctctctcgtcctcgtgtccctcatcctccacggacttttccacattgacgtcctcgtcgctctcagagctcctctcctcctcctcctcgataacggttaggccgtcatcttgtctctccgcctcttccacgggattagcacacgcgagttctttgtttgtctccgtctcctctgaatcggaatcggagcccaaggttcggctactactccctgattcttcttcttcacttgcttcttcttttcattttcatcttccacctcatcagtttgcatattctcttgaatttcttcagcaggaatatgcttcagagcatcataaaacgtagaatcatcaagcatcgggctctccgtcgttggagccgtcgttggagccgttgtcgttggagccgctgtcgttggagccgcattggttgccatcgccgtcgcagtcgtttgtgttggcgactgctcctcagccggcactttctctttatctttcttcgccggcgcctgaaccttcgctttcttcgccggcgcctgaaccttcgctttcttcgacggcgcctgaaccttcgctttcttcgccggcaccttctccttcactttctccgccggcgccttccttcactttctccgccggtgccttaactttctctgtcttcgccggcgccgacgcttctatctcatttcttttcccttgacctcctccacgcgtcttaggcggcatgactgatttcgaatcggaaatagaacggaaatactggtgaaaggaagaagaacgatcgattgaatttaaagaaatagggaatgttgcggttaatttcagcggttactaaggagaagaagaagaaaaatcaaaaacggttgtaatgagaaaaagaatgaaattcgaattgggaaatccctggaaatattagagtttttcttatttgattttcaaataaagagtaaaggtggttcgggtggtttggttcggaaacgaaccatgatttttctggtaattaataggttcggatggggatatactagtaatatccatatatttcgaattaaaaaaaaaaaaaattatttctgttttttacaaggattttttggcttcctctttgcaaaaaagggactggccagatgatttttcgtacgtgactacaaacgttgatagaagaagatcggaccaagttgactcgttcttggcttgttctttaagtttcttgatgttcgcttcactcaactcgagcgtgacccgaaccacgttgatgttctctttagcgggaggcagcattaaatttcttgcattgactttctcctttgagagatatggcaagagttgaaagagttttggttcgagtccggccggaacattgatgaccgtacgatctaaaaccataggtagatcaaaatcttgtggtatgttcccgtgtttacatatatgagcccaagctttgtaaaacttggacgctgttttgccgtccatgacgacatggtgaactatggttccaatggaaaagccttggtttgggaaaaaagtgatttgtatagacagaatcgatgctgagtcagaggaaacttgtaactcggggacaagaggacgtaattcagcctccagacgaagttctttgctagagatataagagaagtcagcttcggactcgaccactgtgagagagacagtgtctttggggaagatgactatgtgtggtttaggatcttgggggttccatttgaggtaaccggatagtgggagaaagtgtgagaggaagagggagagggattattcgagcttgggttggatcgaggagaagaaggagtcacgagatgactcggtgagtttgtagaaggtgactctctctgtgggataaagttttagccaaagtaaatcaaagaaagtgagtggaagaacgagtagttcgactgagttagttgcagggctcactcgagcgatctagatcacgtttaaggccatcgttgacggagacaatctatcttgggcagtcttcgaacagacgagtgtttggtgtgtgccaaagtaaaactttattcaccaattatcaaaagcatatgaaagatgctcagggtaggtaaagcccactacaggaaaattgagtattcttagcggtcgaataagctatctaacgagatgatagcggagtagaaagcgctatatcttcgtccatgataataggtcgatgacttctaatagcagttttaagtagtgctatattttgattatatattatagcgtgttctttttgcaatttaatattatttaataatgattatattttgttattaattattaaataacagtatttaatatatgcaatttaataaattggaataacatttataatatgcaatttattcaattaaaatagcatttatatatatgcaatttattccactaaaatagcttttgtattatcattatttcggtttgttatatttgtaattatatattattttaatttatgaggttttttggataaattgagtattgacatataaatatattatattttattacattatatgaaatcataacacaaaaacaatatattacaaagtatatacaaattttttttaaaaaaaagtaaaagtacatatattagtagaaactcttatatgaactagatgagtacccgcactacgtgcgggcttatgtagtttacgactcttaaagttatttttattcaatattaaattatctattcctataaaattgagagactaccacataaaccttgtgtagaaatgtaacacatcaacaaggttaacataaaccttgtgtagaaatgtaacacatcaacaagattagcatctgttcttttgatgcttccggcctttgacatctttgtccgttgttttatttttaacctatccaattcgtgttataaatccagtgttttgtgtaatttgaaatttagatgtttaggcaaatagaataccttgaagagcaagccttcccaccgttatattctcctttgccgcatcaccatcgtcaggattgtcaccattgctctcgtccttggtcatgatatattaataattaatcaatagataaatatacctcagtttcttctcctccatctacatgtagcacatgttaatgattgtagttgattttgttcttgcaatctgaaaaaagaaaacatatgaatatatgatgttagtttactcttacaatcccaagaaataatttaaaagagattgaaaagtaagacatgcatgtatttataattttatatgggagctaattaaatatttacgttatgtaacatataagtggatatgattagaagtttaaaagttattaaaaattaaaatgaaattaataccaataagttgtatacatcatgctcttggggaagtttggataagaatagttgggtatttgaaacgtccaaatattattcatgaatcatgaatagttgagtacttcgtaaatgcataatcgtggatatgagattttatgtagattaaatcctggctttacttagagctgattaattatttatttgtttattttaataggtacacgtggcgagctattagatgctgacgtgtcaagcagatggagaaagatagcctcctttcatatatatgattcatcttgtaaacctcactgtaaacatgacaccaattttcgctgcatccaacacacacaaagcctttatcctgcaaacaccaaattctcattaacactgataataggtttttaagatcaattaatcctaaagcactatcatgttgttgtagtactgaaggttgtcaattcaaatgggtatgatgctaacaatcaagatgtgatcagaagtcactaagtcaagccaagcaataacaggttttggtgtgttctagcagtcctaagtgaacatgcagaaaacagaaaatcaaatagaaacagtaaaacactcgaccaacacagctctttgcagagcactgggtgaggtcgagtaacagacagaaagtataacacagatactcgactgcacagtctgttgccagacaactgggtggtcgagtatgaggtcgagtaacaagaaagaattgtagaaattaagcaacaaatgacaagatgcagtaaacaacagtaaagtaaacaaagaattcaatcagataaagaattcccgaggatggggtaattgagtagtttcgtttcctcagtttacaagtgattgtcatgctcaataaattgtccctagacaacaagttcattaaccaaatctaagtgccaccgcaacagagaccctcaagttaacctagtcccagactcaatcaccattgacgagagctaacctaacatgcattacgaatcaacaagttaaagccaaaacgctctctgcatccaataccttggtacatggccacgaatctctggaattagtggttcagacatttcatcgaacaccttttgggcgcggagatgtctgggctcaaattccagttgatcagaaagcaataagcattaagaacaactaatccagaagggatctatcaatcaatactcaaccacctagcatactaagaattctacacttactctaacccatcctcagaaacctattcactactcagacatcatagcagaaagcataaacgttgaacaagttgaaaacatgataacaacagtgtaacaacaggatgataacagaatgaacaacagtaaactaaaatcaagaacaaatactgaatacttaatagataaagagaaatccggattacaaaaggtctagaacacagtgtctgcagaataaaactagataaaaacttgtttgcgaaaatgtgaagtacatgctacttatagccaaatattctgaaaccctaatacttaaaacgacgcagtattgggacggattaagaactgtactcgacccatgtggtcgagtgggaggtcgagtgaatagctggagtcttcttttcttccttgttctcgagtgtttggttgagtacggaatgaagaagactctgaagcttgccagcgagtgtgtagtcgaatggtggtgatggtgatactcgacttcctggtagagtgatgtggtcgagtgatgatcaggtaatggaggtgaagacactcgacctcggggtcgagtgatgtgatcgagtggtggtaaggtgatggagatgaagacactcgacctcgtggtcgagtggtgaggtgaagtggtgatgtcctctactcgaccagggggtcgagtggtctgctgaggttgtgaatcgtctactcgacctaggggtcgagtggttttgcatgatcaggtccgcttcttccaattagctcgtcaacaactccgaatcacctgaaaacaacacaaatatgcaacatgcatgcaaaactatcctaaacatgcaaagtgatgacaaatgatgagaaatgatataaaatagtgatgatatgatgctaaagtgatgacaaatggatgctcaaaacatgcaaaatacacacttatcaaacacctcacatcaatttcttaaagtaccaattctacttaatctagacatttgcgccaattcaaattacagaaatatataattctcagatcccactaggcactagttatggcctcagacaaatccaagtaacataatgttgtaaatctttgttttcatatttctcattgtcttacacaacatcactaccacatttaattaacaaaaaaaatttatagaagaaaataagacaacaactctttaaccactacacaaccattcccactagacttacttaactcttaaacttagtttagtctttacttaaaaaaataaaatacaaattgatgcaaaagaaaaccaaagaaaacagattgcttgtcaaacaagcaaaacaaattttgatgaaaataactgaagagcttgagaggaagttttttttttctcacttaaagattttcattatataatacatcggagaaatatatttttgggatgcgtttttgaaatacaaaagccggggcaaaacaaaaatatctccgaaagataaagcccgatacaccggaaacagaaggaaatatactaaagtcaaaaagaaaagctctcgaaatcattagaaaagtcggaggagaacaataactgcgggattaagagcttaaaggtcaaagtctagaaaacccacaatcgcggaatttagagctcaaaggtctcgaacatacctagcaatctcaaatatgagtctccttcttagatttgagtatagcatgttgatttcggatgagtaagattcaaagaaactagctcaatacacacaattggacaagcaaaagccacaaataatcattcaattgtaaatttagaatcttgacaccattgacaaacccatattcccacaaaaatgccatcgaaaaacattcatctcacatttcttcaaacatatactaatctccacaccacctatttcatccctcctcgctgacatagaaaactcaccgttttggtaaagagacatcatttaagtgttaaccggtcttccccacccaaaatccaatccatataaccaatattggtttgacccggtaacagttaatacttgtgtacccaacttcatgtgtttagttccttcttcgtacacttcccacaatgactcaacacgtcgtgaacccaaacttttgatggaatcacttagaatctccacgccattcacaaacccatcttctcccaaaatgtatgtcaattggtaagacacaattcccaaagtatgtcaaaggaaccggagggtctaaacggtttctaaaatcagcagcgtacataaaccgaattggtctatctacattgcctccacgcgccttaaccacacaagtcaacacataagcatacttgactacaaacgttgacaagtaaagatcagaccgagttgactcattcttggttcgttctttaagtttcttgatattttcttgagacagctggagcgtgacccggacaaggtcgtcgtcaatctctttagcggaaggagactttaaggttcttgtgtcgttgtctacgtctcctgatagatacgacaggagttgcaagatcttaaattcgagtccgacagaaacattgatcaccgtacgatccgaatgtgtaggtaaaacaaaaccttgtggtatggttccgtatttacatatatgagcccaagatttgtgaaaatttgttgaggttttgccgtccatgatgacatgatgggttgtgagcccaagagagaagccttggtttgggaagagagtgatttgtagagcaagaatagatgaagagttagaggaagtttctaacgtagggataagagaacgtaacttgctctcgagacgaggctctttgccggagagtcttgagaagtcagcgtcggactcaaccacagtgaagagacagtgtcttgtgggaagatgatgacatgtggcttaggatcttgtggatcccatttgatgtgaccagagagtgggaggaagttagtgagggcaagggagagagattgctcgagctttgggaggattgtggagaagaaagagtcgtgagatgatgactcagagagtttgtaaaaggtgactcgctcgatgggatggtgttttagccaaagtaaatcgaagaaagtgagtgggaggaagagcggggtgactgagttagttgcatggctgactcgggagatcttgatcatgttaagagccatcgttgatggagacaatttcacttggactcaatttcaggtatttgtttcaaaacaaaatttcaccttagccttctatctcagtttttcttttagaaagtggcaaagtgggctgggccaatcaggttttagccatttgggcttaagtggacgaatataccctccaataagaaatgaaacgaggcggttttctttgtttttctgtttatgaaaataatatttaaactttaaaataaatcaaaaacaagttaataattttaaaactaccaaaaaaaaataaaagaaaatcaaaaactcttttcgaagacgcagaacaattctgacgaaacttaaacccatattgaaagtgaaatttcgattgaggctctcttcgagttcaagtcgttgcttaagtggaggaaattttgatcgagttcgtgttaaagtgtctaacaataagaggatttttgggtttctcaattcactgtttatagaagaactcaaatggcagagatgaagaagagtagtcggcgacgaggagtttccgaatttagtgtcgaagacgcaaaatcaaaaactgttttgaagacgcagaacaattccgacgaaacttaaacccagatcgaaagtgaaatttcgattgaggctctgttcgaattcgagtcgttgcttaagtggaggaaattttgatcgagttcgtgttaaagtgtctaacaataagaggattttcgggtttctcgattcactttttatagaagtactcaaatggcggagatgaagtagattagtcggcggcgaggagtttccaaagttaatgtcatcggcggcgacgacaaatatgggtaagtttgccctaacttcgtttgggaatgttttgatacaaaatttaggttaattttagagatttcaaatcagaaaatttcaattgacaaagggtttttagtgtttccgctaaaaacagtagattgagtataaaatttacggtgtacgtgtatatgaatatcaagtttatgtttagtttgtatttggatatagtgtacgtcttaagaacttcatcgtatttttcaactttcaggaagtacttctaaggatcctggtgaattaccacagaggttgtttgcactcgaccactacccaaccaaggctaagataaatgcgtactctaaaccggagtaccttagtcatctagcatatgcgcttaagggaataccagaaataacgttccttctagagtctccatttagggacctatttaggatccctgttaacaagccatctttttctggtaaacttgttcttgggttaatatgccgtcagttagttacaaagaaatgatatgagatgtagatggtattcggtgatcatcctattaagttaggattaagataatgagcacttttaactggtttggaatgtggaacctatcctaaaaatatgactttgacttggtacatagatgaaactgctagatcctttgtagcttgcgatattatgctagtatcctttccctcaatatccacatgaacaagttcaatatgttcaaaatcctccagaaaactctttaagtgtttcaactcttcagcagttccgcaataagcaagaacatgcaacaccctcacttggttcagaggcatggagaaatcacctgtgtaaccattcagatcctaaaaaaacattaatcaagaagattgatcaaccacacaatttgtatatatatattgattcatagatttttcttactgaatatatatatatataccttgatggttagattttcaagctttggagaatgcttaagtacacatttgcgagcaattaccaaccatcttcattcataagacctaaagataacttaattagactgttgaacacagttagacaatcttcatagaaggaacaaatcaaacaaatcttctgaaaacaaaaacaaactttaagactgtcccaagatttctcaaaacgaaacaaggaaaattgccgagacgcaaagaacttacatcgaccgaaccaggagacaaatgaaggatctcaacattaatttcttatccccataatgagtttcattacatctgcatccgcaatgcctggtggatcaaaatccagcgtgtagcatgtcaggagtccatattaacttgtggatactgacacaaggagaaactagaatagttgaggtatacaagatttggcaggtcaaatgataggctgctattaataacacgacttcgataataaactgatagtctcttgagagacgggctcaatatggtgttgttaggtattgttggtttgcctctgataaggagtgtgttaaggaatattgttaacacctaaagcactcggcaaccaacaagaagcgtgcaaagcaaatcatcatgtttatcgataatcgtatctatgtagagaaacttaagagatggaagtgacacatatgaaggaaggtttctaagagggagccttagtgacagcttaacaagtgttttgcttgcaaagagctggtgaggcaaacattatgcatctcgatcttttatccttagttcaatttccaaaacaccacgttttatgacatgagagatccaactgcccacataagccttttgcctttgattctcctttggaaccttacattttagagagaatttcttgatcagaaagtcacattgctaagtcagagttcaatccacaaaattcttgaagctattattcaagaaagaatcatcaaaatcgagagtatccaccaagctaaacatatacctccacttttttgagaggacaaatgttgaagcagcttgttttgtctttttttatgtatgaatgttaaatttattcaccaaaaaagactgttttacaaaaaatgcaacatcaagctgaacgtttgagaagaaaaattaaagacgaacaactgaaatatagttaattcggatgagtatggaaccaatatcgtagcccaccttcgtaggtaggggaggccagcaaagtactaagctggtttcgaacatttttatcgaccatttttgctagcgtgttgggtggagttggtggttccccgtgtttcctcccattccgttcccgccatacactatggatggataactgaaacacatatcgcaagacaaaaagatggacctttggaattggtaaagtcgtaagcatggaaatcagagactcccaatgagttgtgtagtgttgtccaagcaagtgccgggtgaaggcggaccaaacctgagtcgaatatgaacaagagaaaaagagatggtcccttgtttcgatatcctcatgacacaagacacaattaccacttacggcaacattccaattgagcattctgtcaccagtcgctaagcgattacgaactgcgatccatgctatgaaagagtacttaggtgtagatttgggaaaccatacacctttgtaccattcacatattgtatatgttgtcgtatcgcatgccaagtttctcttcagatgaaaacattctcgaaagtgccattgtttctttttcaaagaaaattgtccttcccagaatgatgagtagggcgtgagtttaggactctaattcatcctcaatccggttgagcaaaacagacctatgacgacgacggtgcgctgagaggccttctgcaactgagcaagtaaaggagatacctaaatcaatgcatccacgaggacctaaaagatccgtcaacctaccaagagaacaccaataatcataccaaaaggaggtatctgaaccgctatttacctccaatctttgtaaagattttgccttgtctcgatactttagaatttttctccacatccaagaaccaatacttgtagatccgtttaccggccataaggattttgatcgtaacagagttgctctgacccagagagaatctttggtagagacgagtcgccaaataagcttcagtaaaacagtgttcgtttcagatagcgaccttagccccatccccccccccttgagaggagactttcaagttcctttatgcacttactaggcaacctgaagactgagagccagaagcttgtgatgctcgatagaaccgaatttagcagttgtaagcgacccgcaaacgataaaaaccgatctgtcaaagaagcgattctagatcgtattttctcaagaagtgggagatagtcggaacgtgtcatactttttgtgagaagcgggagaccaagatacttgaccggaagtgttcccgcaacaaaaggaaattggtgaagcagattatctatacgctgaggtgagcaacctgccataaacaacgtcgatttctctaagctgatttatagacccgaaaatcctggaaagttcccaaagacctgtagtaatgctgctatggatcgagcactaccatctgaaaaaaccaaactgtcgtccgcaaaacacaaatgactgcatgagtcccatgtttttaaaccaaggatggtacccaatatcattatccctagccgctttgtcaagcattttagacagaacattcatacaaatgacgatgaaataaggtgagagggagcagccttgtctcaaccctcatttgctttggaagtaacctgccaattcttccattgacttgaaccgaaaaagatgcagtaccaatacagagttcaatccatcgaacaaaaaccagcgggagataataaccttttagaaccgtgagaagaaaaggtcattggaccgagtcaaaagcctttgatatatcaatctttaatgcacaccttgcggagattgattccttatatcataaggatacactacaagaaaacaggtgattgacgacctacaagtcagtcgtttagtagtcgtaactaaagctaatacgactaatttgcgactaatgactgtagtcattaatccatagtcgctaaaaacactagtcgttaattagtcgttggtcaacgacaataatacgacaactgactaaacagtgaaaaatcgtcgttacgtagtcgtactatgtcggcgactaattgacgactatcctacgattatttgtactgtacagagcgtgtgagaacatgtagtcgtttcgtagtcgttaattgtgtacgacgacattacgacgatgttgcgatgaaatattctaaaccttgggtatgtttccaattgtcgtaaaatagtcgtaaatatgtttacgactattcgacgactctttgacgattaaaagtactttaccaaggatttgaaagtttttgtcataacatagtcgtataagtatatacgactattggacgtctgttttacgattcttttatgactaatttgtttagtcttatgattgtcgtaaagttatgtgactaattgacgactattcagcgactatagtgctacttatttactacttttttgcgactaatagtttggtccgaataaagatttggtcatcaggtgatgggtttcttgtttgttcttgtttattcatcgattgttcttgtttgttattgatatgctatacaatatgaaaacactgcttatatattgaaaatcaagttcaaaacataaaattatcttgttcaaacatacaacttattgaaagatacaactagtgtttggaaacctaaattctatggatcattagatgggggagtaattgggatacgctctgtggatgtggaagagtgtgtggcaatgaagtccaagaactgcggatcggtttggcggagatacttctcgactaaggacaagtgctcgagcttgtccttttgcttagctgtgactcgggctgtctcggcttctcgggcagcaatctcagcatctcgcttttcgttatatgcagcctgttcttcaatttgccgctgagcttcctgcagccgttcttctaaggctttaaaggttgagtctccggggagttggcggttggcactgcctagagtttctttaagacagccaagttcataaggattgcctcttgcatccttttctgtggactgcaagaaataaagaggaagataattagtgacagatcctaaatgtctctaagactctgaaaaagacaaagaacatcttacctcgagaaatatggctgcatactcatctagtgtgagatcccgaggacgtgaagagccatcagacacagaagaagcagccgcctctagttcagacaactctctcacattctgctcatacgccagagcaatcttctctgccttctgatcaacataagtcccatccgacttagtgtgtgtttggatgaacacctcaccaagagggacaggtcttcccattttttcttcctgcaaacacagatcacaagcttcattactatcaacagactaaacatcacacacagttaaacgaacatcactaaaacacatgggaagattgcagaaacacttaccaattcatcttggatttcttggaaagactttggcccagagtagtggacgtgaggaccgagaccgttacggtcagagagacgagctttggaatatgtcttactccttttttgtgcctcttcagtgtcccagtagtcgcacatggttccccacagagtttctccaatccatggaggctgctctcgagttctccttgcggtgctaaccatgtccttcaagcgcctcttaacgatctcattgaagtagtattggactgtccctgttattaagagatcccagtggtgagttttctacaaaaaaagtgtgaagttagtgaacaaatgacagattaaatagtacagtctaatgaaagttggagaaatacaagaagcttaccgcaaactctaaaaacaatctttctcttttatccaatggcacacaggaccaattatagtagggagcattgaacttttgagtaaaaatccatgtgatctttctaaccaatttagatcctctgtcgcgagtaaacctccaaacacatgcaacacagacagaaagtaaacatgtttaaaatccaaaacactacaactacagcagactatataattgaacaaaggcagattctacaagattctagacaagtataagccgacaagatcacacacagaacacaatagtcaacataacaagatcatagacagtaaagaacaagtatagacaagtatagaacaaagacagatcctcattgtcaaagccgaaaacatgctaagttcaacaatcaacaaatgttccacaattatgttcatgattcacaacagaacacaataaagaacttaacaagattatagacaagtatagaacaaagacagatcctcaatgtcaaagccgaaaacatgctaagttcaataatcaacaaatgttccacaattatgttcatgattcacaacagaacacaataaagaacttaacaagattatagacaagtatagaacaaagacagatcctcaatgtcaaagccgaaaacatgctaagttcaacaatcaacaaatgttccacaattatgttcatgattcaccacagaacacaataaataacctaacaagattatagacaaagtgaagaacttaacaagattacacacgagtttagaacaaaggcagattctactatgttacacaaaccctaacaaacatccaattccaacaaaggcagattctactatgttacacaaaccctaacaagccattctacagaccataacacgagttacactacacaggctaagaacactagaataaaatagaggaagagaacataccactcggttttaggtttgggaattggagacaagacacaacaccactagatggggtagagagtgtcgattgcagagccaacgccgagtcttcttgtagctccgacaacgtcccaggaacttcctcttggaagttgttcccttgagacgacgggtggctgtttgctggagcgtctgaatctcgcgactgaggaggagtttgctgaggtggcgctgttggcggcggagtgtagtggacctcttcagatagaggcggaggagcttgatgttgtggttgagtcgttgagttctggaagagttgcagaggcggtggatagttgcggacgtggggtgcagacgttgaaggtccatgttgttgagccggctccgtcgcaggaacttgaaccgccagcgccggagtgaagttgtattggggaggaagatttgcaggtcttgatccgccggcgccggctctctgagtgacgttcggcgtcgtcttacgcttccgggagccacctcgaccggcgataggcatgatagtgagccaaatgaagagattgaagagaaaaagaagaagacgacgaagcagatcgaagaggttgaaggtgagagatcgaagaagatcgatcgatcttagcagaagaagaagaagatcgatctagaaggagaaaggattgatcttagaaagagttctggggattagggttttcgagacgaagaagaagaagaagaggaggttggatcgaataggtttaaggtgagaaatcgaagaagatcgattgatcttagcagaagaagaagaagatcgatctagaaggagaaaggatcgatcttagaaagagaattggggattagggttttcgagacgaagaaaaagaagaagaagaagaaatggctaagtgtttggctcgaagagaaatgactcgatttagggttttcaacacaatagaagtcgcataatagtcgcataattgtcgcatattcatttgggtttgggcctcgaaattttgaagcccaactaatcaaaaaagtatcgttgaatagtcgtaattttgtcgccaattatactgggtttgggtttcaaaatttcaaagcccaacaaatcaaaacttgtcggaacatagtcgcatctttgtcataaaatattactgggtttgggcttcaacatttagaagcccaaaataccaaacatctgtcggccaatagtcgcaatattgtcgccgataataatgggtttaggccccgaaattaagaagcccacaaaacaaacttgtctcggtatttagtcgcaatatagacgcctatactaatgggtttgggcctcgaaattttaaagcccaacatatcaaacaggtgtcgcataatagtcgtcgttttgtcgccggttttaatgggtttggatttcaacgtttagaagcccaataaaacttatcttcgtcgctcattagtcgcataatagtcacttttaaattgatataattataaatgtgaagaaatatttgtatatcataaaaaagttcaatgatattatgaaacaaaattcattctaatatttattcaaataattatacatatattaacacagttatacatcttcatcttctacttcatcttcgtccgaggacgataaattacatcggaattcgtcttctggttcagcatccccgacatcgtaattaaggattattgggtttaagttggctaccggagtttcaagaacaggatcttcaattatagtgagcaaaacatcatcatcattttctgtttgcaaaagagttggatcattgttttcatattctccagaaatgtttcccctcggattgacttttagaacattgagccaaatgttctttggtttcttcatatatggatacggaatataacaaacttgatctgcttgagatcctgtatacatatatcaaagatagattattaataattaaaaaaaaaacgtattttggacttaagaataattacgtaccaagaataaatggctcgtatttattgtatttcctcgtagatagaatgtctacaacgccactatggcttcgtcgagtgcctctcccgatctttgggtcataccacttacacttaaaaagtgtgatcctcaaattgacgataccctcatactcgagttctataatatcagttaagataccgtagaaatccgcttcatcagatgaatcagcgtaattttcacctttaacacagaccccatagttacatgtctttcgtccagcgccgtgattttgcgtatgaaacaaatatcctcttgtgaaatacattggccaagttttaaccttgttcaaaggtccttgcacaatctcttgaacccaagtaggaaatggagaagtagtgttccagtatgttacctacataatagataaacaatatcaattagtatatattaaatgatcacctttcgaatgaaccaaaattgatatagacttacatattctttaacccataaatgatattcttccgctcttctcgcgtagagttcttttttgggcaagcatggatatttggcagaaagataatcttcgaacatactatatttacaaacgaggaaaattatcaaagtgatcttagtaaaaatttacaaacaacgagtgattaaaaatacctctcaaatggtttaaaatagtcacaatttcttaaaacatatgcatgtgcgctttggtagtctttctctgaaagccaatctacatgcatttcaccacttggacggccgacgtgcataaatatattaggtactccagggacatgatatacaggaactttaccttcattgaatcttgttaacctgatccatgtaagtgaattaatatcgaagaatatctaatcgttaaataattaaatatatttaccttgattttgtttgaatatgatcggcaaagtagtgctctgaaaaataagcaatctcgtcattgatatatgactcaacaattgaacctgcagcatatcttttgttctttgcttttcctttcaactttttgaaaaacctctcgaatgggtacatccacctatattggactgggccacccaattcagcttcgtatgggagatggataggtaagtgttccataacatcaaaaaatgatggtggaaagatcctttccaaattacagatgattaaaactatgttctgtttgagaatttgaacgcgacttgtctgtaaagttctcgaacatagatctcggaaaaatgctccaattcctaaaatatatgtgcaagttaaatgattagattaaaaaaatgttggaaaaaaatatagtaagtatatattgtacctgatagtgcaaggtggacattccggtcaagcagttcagcaaagataaatggaagtagtcgctccataaatacatgacaatcatgacttttcatgcctgaaaacttttcattatccagatctatacaactagccaaatctgaagaataaccatctggaaatctaatataatatttcacacattgtaataaactctgtttggcttcttctgtcaatgtatacgctagaaatggagctttgccactactatcaatatgtaagcctgggcgtgaacaaaatttctcaatatccaatcttgacatgatattatcttttgatttacccttaactctcatgagagtgttcatgatgttgtcaagaaaattcttctctgtatgcatcacatcaatattatgtcgaagattgaggtctttccagtaagacaactcccacaagatgctttccttgtgccaattatgtttcttcccatagcctcgcatcttcttttcatgaccgttcccaccaacatccttcgtttttggtggatttacactagccaacctctcgtaataaacttgctcccctgtcaaagactcaggtggatattcgctagaagcatctcttcctttcagaaagtcttttctgttcctacgggatggatgaccatgaggaaaaaatctacggtgacaatcaaaccagcatgtcttccgtccattgggtagataaaaagactttgtactttccatgcaaacaggacaagacaatttaccatgagtagtccatcctgataacatgctatacgccggaaagtcgctaatcgtccacagtagtactgcttttagattaaaattctgactcaatgaaacatcgtacgcatcgactccagtagaccacaactcttttaactcctcaataagaggttggaggaagacatcaagactagctcgaggatgatttggaccagaattcagaatggtaagaaataagtactctgtattcatgcacataccagggggtaaattataaagagttaggatcacaggccacaatgaatgattacgagacatgccaaatggattgaacccatcagtacacaacccgagataaacgttacggggttcttccgcaaactggggatgtaaccctaggaaatatctccactctgctgcatctgaaggatgattcatttctccctcctttgattggtgctcagcatgccatcgcattgccgctgctgtcttatggctctgatacattctcttcaaccggtccccaataggtagataccacatacgactatatggtactttggttcttcgacggtcgtccttaggcttccatcttttcgcacaacaaaatcgacattgatcttctttttcgtcttctttccaaaatagcatacaattgttctgacaaacatcaatcgtatgatatggaagtcctaaattgcgcattaacttctcggtctggtaatgtgaagtggttgtctggtttccttctggtaaaaaatctgtaaacatttcgcaaacggagtccaccaacttttcactcatattatactccgccttgttgtgcatgagtcgagatgctaaggataattgcgactgcccttcacgacaaccattgtacaaaggattatttgcaccttctaacaagtcgtagaacttatttgaatggttacggaccggttcttccacattctgataactatcatcatgacgatagttatcatcataccccacattaaaattaaatgcatcgttcaccatatccacatatggatcttctacaatattacccacttcttcatgattctcactaaaataagtcctattcgtgtaactcgttcctatatccatattcatttcttctccatgcttataccaaacataataatcaggcataaatccatgactaaacaaatgactactaactcttctacccgagatgatgtgtttttcattcttgcatacactacaaggacaatgaaatttacctcgactactctgtactattggctgactattagcgaatgtcatgaattgctcaactcctgcgacgtattcggctgacaaattccccgtcacttcatcaaatctcttgtacatccaatctcgatagaaaccgccagtaccgccataattgtagtttcccgccattatacaataaagtaactaatatttttttttctctttgatgttgttgttgttttgatttgttggtgaaagaagagttgcgtgaacgtttattatataggccaatttttgtgactaatttacgactacaactaaataattaggtgtacctacttaccaatgtgaaacacgttttccatctactttatacgactatggtgcgacgtttctacgactacaggctgactaagacgtctaatcgtcctgtagtcgccaaattagcgactaaataaaatagacggtagaatagtcgttaattagcgactaagcaacgacaaaattatcccttcaataatataatcgtcaaatagtcgttacttgccgactctttgccgactgcatacgatagtcgtaaaacaacgactatgtaactacaatttttcgtgttgtcgcatgcgagtcgtaaatccgtcgtcaaatagtcgtataatgttacgactacgtttgttgtcgctgattgtagtcgtcgtttacctgttttcttgtagtgataatccttaactagttccgaggctaacaacaaattctccattataagccgatctttgatgaatacagactggttattcactacaggaaaatgggtttttaatagcacagaaatatagcgttttatgtcaatatgctatcattgatagaaggataaaataaagataacgtctccaaaaatgaaatgctatgatagctttactcactaaaaattattttcacgtgttaagtaaaaaaaaggttaagtccacattcagtcttctctctcactgttcaactcgacaattcctctctctcactgttcttcaaaaaaatttctttcaatcgtcgaattgttctgtctgtttttcaaaacgattattgttctgtctcttttccaaaatggttattgttcttcggtagctcatagctcgattggtcttcgataattcactctctcacaaagcccagaaatatctgataaaggtattttaatctgttcaattcaatatctgatagaggtttgatttcaattttgatttcatttcaatttggggattttgatttggggattttaggggttttagggtttcgtttcgatttggggattttagggttttgttttgattttagggatttcgatttagggatttcgattaagtgattaattgtttttcgttttggtttattttaattttaggtcctcgtttcaatttggggatttcgattttagggttctttagttagatttagatttggttttcaatttggggatttcgtgttttggcttttagtttgatgaaaactaatagtcattttctttatgcagattattgtttcagaatctacaagagcttaagaggtagcagattcttatctatttctatattttttggtttatttgttgtgagatgagtgtttgataaatgaaattattgtcacgcatgtctgagtaatccgtggttgagctctggtgttataacatggaaaaggcttgggtatggcttccaaggtatgaattttctggttatcaattagctagtgttttatttcaactttgtttcttcttattgatattttgccttgtttatttacatgaagggctagcattgaatatgagaaaggtgctaccgtttttgtgaatgaatcagcacaaaaattgggtaatcctgaagaattattgtgtccatgcattgactgtcggaatgtttgccatcatctattagaaatcgtgttagagcatctggtgattagagggatggatgagaaatataagattaaggcatgttggaataaccatggagagagaagggaacataacatggctagtgttgaatcttcagagaatgatgcttatgacttgattaggactgcatttttcagtggtggagaaaagcagcaaattcagaatgacaatgatgcttatgatgaagaactaagcaaagaagaagctgagtttagagagaagttattggaagctgaaactcctctatacttgacaagttctaagtataccaaggtggttgcaataatggctctctatcgcatcaaggtgaaaagtggtatgtctgaaaactattttgatcagttgcttacagttgttcacgatatgcttcctgtggagaatgttcttcccaagtcaactgctgagataaagaagttcttgaaggttttcggttttggttacgatatgattcatgcctgtaagaatgactacattctttatcgtaagcagtatgaggagttagttagctgcccgcgatgtagtgcttcacgatgggagaaggataaccacacaggagaagaaaataaaggggttccagcagaagtcttaagatatttccctatcaaggacagattcaagagacttttcagatcgaaaaggattactgaagagttgcggtggcattccagcaatggtagtgtagatgggacaatgagacacccagttgactcgctcacttgggaaaaagtgaaggagaaatggcctgagtttgatggtgatcctaggaaccttcgtttatgcctttctacagatgggatgaacccattctcaatgcagaatactaagtacagtgtatggccagttatgttagttaactataacaaggctcctaccaagtgtatgaagtcagagaacatcatgttgaccatgctcatccctggaccaacagcccccagtaacaacatcgacgtctacttacaacctttggtagatgatttacttgatctgtggaatgatggtattcaagtttatgactcctttatgtaagagacttttacacttagagcaatgttactttggactatcagtgactatccggctttagggactctcgctggttgtaaggtcaaagggaaacaagcatgtaatgtctgtggtaaagatacaccacataggtggttgaagtttagtcggaaacatgtttacttaggcaatagaaagcgtctccgacctgggcatccttatagacgtcgaaaagcttggtttaataacacggttgagaatggaactacaaatagaattcatagtggagttgatattctagagacattaaaggactttcgcaatgattttgggagaccgctggataagagaagtaagagaagcagaactgatttggatgaagagggtgttaattcagatgaagaagcagaagaagatagtgataagtggcgttggaagaaacgttctatcttgtttgacttaccatattggaaggttagtgtgtcttctaaactgtattacaagtatatgtagtatggatttgtctaactttgattttttcattgctcaggatatgcctgtgagacacaatatagatgtgatgcatgtggaaaagaacatatctgatgcaatgttgtcaactttgatgcaaagtgttaaatcaaaagacggtttgaaatcacgaaaggatttagaagacatagggattagaaaacacttatatgcaatcacacgtggaaagagaacttacctgcctcctgccgcttattggctatcaaagttagagaagaagttgttctgcaataggttagcaaaatttaggggtcctgacggatattgtgctaatatctcaaactgtgtatcagttgagcctcttggaattggtgggttaaaatcacatgatcatcacgtccttatgcagaatctactttcagttgctttgagaggcttgttgctcagaggacctcgagttgttgtcgctcgtttatgcttttacttcaatagattatgtcagcgtgtgattgatccagagaaaatactagccttagagtctgaagttgtggatacaatgtgtcaactagaacggttctttcctccttccatgtttgacataatgtttcacctgcccatacatctagggagggaagcacgaatgggtgggccagtacattttcgctcgatgtacccatttgagaggtacttctacttctaactctctaattatgtgatatgttgttagttagctttattgaaatcttcagactctaaggctagtattttctcttatgatgtaggtacatgaaaaaattgaaatcttatgttaagaactatgcaagaccagaagcgtgtattgcagagggctatttggctggagaatgtgttgcattttgcacagagttcctacgcaactcgttaccatatgaagaatcagttaatcgcaatgaagatattgagacaaatgagaatgtgcttggaggtcgtccattatataagggtacaaatgttacactaatagagaaagaaagagagataacacatcgatatgttctaatgaacatggctgtgactgaaccttatattgagtaagagcactgaatctcctgtatatatctttattcatcgagtatgatctttacattaagttttgtcttttttcagtatgcatttggaagaattacaagaatttgatgatagttgtgcaagaaacgaaactctagtgttcaagttacacaacaaaagatttgcaaagtggattaaaaataaggtatgagttcatcacttacaaatatgatattgtttctctgtaatgatgtattgagtattgtctgtttttattagatcccttcaaactcaaaggatcattcaatgaagctaaggcggatagcacttggaccaagactaattgctcagacttacaaggggtttatcgtaaatgggcataggttccacaccgatgatgtaaagcgaaagactcagaatagtggagtcacatatgaagcctttagtatgcgtagatcaagtgcacgtgatagtaggcaccaagctgacatagttacatattatggagtcataaaggagattttattgcttgactaccatatgttccaaatacctattttcaagtgcaattgggcccataaaggtcatggtgtgagagaagaagaaggattcacgcttgtgaacctccacttgagccaagcagcatttgtaaaagatccttacattatgccatcccaagcgagacaagtgttttactctagagaggatgatttgagtcagtggtatgtggtaatgagagcgccaccaagaggttatcatgagttagagactgaagaggagtttaatagtgcaccattttcagtccaaccaattgatgattcaggaaatcaatctgatgatgacagtttttgtgctagggcagattgtgaaggggttacagtagtggattaatgtatgatttattgttaagaatacatgtttaactttggagatttgatggtttttcaggttatctgaaatggctaagaaaggtgaactgaacccacgccgtagtaagcgtcaaaagggactagatgcgagtcctgtcatatcatccttgaagaagaaaaagaagcaacaaaaggaagtgcttattcctgtgatagaagaaagcagcaaggagacgacttttaatgatgaagatggagttcaagtagagtttgaggaagtaacccaagcttctcgtggtgctgattcattggataaaaatgaagaagctgatgaccaagaagttgagagaacagaccctattgaagaagatttggagcctcctgctcaagaagaagattttggccagccttccactgaaaggcttacaactgcgactgctgaaacatcaacacaagtgtcagtgaccaagaaaaacagactaagaggacccacaaagctgcgaagagtggccaaaagtgcacaagacaaagttgatgtcgaatttacagaattgggagaatttgtgggatctggttcagttaaactttcatcatttcttggagcacttgtgagagagtacgtccctattattctggatgattggaggcagctagatgatataataagggacacactatgcgaggaaattcaggtaagtgtattgatcatcttattacatttacttgaaaaactaattaagtaaagaatagtgattttctatacatttgtatactaatgtaggggaggttcaatgtggaccaagaattgcaaagaagagaaattttcaaacatatgggttgtttgtttagggcttctaaatccaaccttctggcgaaagtgagagttgctaaatggttttaatcataggaagtaagagataaagtctcagatacaccacattcaattcttttacttgtagaaaaaagagagttcagacccctcgcaggtgacaaggagtaaagtttgggttgcaggacacacgcattctgatggaagaccagtcaaggccgaatttgtcgagaccattgtaagtaatatctaatttcttgtggtttactctgatattatctaaagctagctacttatacctgtttgattacatatttgaatgcaggaaaaaataaaatcttttttttgaaagaatgtaaaattgtattcagtcaaaaacctttttacaaaagatgtaacagtgtgtgtaaaagtttagaatataagctgaagatacaatagctgaaagaaaagactagagaggttgtagaggatgaaggggtcgagtggagaaccaaagctgcaggcaagtgttgtagctgtgatctcctgtatctcggattgagctgattcgattacgaactgttttgtcaatgagcttgatgagcctattcggtggtgagctaagttcaccatgacgtctagcattcctttctcgccaaatgtggtagattgtggcttgaaaggattgtagattgtggaaaaaataaaatcaatagagagtgaaatggatttcacatccactagtgttaaagaagatgttgtgactcaagtactaggaaaagacaaacctgggagagttagagggttgggcagaggggctacattaacctagctggcatttttgcaagttagagactcacatgtgcataaatttgaagctactcaagaactattattgagcaaggttgaagacttacagaatgttgttaaaaaaatggctagtaataaggtatgtactcagacgcccttgtttactgttatgatctatgttagttaacttctatgtgatattttagtcttctaacaattttatttctcagccaccttgtgatactcaatccagatctgaagcaaccaattttacagtaggcgtcaaatgtcaaattcttgatttggaatctgaagatgatattgttattgctgaaggagagttgtgttctactgaaccagcatataagattcgtcgtgtaccactaggacctaacgcagctgctattgtagtcaaaacggtatttgataaacaagcttctgtttggaggcctataccaaacatcgtcttcattggacaagcgttgggagccaaaattgcatggccagagaataagttgattttggacaatgatgacttcacaagttggagcacaactgcaaacaagaacattgatgatgcatatacggtaattgtttagaggcttgttatcaacttatccaaattatagaaacttactctttagctaggttggtaatacatttgcctgaaatgtaggaacaagagagggttcgtattattgattggactgtggatgaggtttatgctgaaggtaaactgtgttcaattgatccaaatgaactcttgaacgaagtacctattggtcgcaattaatgcaattgtggagattgatttggtggttaaagaaagtgcctttttgtggagaccaattgctgagatgtcagtcatgggtgatgcacttaataagaaaatcgtttgggcttagccaaagatacagtttgttaataacgcaatgccgccttcttaaaaagtaacaagatcaacacgttcggtaagattcaagaacctttattttgtagtatgatttgatttgttgttcatatactggaattctgatggatatacttttgaattttcaattgttagaatggtagtatcaacactagtagcagtaaaggtgaaaagaagaaatgtttattgttagatatcgataaaactgagaaggtagttgcaactggtcgagtttcttcaacaaatccagaagatttagtacatttcgaacgcctaggattgaatgctagcatcgtgtgggtagaatctgagaagattggagatgctaaattctggagaccaaattctgagattatgtgcattggcgatgcagtaggccttactgtaccttggcctaatgatagactcattttgatatgatctatgttatgcatgtgtttgtttgatactgctgtgaacttgggttattgacagatttgatattgtgtaatattgtgtaatattgatgtgaacttgttgtatgattgacaatattaattaaaagttgatttatggttttcttacattatattgatattgattatatatgtaaacaacaacataaatgaaagcagacaatgattttgtgacatgcttaaattaaatttataaatagcatataataaacgctgttataatttaaacaataacacaacatacccgctattatattaaaaacaatagcagatgatatgcgctattgtacacaaaacaataacataaaacacccgctattataatgtacactataacaaatgatatccgctattgtattaacacttttaatagcgtcgctaaaaaccgctatgaaaacttggcaagctatcgtagcgggcgataacatatcgtttttattttcgctatagtaacgataaatagcgtttttcgtcttctattaaaaacctattttcctgtagtgattgcaacttattgcatctctgttttgtcgaaagtgaggacaatatttttccaagaatttcatctgtaagacaacttatagcttgtgtcaaatcttttggcatccattgcctgaaacatgaagtgatgggtcctgtgattcaactactagattaaccaaccgaaagcgattgctctagaaagttgaatacttctataaataccctatagaagaaactcaaaactgcttgaatagtaaagaacgtgggcaattataataactagagaaggaacaaatatgaaagttctattgatatagagagactgagagagagacgaactgttcctgtggaggacgtcgaagagagagagagacggagagaacgatgattaccataatttaggtttagggtttccaaaaaaaaaattaaacactaattccaaaatgacaagagaaaaatcgtttaaaagaacttgctaattatcaatatcccatatgaaaaattaattgaacctaatcaaactaaattaaccataccatacgaattgaaccaaaacggttcgaacatacctgaaataattttggttaaagttcaatttactagaatcgtataactctaagggcacaattatcagaatcccagtctctacatattctcttacaagtatcttcatattagtcaccttgactactctacagattcgtgcattaatgtctctttcacgttaaaaaaatcttgggaaaagaaagcaaaagagtaattttgaccgtctagctctctagtctctatataaccccaatcgttaacagaatgaagataaacttaaaaacatggcatcacaaaccaacaaagagcttttcgtgggtggacttgcaaggattttgaaagaacagcgacaagtcgatgtccggctgaaggcaggggacagcgatcagaagggtgtatctatatctgctcataagcttgttctggtctcttcctctttccttattattttttcatcatcatatgattcttaaaaaaacatttacgaaacgttctttactcgtactgaatttcattgtgaatgttatggaatgttttatagtctgcaagatctgaggtgtttaagatgatattggaaacagaagagatcaaggctacaactacgctagacacaatcactctctcagagctaaaacacacagagttagtggctttggttgagtgataagtaccaaaatggcttatcaagatatgtaacagaaagagatgagataatagaagaaataggttgagatgcagaagaatttcagagaaggagaaggaagatgaagaagataaacattcttaagattataatcaataagtgtttttcaatgactaaagaagagtttaaataaaagacattactaaagtaaacatgccaaacactaagccttataaaaacccataaggcccaactcctgaacctatcaatactccctcctttgagagtcaccttgtcctcaaggtggaagaaagtgaattccttggacgagtgtcctaacttcggttgagcctacagctgcaaccttctttttgacacttgattcccacttatcaaccatctcctcaacatgcatttgtgtaacctctttaccgaattcaatcattagccttgaaaccacagttttaaaaggatgatacaatcccacaacttcaaacggttctgcagtccttacctcctttgatatgaccgcctctttagtctgttatgtgtgcacctttaacacacacggagcgggtttggtctttctcactcttggttgacatgttccgcgtacttccagctacaacttcactgtgtttcaccccgggttgcccaaaaaatgatttctcatcgtcattctctttagtatccttctaaggttccaaccatgaaacttcttccaagtgttctggacttagcttcaactcttgactttcaacgctcttaacatgtccaccttgtatttccttagcgattcctccacatgtaaccttactctctccttttaaagttaccttgtcctcaaggtaggaaacaacaagcatttccccatcgttatttctctgttcttcaatatcctcttgctcattttcactcttcatctttacttttgtagtaacttgctcaagttcttcgtgctcagcacaaagagtgatccattgttggttgtggctgaaagagaaatcttgattctgccaattaaccattgtctctcccagttttgagagccactcataaccaagaatcacatccacatcagtcttggccaagtctagcagaaggaaattctcagtgatttcaacttcttgaacccataatctaattccgagacaagttcctacgctttgtatgcactgcctttgtcccaataaaactgaagcttggtttgtaatactcgtgggtagtttgagactgaaggctaactcaactaagataaaattgtcggttgctccagaatctatagctacaacgaccttatgatctaatatgaagccatagaatctcatacctttgttcctggttaaatctatcactagttgctccattccctgtctcaaggtataactatcctgctctaattcttccagctcatttataactccttttttcttctttaccacatccagcttagcttgtaccagggtaaggctcatcagctccgcctgtcttgattggtagctgttctcaatgacgacacaattccagaatttatgagattattactttcttctaaccattgtgttgtatccatcatttgtacaatcccattcggtttcaattctcgaactgcagtttgcaaactaggttgcaacccttgtaagaacatctcctcgaagccttgtcctggtaaggtaactgagcgaagacaaagagcttcaaacctttctctgtaatcacgcactgatccttcttgttgtattcccgaataatgaggttgatgatttaacttcattgtcgtctttgtctctcggcccatcatacacttaaattccttccagcttgtaggtgaattctttttccagagatgctttatccattgcctagtctctccttccaagttagcataaacaatttgtaacctctcatgctccgaaattttattctcaccaaaataattctcaaagttatttagacagcttcttaggttttttccgtgaaaagcaacgaggctctgtactagctgaaagtcctcagtccacggctcagttccagaccaacgtcaccacggacagctgcatcacacctcaagctccgttaaaggcaaaaggggatgggattctacccttaccgctgctggcagtaccgatccaaacaatggatccgtctcagacatcatacgggtttagccagaacaccggtcagctaggatctccgggtaacaacactgggtcacctggaagaaggtcagatctatcacagtatgaaggacagagcccagatgactggttattcagaatggagaagagttttctgcagaaccagaccttggaacatcaaaagttggaggtagctataacgtgtttagtttcggtaacagctttaaattggttgagaggtgtgctaatgagaggattgttcaaagattgtaatgattttaagaaaaaagttcgaaaatgatttggacacagtcgttgcgggtctgttgtgtggcagttgttgaacatcagacagaaaggctcagtggaggaatttagagaacggtttgaagaattaatagttgaggtgccacacattactaacgatcttttggaaggaattttcttaaagggaatgaggaaaaatataagagaccaagtgatgcgtacacgtccctctagcatatatgagattgtggagacagcatgcctcatagaagagcaagagcaggagaagacgtctttccactcaaattacaactcgaaatccgttagtagaacaaattcagctccggtgcttcatcgaagcaacaacaatagccctatcaagacacaggatatcattcaagctaggaggtcatttgatggggtaagagataacaggaaaccggatcagaggaacaacgcatgctacacgtgtggagaccgctattttccaggacaccgctgtaaaaatcagaagctcaaatgtttggagttggtcgcaacaagcgaggcgggacagttactggaggaggaagacgaatctgagagtgaagaagaaccggaacctaaggtggaaggacagacaatgatgcatctttcgttgagttcaatggctggccttactaatgaaaagtctatgaggatgaaaggatggatagcaggtcaggaagtgatcgtgttgattgattcaggagcaactagtaacttcatttctgaagaagttgctcagcggtgctcactaacagtcacaccaacaagtgattttggagtagcagttggtaatggtcagattatttcaggacaaggcaaagttaaggatgtgcagctacacattcaaggggtggatattaaggaggagttttttctgtttgctttgggaaccacagatatagtgctggggtactcgtggttagctaccttgggagatacaaggatcaattgggggcgccacactctgaaattcaaggtcaacgaagaatgggtgacactagtgggagacccagccctcttgagacaacagatatctcttcatgcattggaaaaaacagtgagaaaaggtgacacatgaggcggaaggaaacaacagtttgggggttcagaaacttatcaaggattacaagaaggttttccagttaccacaaaggttacctccatcaaggaatagagagcattccatcaccttacaactaggaagctcaccgatcaaggctagaccatatcggtattcattcgcacaaaagaatgaaatggagaagttgatcagagagatgctagcagctgagataatcagacctagtatcagcccattctcaagtcctgtactattggtcaagaagaaagacggaggctggagattttgcgtggactacagggcattgagcaaggctaccgttccggactgatatccaatcccagtgatcgaggaactgctggatgagctacacagagccacgatgttctccaaattggaccttaaatcggggtaccatcagatacgaatgaaggctgcagatgtggagaagacagctttctgtactcatgagggtcattacgagttcttggtcatgccgtttgatttgaccaatgcaccggccacctttcagtcagtaatgaatgagttgtttcgaacctacctgcgtcaatttgttctagtgttctttgacgacattctggtttatagctcagacgaagagacccaccttaaacatctagaagcggttctccaaattctacttcagaataagttatatgccaatgaaaagaaatgtcactttggaagcaccagaatctcttacttgggtcacatggtaacagggaaaggtgtgtctgcggatccagctaaaattgaagctatggtgaactggcctcaaccaaagaacataactgagctgagggggttcctgggacacactgactactacagaaggtttgtagcaggttatgggaagatagccaaacccttaacagaattgcttaaaaagggtaagtttgaatggtctgaagcagctaataaagcttatgagacacttaaaggagcagttatccagttgccaaccttagcattgctagactttgcaaagccttttgtgattgaaacggatgcttcagggacgggaatcggggttgtgctatcacaagataaacgtcccatagcgtttattagccaggggttctctagtaagggcagaattaagtcagtttacgagagagagctgttggccattgtctttgtagtggacaagtggaaacactatctagcaagcaagaaggtgattataaggacagatcagaggagtctcaaacatctgcttaaccagaaagctgtgtcagctatacagcagagatgggcatccaaacttgtcagtttggattatgaaattgagtacaaaccaggcgcagaaaatcgtgtagcagacgctttgtcccgacgtccagtcacagagcaggtgatgaacatgttgttgctggctccagctactctgcacaagattgaattacaagatcaagtacaaggcgaccctagcctcaacctcatcagagaaaagcttttaagtggacaagagtctgaaaaaggatacagtttggtggttggcaccttacataaagatggtaggataatgattccaacaaattctccttttattccaaagttgttggaaaggttccacactagtcccattgggggtcatgaaggggtgctcaagacactcaagagattggcgagtgaagtttattggaagggaatgaggagagacgtggtagagttcctcagaggctgtcaagtgtgtcaacaaaataagtactcaaccttgtcaccagcgggtcttctcacaccgctacccattcctactaaggtatggtcgaacattagccttgattttattgatgggttaccaaagtctgaaggctatgatgtggtgttagtagtggtagataggcttagtaattatgatcactttgtaccgctgaagcatccttacacagccaagtctatagcagatattttccttcatgaaatagtcagacttcatgggtttcctgagagtatggtctcagatagggataaaatctttatcatcaatttctggtcttctctgttcaaatcacacggaacatccctggataagagtacatcatatcaccctcagacagatggccatacaaaagttctgaatcgttgcttagagacgtatattcgttgctttgttaatgggaaaccaaagacttgggctaagtggctaatgtaggctgaatactggtataacacatcgttccactctgcgattaagatgactccatttcaggctctgtatgggagagaacctcccaaactcttgcgattcggtgatgtacccactgctaacgccggcgttgaagagttgctgcaagaaagagactgactggtcactatgctgagagagaatctacaagcagcccaagctcgaatgcagaagtcagctaacaagcatagaagagaattggaattctcagtgggaacttgggtctatttaaaactcaggccgtatagacagctttctgtagctcaacgacgtaatgagaagctatcgccaaggttctttggtccgtataagattctggaacgcataggagcaatggcatataagctgcagctaccaactgaaagttctattcatcatgtgttccacatatcccaactgagacaggcgcttccaggttcagcacaagctcaaccccttcgcgattatgacttctaacttggagtgggcaacagaaccagaagaggtaatggagatcagagagggcaacacaacagaagatactaagctcttgattaagtggaagggtatgccagagtgtgagaatacatgggaaccaatgacgggcatcacgcaacaatttccagattctcaccttgaggacaaagtggctttgttacgggggagtattggtaaggcagcaactcaagcaatggagtcagcaagagaagtcagaattccaaggaagagagtaccaaagaaggtttatgatcctagtggctgaaatgaagctaaaggaagtcaaggaaatactctgtaccatccagaggctttgacaatgtctttgacaatgtcaaagaataagaatgcctatagttttcttatttaactttgtgtcatttaagtgttgttgtgagtgagtggttgtagtttctgtaggggaactactacttaagcggaactctattttagggttatattcatcaatgaattaatcaactttccttattactcttctctcttatcttactcgacttctatcctatacttcttcttccttttctacttctattctctgttttccttcttgataagttcacgcttatcaattggcttagtgtttggcctgtttactttagtaatgtcttttatttaaactcttctttagtcattgaaaaacacttatcgattaagaacaagaaatgtttatcttcttcatcttctctcttcttcttcctgcctttctctgaactcttctgaatctcatctctatttcttctgtatctcacctcatttctgttacttcacttgataagccattttggtacttgataatccagaatcgaaattcttctgctggtgaaacacacgccaagtgttcgacaaaacgcccaggcgagatttctgcatttttccttggtgtgggttcagatttggtcgtgagaccttgaggcagctcgtgatgttcttgtttcctcttctcaggtggttcttcagttgcattcaccggaaaaagcgtagcaaaaatttcacgaatcccttttcgatactcctcttgttgagcttcaagcctttggacgatggaatctagcttttcctccaccttttcaacaaatcgatcgagtgttgcttctagatcagagattgtggcggcttgattggtttgagcagcttgagtagtcttgagttcaactctcaatgaaagcaccaattgataagtaccaaaatggcttatcaagatatgtaacagaaagagatgagataatagaagaaataggttgagatgcagaagaatttcagaaaaggaaaggaaggagaaagaagatgaagaagataaacattcttaagattataatcgataagtgtttttcaatgactaaagaagagtttaaataaaagacattactaaagtaaacaggccaaacactaagccttataaaaacccatatataaggcccaacttctgaacctatcattgagttcatctacagttccggatctaggctttctacgaaagggaggcaacacgttaggtcactctatcttgcagccgataaatatgagattccgcatctacgtgacctatgcagaatccaacttataaaatctcgtattccttctaatgctcttaacgtccttaagcttgctcaaatcccttttgacaaagacctcaatgatgccaccttggattatatcaaaaccaatataagtacaatttctagctctgatgagttcaaggttttcgttgtcaatcactcaaatcttaccgtggagatagtgaaaggttctttgggacaggggtagatcgtgtactatatgtgggaactattgccagttgtgcactagatcgtgtaataatctatttcacatcgatgaaactgaaaaaaaaaaaagatacaaatataaacagattgcttgtcatacaaatgttggcgaaaatagtagaagaactcgtgaaaaagctttttatagatatttgtaaattttttattttgcaagcttaaaggggtgctcatatttacaagtgttacatatgtaaagagaagagggtaactaaaagatgggatttaattgggactttagtacggtctatattaccattagtgtctcacctttttcttaagtcttggaaaatgaagtaaatcaaaagtcattttgactgccgtcaatggggtttactttcctctctatatatctgaccatcgttttctaaatcaaactcaagttatcttataatggcaatggtgtttaatgaacaatggcaagtcgatatacggctcaaggaaggttgcaacaaaaagggtgcgcaatgttaaaccctgttcatttctcaatttgacagatccatccaactgatccattcaacatgtctatctggatgattcattcgactcttgttcgttttatttttagtcggttcatttgactggaccatccgaatgagatgttgttcgtttgcttatctctatcttcatccaaatgatttgtaataatacaaatacctaaaatacccatgttttcatctaattatatttttattattacttgtaaacatattaattttatttcttaatccaaaatatatttaaaagtaaataaatttcaaataatagtttttttatatttataaatttattttacgtttttgacgggaaaacgtgattttacggttttgacgagacaactcaattttatggttttggcggaaaacaaaagttaacgtttttggcggaaaaacgtgattttacgtttttcgcgagaaaacatgattttacggttttggcgagaaaacgtgatttttgcggttttggcgggaaaacgtgattttgtggttttgacgaaaaaacgtgattttgcggttttgacggaaaaacatgattttgcggttttggcggaaaaacagaattttacggttttggcgggaaaacatgattttacggttttcgaggaaaacggaattttacgttttaacggaaaaattcgacattgcggttttagcaaaaaaaattttataaaaaaataataattttaaaataagatttaagtttatttgtttttttttatctaaaaatacatctaaataatcaattgaaataattatggtatttttgtcatttgttgtttttgactgaatcatctccatccaaatgatccaatttagttcagccaattgagtttcaaaattaagcctaaattttcaaactcctccaaatgaatcatttggatggattatctgaatgaaccgtttttggcaccaaacgaacatcaaaactcataccagatgatccatctgactgatgaaacgaacatggccttaattgtttttgcaacctcaacaacataattcgtatcatttatagtttatgaagcctaaactaaaccagaattgatccttctgtttaaactagtcacaatgaaaatcaaatgcatcatcttttttttagttaataatcagtaaaatatttgctaatatatgtcttctccaaatgtttaaaaagtctctatccaatataaaccataagaaaatttagatgtctaaagttacaattgaaataaattccattgtttaaaaagtaaaaactaacaccaacaaccagaataaagatatgaaatacaagttttaataataaactagattttatcccgcggtacaccgcggtgacaatttatctttttaaagttagtataatttttcttttgcaaattgtatctatctataatatatttttattttatagtttacaattgttattaagtaacgtcctgccaaacccatcccgccaaacccgtcccgtaaaaaaactatttatttatattaatgttgatcttatttatgatatgtttataaatcattgtctaaatatttttgtcgatgcggaacgttgaacccacacattttttgctaataggataatatatgttcatttttaaaattttgaatcatatattatataatgatgttaaaaaattgtaatatatcaaactttttataagtttaaatattaataatgttttataaattttaaatatataaataataatatttaaaaaattaatatttttgcttataaggtaatgacataataactctaaaagcaaggatttagaatatttaaatctttaattaaatattttcattaataaataattaatgtcagtgacatgacattgtaaataagttcaaatacaaaatttatttatttaaacaaaaaacgtttagtaagaataatatttatttaacaaaaaactttgttttaaaatattgttaacaaatattgtttttgcaacctcaacaacataattcgtatcatttatagtttatgaagcctaaactaaacgaattgatccttctgtttaaactagtcacaatgaaaatcaaatgcatcatcttttttttagttaataatcagtaaaatatttgctaatatatgtcttctccaaatgtttaaaaagtctatatccaatataaaccataagaaaatttagatgtctaaagttacaattgaaataaattccattgtttaaaaagtaaaaactaacaccaacaaccagaataaagatatgaaatacaagttttaataataaataatcaactacacaagaaaaaaatgcaactacttgtggttatacaacttataaaataaaacaccaacacatttgtaacaacaacatcagaacatcacgttgttttagttaatctttctatatcttcctttacgtttgttatcccccaaactctacaaaaaatcttgcagcttcctcagttttctaccgtatgatgttccttaatctgtacgtttgagaagatatacgtagcatacgaatgatctctctgtaaaactcccacgattcgcttacttccgtaatagcttcttgcccgaaagggtttttcttgatgaaatcttgaacgttttccgcttctaccaacttctcaagatgaagtctcaaatcaccaccattacctagtttacaatgaagcagaacaaaaattgtgattcttcatactcacttaatcgttaccaaaccccgcaaacttgtaactgaattagatgtttacctaaagatgtatctgtcttgttctgatgattgtatgaatgagggaatattgctgtatatggctgtaacattcagatggtttattcaaaactttaaaatatcgatgacgataaggtaaaagaattgttgtataaatgacacgaggaagatgggaagacatcgcaaaatagcttaccgggttaagcaaagccttgtaaggagaatcgtctagcaaaaccgtgttggtttcgttgtaatcacccattttccaaggaagtcttggatcgtgtttctcccaaagccggtttagatccttgaacaccacatatttgtacctattttcaagcgaaccaacactggttgtagcacaataagacatgtcctgcaaaaagtaaatccccgaaaaatcgatatttactagtttcaaaaaaggaagagtgcatggcaagaaccaccttacccaacaaaacaacagcttactcttcaaatcaccaagcaagaactcagtgattcttacaacattattcctgcaagcaaacaaaacttatatcgattattcacacagatatggaagtaacaatgatatgatcttatatataataagagtaacgtcttactgttttctcgatgaccagataccaacttcaaacttgtcaaagcagaatctcaaaaactcatcacaaaaaggtctcttgaaaactgtcataaccaaaaaaaaatgcaaactaatataagtaacaatgtggtctcacaaataacaatgaacaaaaagaaacttacttgctcttcttccaatattaatatccgctggaacatccttgagaggagtaactatatcagcaagcaacccattaagatcaagaacaagaagttttttccttaacaccaatgaatttaccccgctgattccaccaaaaacaacacaagaatcgttgttctctaccactgaaacttcatcactactcataacagccgatataaccgaaccttcttcattcttttctatggtttcatcacccgaaacaacacaagaatcgttgttctttaccactggaacttcatcattactcgtaacagccgatataacagaaccttctttattcttttctatcgtttcctcacccgaaacaacacaagaatcgttgttctttaccactggaacttcatcactactcgtaacagccaatataacacaaccttcttcgttcttttctacggtttcatcacccgaaacaacacaagaatcgttgttctttaccactggaacttcatcattactcgtaacagccgatataacagaaccttctttattcttttctatcgtttcctcacccgaaacaacacaagaatcgttgttctttaccactggaacttcatcactactcgtaacagccaatataacacaaccttcttcgttcttttctacggtttcatcacccgaaacaacacaagaatcgttgttctttaccactggaacttcatcactactcgtaacagccgatataacagaaccttcttccttcttttctacgttttcgtcacccgaaacaacatgttttcgatcaaccaagctcgataccgaaacttcttctttctttctctcattagattcaacgtcaacacaagtctctttcttatcttccatatctaacaaacaaacttcttcattccctttaaccacggtttcgtttagcggcaacattgaaacctcgtgacaattttcgaccttatcaatcaatttagctttcttaatcagaggttcctcttcaacagaatgttcaattgctctcatactaaactcgaaaaactcagaatttgcatcactaacttacttcaatccaatctgttgaagaagaaagtataacaaattcaaagagagaaaatcaaaatcaagaacaattaaatgattctttagttttaacttttaacaataacaactgattaattaagataatgcaaagttaaatcacaattaacgtgtaataagcaaaaatctaagactttgtaataacaaagatgatctgacttaaaagcatttatcaaaacagtagttcgtacatatatgtccgtatcattacacaagtgatcgatctggattttgtatcccgtacaaatttctccggaacaattacagtaaagaaacttacagatgaatttggagaggaagaacaaaagtcggagacagagagaattccaaatgttgacctttccccagagaatttggagtggaagagaatttaaggatctgagaggagatgaaatgacagcgttttgatgtcgtttggtgttcccaaggatttttttgcagagagacaagaaagaagtttagtggcttagacgtgacttggtggggtctttagatctctcgtgttgtcaagttttcgggtcgggtcttcggagctggttcgctcgggtcggttaatttaattctataaacagtttctatgctaattaattgttttacttagacttagacccagtaaagcccatatacattacggtaaaagtccaatttcgatccaactttggtagcatgtagatttcaatccaaactaaacatttttacaaatactagagcaaaacccgcgtcaaaccgcggatgtttttttttaaaatatgattttgttaagttgtatgtaggtattgaatattatttatcataattcatgatatatatagaataaaaggattcattagaaaataattgtgaacacaatgcatttattgatttttttagtaagaccgatatagtctttataagttttggaagctaatttttgctttacgaacatttatttagaaaaatcattaaaaaaaaaatgtgaaaagtgtttaaaatcaccatgtattaattctggtaagattaaagctattttaacgaaaatgtcatacttatgtgtcgttctctcagaacttttcaatctatttaattaaacatctaaattttattaggatatttatagattttaccattagtcttacttctgatttttttctccaattaatttatacttttgaatttattcaatgatattaaaacaaaaatagattaatgtatgcaattaaaatatacaaatctatacagaaaaaaatatttaacgtttctttgtatctattaatataacaaaatatatatatcatagaacataataaacataaacattagtaaaaccatccattcgggttctatatttgttcaaagaaaatgcttagctaatttcatacgtctaactaaatttttttttctttttacaatttttcgatcttcccattcattccccgtaggtccttcttctcctaattgtttccattctaccaacaaattttctataataatttgcaaatctaaattggctaattgttctcggatagcacccgccccagtcagtggcggagccagaacaatgactcactggggtcaaaaaaaaattaaacgaaacgataaactttactataaacataacaatgtcattataaataaaaactctaaagatgaactctacgttcactcatatcttggaatcgttttatcacctattcgtttgtaacagtgttaagtacttgcttttcaataaaacaaacaagacaatcacttaagaacacatcaccgatacggttacgcaatgtagtcttcacaaaattcatcgcggaaaaacatctttcgacagttgccgttgcaacaggaagaatcaaagatagctttagaagatgatataccaaaggatgtgaaagatgctttcttgtctctaccatcacacgagcaagatcaccaagacgctttaaatctgtaaacctttcatcgtttttcacattatcaaggtagatctcaagttgatgatcaagagatctacgctccacaaaactaaagtcatctggataaaactaggtcaatctcacgagcatggacttatcaaactgacgaaaagaatctatcggactcaaagatgacatgcaaataagtagttcagaattcaactcatcaaagcggtcattaaactcttgaagttgcatatctaagacagtgtagaaacaatccaccttatagtgatgcaagttggttataccggtctttttccttggtcttctagaatcaacaaattcttcctccattttaagcattccaatgttagttttctcgctaaaagaactaacttcagccataaaagcatcccatccatcgtctctaaccttttgcaactgacatttagtagttttcaccaatgaaatagcatttaagatatcttgatcttttctttgccaagcctttgataagctatcactgagtcccataacaagcaacatcaactccagatagaaaacaaaatcaaaggtgtgaaaatacttgagaataccatatgcttgttgtcttttggtggtgtcggtgccttcatcctggatatactcgagaactataactatagatgaaaacaactcctcaagacgcaacaaagtcttataatgtgaaccccaacgagtatttccaggtctttgaagggaaagttcttggttcaacctagttcctgtcttaatttcaccattgctaatcttttcttccactttttgccgatcgatttcccggatcttatcttttcttttgcaaaaagctccaacaacatttagcaaaacagaaatcatataaaaaaactctccaacttcaacatgtttttttgcaactgccatgacaaccaattgtagttgatgagcgaagcaatgcacataatatgcagagctattttctttcaaaatcaatgatctcagtccattgaactttcctttcatgttgctagctccatcgtatcccttccctctcagctttttcaaactcaatccatatttagcaaacaaagaatcaatagcacttttcagagataaagaagatgtctcttgcacatgaataacaccaataaatctttctttaactaccccatacttatcaacgaagcgaaaaactactgccatttgctctttatctgaagcatcagccgattcatctacaagcaagccaaagacatcattatccatttcttcaataatagatctagttacctcttctgaaaagcaatggacaatatctttttgaattggtggagatgtcatctggttatttttaggagcatttttcaacacaactttctttacaacttcattctgaccagctatatacttcaaaagctctaaaaaattacccttatttgttgactcttctgattcatcatgaccacgaaatggtaatccttgatgtaacaagtgtcgagaaacatcaatggaagcattcaaccggattcgataatcattcttcacaacattggtttgcttatggagagcagtggcggagccagaacaatgactcactggggtcaaaaaaaaattaaacgaaacgataaactttactataaacataaaaatgtcattacaaataaaaactctaaagatgaactctacgttcactcatatcttggaatcgttttatcaccgattcgtttgtaacagtgttaagtacttgcttttcaataaaacaaacaagacaatcacttaagaacacatcaccgaaacggttacgcaatgtagtcttcacaaaattcatcgcggaaaaacatcttacgacagttgccgttgcaacaggaagaatcaaagatagctttagaagacgatataccaaaggatgtgaaagatgctttcttgtctctaccatcacacgagcaagatcaccaagatgctctaaatctgtaaacctttcatcgtttttcacattatcaaggtagatctcaagttgatgatcaagagatctacgctccacaaaactaaagtcatctggataaaactcggtcaatctcacgagcatggacttatcaaactgacgaaaagaatctatcggactcaaagatgacatgcaaataagtagttcagaattcaactcatcaaagcagtcattaaactcttgaagttgcatatctaagacagtgtagaaacaatccaccttatagtgatgcaagttggttataccggtctttttccttggtcttctagaatcaacaaattcttcctccattttaagcattccagtgttagttttctcgctaaaagaactaacttcagccataaaagcatcccatccatcgtctctaaccttttgcaactgacatttagtagttttcaccaatgaaatagcatttaagatatcttgatcttttctttgcaaagcctttgataagctatcagtgagtcccataacaagcaacatcaactccagatagaaaacaaaatcaaaggtgtgaaaatacttgagaataccatatgcttgttgtcttttggtggtgtcggtgccttcatcctggatatactcgagaactataactatagatgaaaacaactcctcaagacgcaacaaagtcttataatgtgaaccccaacgagtatttccaggtctttgaagggaaagttcttggttcaacccagttcctgtcttaatttcaccattgctaatcttttcttccactttttgccgatcgatttcccggatcttatcttttcttttgcaagaagctccaacaacatttagcaaaacagaaatcatataaaaaaactctccaacttcaacatgtttttttgcaactgccatgacaaccaattgtagttgatgagcgaagcaatgcacataatatgcagagctattttctttcaaaatcaatgatcttagtccattgaactttcctttcatgttgctagctccatcgtatcccttccctctcagctttttcaaactcaatccatatttagcaaacaaagaatcaatagcacttttcagagataaagaagatgtctcttgcacatgaataacaccaataaatctttctttaactaccccatacttatcaacgaagcgaaaaactactgccatttgctctttatctgaagcatcagccgattcatctacaagcaagccaaagacatcattatccatttcttcaataatagatctagttacctcttctgaaaagcaatggacaatatctttttgaattggtggagatgtcatctggttatttttaggagcatttttcaacacaactttctttacaacttcattctgaccagctgtatacttcaaaagctctaaaaattacccttatttgttgactcttctgattcatcatgaccacgaaatggtaatccttgatgtaacaagtgtcgagaaacatcaatggaagcattcaaccggattcgataatcattctccacaacattggtttgcttatggagagcagtggcggagccagaacaatgactcactggggtcaaaaaaaaattaaacgaaacgataaactttactataaacataacaatgtcattacaaataaaaactctaaagatgaactctacgttcactcatatcttggaatcgttttatcaccgattcgtttgtaacagtgttaagtacttgcttttcaataaaacaaacaagacaatcacttaagaacacatcaccgatacggttacgcaatgtagtcttcacaaaattcatcgcggaaatacatctttcgactgttgccgttgcaacaggaagaatcaaagatagctttagaagacgatataccaaaggatgtgaaagatgctttcttgtctctaccatcacacgagcaagatcaccaagacgctttaaatctgtaaacctttcatcgtttttcacattatcaaggtagatctcaagttgatgatcaagagatctacgctccacaaaactaaagtcatctggataaaactaggtcaatctctcgagcatggacttatcaaactgacgaaaagaatctattggactcaaagatgacatgcaaataagtagttcagaattcaactcatcaaagcggtcattaaactcttgaagttgcatatctaagacagtgtagaaacaatccaccttatagtgatgcaagttggttatacccgtctttttccttggtcttctagaatcaacaaattcttcctccattttaagtattccagtgttatttttctcgctaaaagaactaacttcagccataaaagcatcccatccatcgtctctaaccttttgcaactgacatttagtagttttcaccaatgaaatagcatttaagatatcttgatcttttctttgcaaagcctttgataagctatcagtgagtcccataacaagcaacatcaactccagatagaaaacaaaatcaaaggtgtgaaaatacttgagaataccatatgcttgttgtcttttggtggtgtcggtgccttcatcctggatatactcgagaactataactatagatgaaaacaactcctcaagacgcaacaaagtcttataatgtgaaccccaacgagtatttccaggtctttgaagggaaagttcttggttcaacccagttcctgtcttaatttcaccattgctaatcttttcttccactttttgccgatcgatttcccggatc

SEQ ID NO: 73 - DNA, 82356 bp, Arabidopsis thaliana
aagcttgaagttagcttaaggaataagctaaccaaatcctaagtgattaggattagattgtatttaggagttatctacatacaatatttagtagttatctaatgttattaggagttatctaatagctagagttttcatataaatagagatgccaagttgtggtaatcctattgagaagtttagagtttgagagtttgagagctttagtgagagctttaggttttgagtaagtttcctaaagattaataaagagtgagtctttatatacaccattttcttgttctataaatcgatagtttcgagagtatatcgtagatctagttcgcttgtgtctaatacttgtgtgcttgggtattagttcgtgatcagttgtatcctgggattcaaaaattatgatgtccgaaaagcacttatgggcgatttattgaagtaaggaaaaagatatcatatcttgcctccgtgatttactttttgtccttaattactgttattgtaattttattgttatcgttatcttaatagaattcgtacttgtttctcaattcggtttttgggctattacaatcttaattcaataaatctgcttttagcttatcgctctagaaggattgagaatttttcgaattttttaaaacgattttaaaatcttctaaaaattgtttctgctatcatctttgggtgcttacgcggaaggtttatagaagaacgttattacttctttctttctcctctttctaaattgcttcgcaaacgctatgtagcgattgttatggacagtttcttatataaacttctctagtttccacgaacgctcatacttgagtgagtttgtgaaacgcgaaacaagtttttgcgaacgcttcttaagcgagtttgcaaaactaattcggtgtaatttagttacctgaattttttggttaatatactaatcaaatctgtttttctgtgaacagaatgactgatattaacaccaacaacgagatcgttggcaacaccacagttgctgagaccccggatgaggaagctttgcgccttgcgaaagagcttgaaaagacacagatcaccgattctgatatggataatgtgcgccgaaatctgttcggtaatggttcaaccaacactaccataccagcctctgtttcccaagggatgatgtcacacttgtttgatggcaaatccgggttcaaaacgtggcaagaaaagatgcgctactatttggtcagcataaacatggaaaggtacctcccagaggatccaccaatagttcctcaaggtaccacatatgtgtatacagttggaggtatggatacatgggctcaaggtgactattgttgcaaaggtctaatcctgaaccgcttgttgaacgatctgtttgacctctacagcaaggccaagtcttccaaaacactgtggctaactttagagaacaagtataagactgatgagtctagaatgcaaagattctcaactgcgaagtttctgaatttcaagatggtggactccaaaccaatcatggaacaggtggaggctcttcaacgtatctgtcaagagatagagttggaagggatgtcgatctgcaacgtcttcaagacgaattgcttgatcgagaagctaccaccgggctggtcagatttcaagaattaccttaacttcaaacgtaaggcaatgacttttgatgatctcatccgaaggttaatgattgaaggcaacaatcgtggggctcacgcgggtgctcagaatcaagggcatgatgttaatgtagctgagcataaggccaagctgaaaggcaagggaaaagggttctctattcctcagaagaacttgaaggtttcatcgtcaacaaacttcaagaagagcaatgctgagcggaagttctaaggaaagtgtcatcattgtggaaagattggacacaaggctgatgtttgcaagagcaaagccaaggatgtcaagagccaggcaaacctaactgaagaggatatggttgcagtggtcactgaatgtaacatggtggacgacaaccaagtgaagtggtactacgacactggtgcaaccacacacatctgcacagataggaccatgttctccacctatgtgaataacaagtcaaacgaacaactcttcatgggcaacacggcgatgtctaagattgaaggtaagggcaaagtggttctgaagctgacttcgggacgtgagcttactctgcaaaacgtgaagcatgtacctgacatgcggaagaatctcatctcttgaacggtgctaagtaacaatggctttgccgttaactttgagtctgataagctagttcttaagaaacatggggtgtatctgggaaagggtttcgttaaaggtggactggtcaaaatgtctgtaatgacagtctttccgaaaaatgtagcttctgcttctgttgtggaaatgaatgaaaatcctattgcttacttggtagagtcatttactacttggcatgaacatttaggacatgtcagttataaaacaatgcgaaaaatgcaaaacatgaatttaattccgaaattcaaaactaaccaaaaaaaatgtgaagtatgcgtacaggcaaaactcactaaaactcgctcaccacgagttaaaagaacaactgaacctctgggtttaattcacacagacttatgtgatttaaaatatgtgcaaactagaggtggtaagaaatactttgttaccttcatagatgattgcacaagatattgttatgtatatctattgcatagcaaagatgaagctctggtaaaattcaaagaatttacactcgaagtagaaaatcagcttcagagaactataaaaatagttcgaagtgatagaggaggagaatataatgagccattcaatgcattttgcagagaaaaaggtattatacaccaaacaactgctccttattcaccagaatctaacggagttgcggaacgaaagaatcgaactctgaaagaaatgatgaatgcattgttgcaggaatcagggttagcctagaacatgtggagggaagcttttcttaccactaactacatccttaataggataccacataaggtgactgcaaagtcaccatatgaactttggaaaggtacagtaccctcgtacaaatacctaaaagtgtggggtgtctagcaaaagtggctgtaccacctcccaaaaaggtcacaattgggcctaagattgtagactgtatcttcatcggatatgcgcacaacagcaatgcttatagatttcttgtttataaatcggatattccagatatccatgaaaatacagtcatggaatcaagaaatgcatcgttttttgaagatatttttccttgtaggaaaactcaaaaacgaactcgtgatcaacgagttgcagcaacatcggaagctgaggacaattctttgggtactattactgttgaagaaacagaacaggaacctgaagatcaacctaggcggagcaaaagagctcgaaaagagaaatctttcggtgatgatttcttgatggcgtttttagctggaaacgtaccaagaacttattcagaagccatgtcttcccccgatgcaccttattggaaggaagcagtcaatactgaaatagactctatcttgcaacatcatacttacgagatagcaaatctaccccaaagttctaaaccattggggagtaaatggattttcactattaaaaggaaaacaaatggtgatattgataggtacaaggctaggcttgtggtacaaggattttgacaaaaagaaggtttagatttctttgatacctattctcctgtaacgaaaataacttcaatcaggatgctcataggctttgcagccttaagagatcttgaaatacatcaaatggatgtaaaaacagctttcttacatggagatttggatgaggaaatctacatgaaacaacctgaagggtttgttatcccaggacaagaacacaaagtgtgtaaacttgtgaagtcactatacggactcaaacaggctcctaagcagtggcatgagaagtttgacagtgttatgatgtctaatgattttaccattaatgaatgtgataaatgcatatatttcaaaattactccaaaagggtacattttgttatgtttatatgtagacgatatgctcatcttggggagtaacacagatatcataaatcaatctaaaaacatgctcaaaagatattttgaaatgaaaaatatgggtctagcagatgttattctgggtataaaaatcatcagaactgatgaaggcattatcttgtctcaaacccactatgatgagaagatactcgatcgtttcaagcattactctaatgggactgcaaaaaatccagttgatcctcaacttcacttgactaaaaactctggtgaacctgtgcaacaggtaaaatatgcaagagtagttggcagtttaatgtacttgacaaacagtacaagaccggatttagtgcactctgtaaatgtacttagtcgctacacaagcaatcaaggatataatcattgcaaggctataactagagttatgaactacgtatgttataccaaagatcatggcttgcactatggtaaagaacctgcggttttggaaggttacagtgatgccaactgaatagcagattccaaaaactctaaatccactagtggatacatctttacacttggaagtccagcagtatcctggaaatctagcaaacaaactgtggcagccaaatcaactatggaatcggaattcatagcattggatacaactgcagcggaagccgaatggcttcgtaatttcttggaagacattccaatgtgggggatacctgtgcctgcaatacgtgtacactgtgatagccaatcagttataggcagggcacaaagtaccctatataatggtaaatctcgtcacatcagacgttgacataaaaccattcgacaacttatcttaactaaagtaatcacgatcgattacatcaaatcagttgacaacctagcggatccatttacaaaaggtttgaatcgagatcaagttgcaagatcatcaagaggaatgggtttaaagcctaccacctaagaggaagtttgatggtaaccccacctacaaagattggagatcccatgacatagattcaaagggacaactaaatcaaactaaatctgttataagcactgagagactgttgtctcttcctagttcctaaaataatgtacagtgcttcctgtatgtgtaaagattaagcatttgctttcaatgatttgaacctagctttgtaagatatgtgaagtatttacatgatattttttaaaatacaagcagctagtaaatcaccttgtgagtgtgaaatggggccgtttctaggagaatatgtgaggctatactctctaagttcactcatgattaaccaggcatgttcaaggccacaatgaacaaaaacaaagaaccacattctacgagaaaatgaagctgtgttatacttgctgtctaagtttgcatcaaactccggatggttaaagacatcatgttcaccatctggccgagtaaactcgacaggtactaacaatcagtaggttcaaagcagataaacgccaccaactcaaatacagttaattttcgtttatgctctcgaaggtctgtctagctagttgctttagtccttaggattagtaaagttttcatatgtttagacttatttctattcatgtgggggtttgttggaactttttttacttaaaatttttccggtgactttccggccaaattccagccaaacggctgaacagaattatcgggtcattagtgcattggaaagctggtaaagagtactacaaaatggtatactcatacgtcaaaaacggagttgtattgaatgagaaataatggtgtaaagtgggatacttgggccaaaccggaccaaaccgaaccgaaccgggctgaaccgggctgcgggttgtcgggacgtcccgtcgtcggctcaagggctgtcgggcttgcggaccgtcatgcttgtgagttattgggcttgctgagttgaatcttatggaaatattctcaggatagtcataaaatattctcaggataggatagtctcagaatattctcaggatagtctcaaaatatgtcatgcttatcctaagaatattctgcaaaatcctatctccctctactatataaagagacccagcctctcattatttctcaagctctcaaacacaaaacactctaaattctaaagtctctcctctctctctattgcttcttaaaagtaagttcttagtttagttgtttcgagagtatatcgtagatctagttcgcttgaatctaatacttgtgtgctcgggtattagttcgtgatcggttgtatcctgagattcaaaaattgtaatgtccgaaaagcacttacggccgatttattgaattaaggaaaaatatatcatatcttgcctccgtgatttactttttgtccttaattactgttattgtaattttattattatcattatcttaataaaattcgtacttgtttctcaatttggtttttgggctcctacaatgtataccctgtcccggtaccactcatatttactcaagttggtcgtcctagtggcaaaagaattgacttttggttaaatgagagagattaccaatgcgcacatgcatatgttttgcgtaattgtgaatattttcgcccgcttgaaaggtattctattttaaccaagtaataaaactttgaaaatctctattttgtaattaataatggaagatcttcgacatgtttgataaagcagtatgttggatgcgcaaattcggaatgaatatccagaactctctgatgatgaggttgcgtcgaaaagagatgaagattttcatatatggattcgccaatatgtagtcaaatactaccgatcatctctctgatatcctacaaattaaaagtgtacgtttacttctttattttatgatttatcagatttttatgtaggtggaagcaacgcgaagtcatcaaagtttccctccatgggtttatgaaatagtagaaggtcctgaaaacaaagtcaagtcttggcccatgtattttacaagagcgtatatgtttcacacgcaggatcatgggcgtaccaataaaataatgaattatggggtatgtgttcgaggccaaaattattctgaagcatctcatgaagaagatgtttatgggatcgttgaaactataatcaagctcgagtatccaggatttgttaacttaaagatcacacttttctactgtcaatggtttgactcaaaagttgggaaaagaattcgtatgagaaatggaggggttgtagacgtgctagaataagggagatatccaaattatgaaccatttattttaggtaaattttaaatttctttagtaagtgatttgtaagaaattcatatttcagttaaaattttaaaatgtcggttttttacagtgtctcaagctgatcaggtttgttatctttcttacacgaacatcaaacgacttcgaaaatcgtggctttcagtttagaaagtcaatccaaggaatgttgtccaagggaagtttaccttaaatgatgtggttgcattgcaacaatccgttgatgaaacaactctgagcataattgaagaaattatcgttgagagcttagctgaaacaaaccatcaagatgaacctattgattttgatattgaagatgctgaagaaggagatgaatttcattgtaattcatcaacatctgaggatgaagatgaagaagaaccagatgatgaacaatcagaatattttgaatggacatgattttaatgtgtatttgtaagaaaattataaataaaatattattttaatatctctttaagtacttatcttcgaagatgaaaatcatactattggccagcccagttggtcacatactagcccacaatcttatacgatcgcggttcgattccatttgacccctttttttatttgaaaaactttattattcgtcacaaaacggtcgctctttgcaacttatttgcgaccaatgaaagttacagtcgcactttgcaactgattacctacatattaccaacactcatttttgcatttcgatatttttaagtttttgtctatgtatatgttttcttatacgttgttactttaatttgattgaaattagatataaaatcataaccaaactcttcaattctgaattttacaaactaaacattcaaaacttcctaatctatatgaagagttacatgttctttgattaacatgattgatattttcaaacaagttccaaaataagttatgaaagcaatgatttataaacctaaacatatgtatgtactttatatcacaaaaatggatgcacaaacacttagctggtcagaaatattttatgcaagttcttcaagaaatggtaacagttttctttccaacaattcccttaacagcttttctattattacttccatgattttaatctgtttgattttctttgtcaggaagaacagttgaagcggcgagtatcatttggcgaagtgttcatgaaaactcatacaagggttgatggaacttttgtagatcagaagtctcagcatgttggtgaggcttacatgaagatgctcgaagaaaggatgtctgaaattgacaaggatggtcctcaaatttctggtaattcctcgcagcattcaactcatcgtatgctcagcattgatgaaaagaatgagattttttttaaagtaattttctgtttttattttgcttacaatctgcttgtctttgtttgcttggaatttatgagcaatggatacttaaagtaatgatgattgtctttggtgattgtaattgtcttattgtttcagtgtactcttacagatggcaaagggaacccttttggccttggatcacttgtggagactctgaacaaaagaagaaggacggagagttatgcgagctcttcatcaacagttgcacagcttcaagagcagctgcagctcaagatgtctgaacaagcggagcaaaatgcaaaatgtgatgaggagcaccgccaatctcaatctcggatagccagcttggagaagctcgtcctcttcataaaaaaaaaagatcccgagttggatgcttatttgtcttcagattctacagatgttgaaccagtcacacttccaaccaccacacaccacacttccaaccgccacagccaaccaaccaaccatcacagaagcaggcaccaaaggagacaacagattaggcaccacacccttagtctctacttcagttactttgtctaacactgcttctaacaattaaacttgatcttttgtagcttttgttgaacttgttaggatgctaatcttttgttgcttttgttgaacttgttaagatgataatatttaggtttcactatgattttgtgaatgtaaacttgattactgttcttaatggtatttaactagcatcattggctttttaattcaatattaatcaggtttatcattccaaatatacgacaatttgtgactaaaccaaaacaaaaaatgtgactaactagtgaccaaaccactttataaaccagtgaccctttcgtcaccaaacttactcccactatgtgacaattatgtgacgaatttgtgactaaatcaaattatacaaatatgactaatgtggcacaagcgtagcaaaagtgttacaattttgcgatgaattttaaagcgccttaacttcgtcgcaaaaaggaaagactattttccgactaaattgtaactaagtgtatgaaccgtacctcagtgtacctcgttgcagtttagtcgcatatctgcaacttcttgggatcgtcacaatacagtcgcatatttacgactaacagaacgcgtccgcaattcgtcgctaatcggcgaccattttgcgactttattatttagcgacggtttaatatcgtcactaagtagtcgtaacaaccttgtttgcaaccattttgggactaatattggagttgcaaattgcaggttttcttgtagtataattgttgtagtctcttcctttctcttaggttttcggaaaatactgctaccttttctcttaggttttccccaaatactgcaatcttcatctatctcactgtcttcaacgacgagattcacaatatcttctgttagaacatgaaataaaacaagtaaaattcaggcttcttgaccacaaacttattgagtcactttagtagtaaagaaatatctttactcacctgaaaactcaacttgcgactgagacatatctttagcatcagaagagactaatttcatttcctttgtaccattactttctccaagaaaagcaaactcaagaccatcgcttgtatgtagcatcggtgactcatagacataactcgaacactacttacttagatcatgaacttctgagaattttgaaaatagaagtgacgaaccacataagtaaaatgaaccaatagatctagggatgtataatcataggaaaagagtgaagaggtgaaggagagctaaggagaagggaggaatgaaggaagaatcaaggaagaggaagaggtaagagaagagagcgaagaggatgaagaaaatagaaattagggtttgatttttattttgagcttttttcttattttgggctaagtattggcggcatagggaaaatatttggttaatgttggcgattataagtaattttagttttgattccgtaattatagggtttagcgtttctgaaatgctataatatagttatcaaaattcaagtaccatctatgatagcagttacggaaaatacgctatcgtaatatgctatcaatactcatatttcttgtagtgatgatggaggagttttaataacaaattttcagtttacaaacacctctttctctgcatattgtattgtcgtaaacaactctttgactgaccaactagatattgacccgtggtacaccgcatgttgatattttctttaaaaagttaattttttttttaattaatattatttatttatgaataacatattcaagagatacattatagttctataattttattttatttttttgattttttgtctttaaaataatttatatatataggctattgtttattgaagtatgatacaccttgtgacgatttttataactaaagattatatttaattttaaattatatttgttgtgttaatattatttgttttgtttagtgtttacaattgtataattatattttgattgttaattctagggtttcacccatagtataccatcccataataatatcgatctagacttgtcccatatgaccatgtcgcatgaaattaaacatcattttattatttcttataaaattcaaatactataaatatttgaaacttcaaaaaaaaaatattgatctaaactttataattgtattttgattgttatatctaagatttcacctatagaatatcatctcgtattaatatcgacccaaatcattcttaccatataactttgtcctatgaaattaaacatcattttgtcatagttttataaacttcaaatatttatactaatagaactaacgaacgttactgtaaatgataaccaaaacatagaacaaatagtaacaaaaatttaaaaataaataaattattttctaaattaaatatataatattaaacgaacataaatttaatttttaattaataaatatttaatttgttttcttgtttgttcctcatcaaatttgggaagaaacaattttcttctacgattcctcaaaaaataaggaatgattaggaataatgtggggtccacatgttacaatttggaaaaaaaaatttagttgaatggtgaaaaaaggggaacaataaggaacatgtccttcctgtccattccttaccttaaaaatggtcaccaatcggaccctttaaagtttcaatccttcaaaaaaaagaccagagtaaaccggttaacattcttaattttggatgcctgataaatctaagctttctgctcattcgtattcagaatcattttaattctttttatagtatgactttgaaccattgcccagttttttaagcaatgtgggaccttgtacaaatattttgttttctttatcgattgagtaatgtatatcagctttttaaaattgaattacataatatgcagaaaaatctaacatttattaattatatatatttttatataaaatcaaaataatttagaaataagaacaaataaaagtgaaagaagaatttatatatttatatttaatgtaggtaaatatagaaatgtagtgcaataaagataaactttaattaaggatataaatctaagaaaatatattcttaaaatagatttggtagggactaaaaactaattattatttacttttggactaaaatttcgctggaggatattttatgcaataactcaattataattattcacaaatgggatgttaagaaaggaaaatatttatgtaaatgtttaatgttgattgatgatttgtaagttttgtactttaaaatattttgtttagatattttttgtagggattaaaaactaaataatatttacataaaggattttttacaaaagcttcaccaaaaatgtataggtagaaatattattttgttcaggggttggtaacacagcttatgacacaaacttagacaaatatacactcaatagtatctctcttcttgtggacttgctggttttggaaggcgaggaacgctctactcttctccacttcctcgttcacggagaatgaaatagttgacaaagcttaggctgaagcgaagtgttgtcaatcagctcaagacaggacgttatctcaagtatttccatcagtaaactctagagaacacttaatttcttcttcctctgccccaatcgtgtgttacacagatgctgcgtggaatgcaatctcttttaatgctggtctcggctggtctttccgttctaatacgactccttcagaaagtactatcaccagagctgtgactcatcgatccgtggtttcttcagcgattgaggcggaagctctggcgattctggctgccctaacgcaagctcgctctcttggttttagggatatttaagtcttctccgactgccaagccctgatttctatcctgaattcttctgagattcacattgagatttatgctaccttaatggatattcgagctctttgtgcttgtttccactttgtaggtttttcttttattcctagttcagccaactgtgaggctgatttgctagctaaacatgccctttgtgcatttgaatccaactctgtaccgtgagtttcactacctaatagaatctccttatgacaaaaaaaaaaaatacactcaatatcgatcgtgcaatatgtagactttttgtttttttctatattgtagaagacatgtagaaaagcaaaagtcttactctggtgtcaaaagaagcaagcaaagtggtcacacccaccacccatccaagagctcttcggctaatttcatcctttaaatacaattcaattgcagtttacctaaaataaaaagaagaaaagcagtgatagaaaaaagtacatatttttaatatgttttttctatctttattggataacatgttaaacttgattggattagagtgtatgcaatctttctcttaacttctatcttctatttagctagatttacacccacaatccttatgcgacaatgacttaaacttaaaacaaaatcttcatcgcacatcttcttagaaccagtgatgagtacatcacatttcctcctctctggtttttgctctaaacctttatagtatgtacatgggagatctcctaaacagtagcaacagatctcccatttgctatgtttttttgttttttcttcttttttttttatttatatagagagcagaaaagaacatgtggtttcaagtgtcctctccagcacatagaaagtatcatcactccagttaccaataacctaaggatattacataaaaataggtgataaatgtggaatagtgtatttattagactgtatatatagattcggtttagaccggttaacttagattgtatttacaatgtatatggtttagattggtttagtgtagagtatataaacatccaattgtacattctgtttcgattgagaaatatagaaaactttcacatatctctttgattcatgttctctatcatggtatcagagcattttctgcgtttttccagttggttttattttcaatcttcaattcttactcagtttcttcgattattcacttctctttacatcgattgttcttccgcgcgatcgattttggtgaaaatagagaacaaaggtgggaaaatgaagaatctcagtgatactcctgacgatggtggttttgttgctcgatctactcgtaactcgatgattgctgaagatcctgaagttgcgagagctcaacaacaactcaatcgaagattcgaaacttcggtaatgactccaacttattgatagtgttttatgttcagataatgcccgatgactttgtcatgcagctccaccgattttgagaacgacagcgacttccgtcccagccgtgccaggtgctgcctcagattcaggttatgccgctcaattcgctgcgtatatcgcttgctgattacgtgcagctttcccttcaggcgggattcatacagcggccagccatccgtcatccatatcaccacgtcaaagggtgacagcaggctcataagacgccccagcgtcgccatagtgcgttcaccgaatacgtgcgcaacaaccgtcttccggagactgtcatacgcgtaaaacagccagcgctggcgcgatttagccccgacatagccccactgttcgtccatttccgcgcagacgatgacgtcactgcccggctgtatgcgcgaggttaccgactgcggcctgagttttttaagtgacgtaaaatcgtgttgaggccaacgcccataatgcgggctgttgcccggcatccaacgccattcatggccatatcaatgattttctggtgcgtaccgggttgagaagcggtgtaagtgaactgcagttgccatgttttacggcagtgagagcagagatagcgctgatgtccggcggtgcttttgccgttacgcaccaccccgtcagtagctgaacaggagggacagctgatagaaacagaagccactggagcacctcaaaaacaccatcatacactaaatcagtaagttggcagcatcaccgaaacttctgaggtccgtggatcgatgttgaagaacactgactctttcgacaatcaattggttctccattcatagaatcatccaggtttaacgattgtatctcatattcttgatggaactaattacaacagttggtcgattgcgatgaaaattagcttagatgcaaagaacaagctaggcttagttgatggatcgttgttgagaccttctgaggatgatttgagtttccgcatatggagtagatgcaatagtatggtgaaatcatggattcttaatgtcgtgaacaaggagatctatgatagcatattgtattatcaggatgctatggaaatgtgggatgatctattcactaggttcaaggttactaatctgccaaggaagtatcaacttgaacaggctgttatgacactcaagcagggagatctagatttgtcagcatacttcattaagaagaaaacattgtgggaacaactgtcaaacacaaggattcgtactgtgaagaaatatgattgtgatcaggttaaagaacttcttgaggaagcagagacaagtcgtgtgattcagtttttgatgggattgaatgataatttcaataacattcgtggttagatattgaatatgaaaccaagacctggattgaatgagatctataatatgctagatcaagatgagagtcaaagaattgttggatattcaagacctgtggtgtctactccttcaccctttcaagctcaggcaattctcactgaacaaaacaatattctgatggcacaagggaattcacagaaacctaagtgtctcattgctttcgtgttggtcatactatggacaaatgttacaaagtacatggttatcctcctggtcatccaagggctaagaagaataattatgtgggcagtacaaacatgaccagttcagattcagtggtgtctcagaatgattctatggttattcagaaagagaatttgcttgaagagaagaatgcagacatgtcaccacatcaacttcaacagatgatctcttatctaagttccaagctccaatcaaatactgtctttccatctcctgataagtctatagccttgtcttcaaatcccgtacaatctatctcacagataactggtacatttctctctctctatgatttctcttactatgacatgttgacttcatctatacctcatgaaactgagttgtctcatagagcttgggtaatagattcagggggtagtcttcacgttacacatgaaagggacatttatgtagattacaaagccttagatagaacatttgtccggttacctaatggtcaggctgtgaaaattgagggtgctggttatattcaacttactgatgctttgtctttacataatgtgttgcatatccctgaattcaaatttaatttgttaagtgtgagtgttgtgactaaatctttgaattctaaagtcaatttcacttctgatgcttgttatattcaggcacttactcaggagttaatgattggaaacggtagtcaagttgcaaacctatatgtcttgaatgttgataagtctctttgtcatgtttctgagtcttctttacaaggtctgtctgtctatgctagtgttcatgttgaacctgatatgtggcataaacgtttaggacatccatctttgaataaaattgatactctttctgaagttttatctttgtctaaacagaaaatcaataaaacatctcatcattgtcatgtttgtcatcttgcaaaacagaaacatttgccttttaaattgtcgaatcacatgcgtaataaaccgtttgaattgattcatattgacacatggggtccgttttctgtacctactgtagatggttttagatatttttttacaattgttgatgattttagtcgtgctacatggatttatatgcttaaacagaaatctgatatcttacatgtttttcctggttttcttaatcttgttgaaactcaatataacactaaagtttgttcagttaggtcacatcatgctaatgaattgaaatttacatctttatatctggaaaaaggaattaaaagttttcattcttgtcttgaaacacctgaacaaaactctattgtagagagaaagcatcagcatttgttgaatgtaactagggctctcatgtttcaatcatgagttcttttacaattttggggggattgtgttttaacagcagctttcttgattaatagattaccttccccagtcttggaaaaccaaactccttatgaaagattaactagtgaaaaacatgattatcaatctcttagaacctttggttgtttatgttatagctccacatcccctaagaatagaaccaaatttgatcctagagctagagcttgtatttttctaggttatacatcaagttttaaagggtataagctattagatattgagacatactcggtttttgtttctagacatgttatatttcatgaggaaattttccctttttcatcatccactatctcagatgatgtaaagaacttctttcctcatttttctcttcctgcaccaaatcatgatggacatctgcctctagtgcaaccatcttctgatgctcctcaacatcaagatgagacatcttctcctatttttattccttctgaatctaaatcgaataggcagggaaaactgccttcccatttgcaggactttcattgttatactactaatactcttaataccctatctaaaacttccccttatccactagcaaactaaatctcttattcttatttatctgagccttccagtgcttttattaacaccatcaccaaaataaaaataccgcaaaagttttcagaggctaagaatgacagggaatggactgatggtatgggtaaggagattgacgcttttataagaactgaaacttggagtatctgtgacttactacaaggaaagactgctgtgggatgtaaatgtgttcttaccattaagtttcatgcagatggcagtatataacgatataaggccagacttgttgcaaagggatatactcaacaagagggcattgatttcattgaaactttttcccagtagcaaagatggctacagttaaggttgtgctttctttggctcctaaaatgcaatggtctttgcatcagttagatgtttctaatgcttttcttaatggtgacttgagtgaagagatatacatgaagctacctcctggttatggagagttgatgggagtagaagtttctcctactgttgtttgtcgtcttcacaagtcaatatatggtttaaaacaggcttctcgccaatggtttttgaagttcaagagtactttggtgaattttggatttgagacgtgtcatggtgatcatactttgtttatgaaagaggctaatgggcattatttggtagtattggtgtatgttgatgacattttgattgtgagtactcatgatgaagttgttgtggagttgaagtcacaattgagttctgcttttcaactcagagatcttggtcctcctaaattctttctaggcatagagattgctagaaatgaccaaggtattactcttaatcaacggaagtatgttctggatttgttgactgctacaggtttttctgattgcaagccgtcttcgatacctatggaacctaatcagactctttctcaagaaactggtgttgttcttgctgattccaagcagtatcgtcgtcttattggcaagctccaatacttatgcatcacaagacctgatattactttcgcagtttcgaagcttgcacaattctcatctgctccaacggatattcatcttgttgctgttcataagattcttcgctacttgaagggatctattggacaaagtttgttttatggaacagatacaaattatgatttgggaggattttcatatgctgatggagggacttgtccagatagtagaagaagtgtgactggttttgccatttttataggttcttcattggtatcttggagatcaaagaaacatgatgttgtttcaatgagtactgctgaagctgagtatcgggcaatggctgttgctactaaggaactcaaatgggttggttatctcttgacagctcttcctttcaaagcatcggcttacttatactgtgataatgaagcagtcttgcacattgctagcaattttgtgtttcacgagcgaactaaacactagagcgtgattgtcacaaggtaagagaatgtattgaagctgggattctcaagactatgtttgttcgatcagataatcagcttgcagacatgtttactaaacctctttatccggtgctctttagaactaacaatagcaagcttggagttcttaacatctttgaaactcaagcttgagggggctattagactgtatatatagattcggtttagaccggttaacttagattgtatttacaatgtatatggtttagattggtttagtgtagagtatataaacatccaattgcacattctgtttcgattgagaaatatagaaaactttcacatatctctttgattcatgttctctatcagtatttgcttgcaaagtcgaaattatttcaacacttttaccttaacggttttgtcatcgtacatgatccaacaatccacatatataactcaactgaaatggaattagggcatcaattggataaagaaaactatgagtacagatttatatccccaatgaatacatgaaggaaccatggtgaaatatcattgaggatctcgttcctatttctggcttacttccggatgcactaacctttccaactcatgcgttcacttgatcacctcttctcttgatttggtcagcatgaagatcttgtttatcaccatgctctgtgatttttcataaccacacagaagataatgaatcaaattatgtaagaccgaaggaaatgaaagtagcttcaaaccgaaggaaatgagaagaatgaatgcttgagaagcgtacctaaattctgcatcaaaaaggacaattgttcatcaaaaaggttagggaaaaaccttcggtgatgcacttaagggagatgtggagaggtgtcgtttatgagataaatggtaggaaggggaaacgattgaactttcttggacattattgaaaaccctaatttcttagactaaagattctatgtcgagagaagtctaaaagttaatgacgtggctgtacttgggaagaattttgagttagaaagagagtaatatgacgtggctttttcattaagttaactcaataatacataaatattgtttcatgtcgttaatttactgaatgtataattatgaatttgctgatgtggcatgattttaggtagtcttgaatttgctgatgtagatggtttgagaagccacaatgagcttcttttattagtaagagattggtttagaaatatttttaaagagaaatttctaacaaaatcttacatgtatgtttcttatctcctaccgctaccaccactttcctagatttattagcacgtgacacttttaggatacaaggaattgaacatgcatttgttagaaccgttgaataacaattcataaattatttttaagtactacataatttgtttccaatgggaaaagtaattaaaaaaaagaaaaaatagaaaaaggcgccattaaaagtagtaaccaacatatactttaaccgatggctcaaaaacttcgttctcttaacaggtgtgggtttcctcgcaattgtcttgcaaatttgcgagggaaatattcgtcgcaaagtttgcgacggaatagcgagttggtcctgttctttcggagagatctattcgtcggcgaagaagaggtttgtcggagagatctattcgtcggcgaagaagaggtttgtcggagagatctattcgtcggcgaatttgaggtttgtcggagagaacaattcatcggcgaatttgagttttatcggagagaacaattcgtcggtgaaaacgaagaggtttgtcaaaatgaaactgaaaccttaatttttcagtaaggttaagaccgttatttaccacattagaaggggcagttttaaaaatggccatcaggaaagggcattgttgcaaaaggttattagaaaaggcacttttgcaaatctcccttttgattgttatatataagatttcacctgtacaatatcatcccctattaatatcgacctaaatcattctaaccatataaccccgtcctatgaaattaaacattattttgtattagttttatataaacttcaaatatttataataataaaactaacgaatgttactgtaaatgataaccaaaacattaaacaaatagtaaggatatttaaaacgtgttaacctaacccgagaagactcgcaactccgtcgcaaaaattgctacagaataagttatcgtcgcaagtgcgtcgcaatttgcgggggaactcagtttcccgcaaagccctcgcagacttgcgacgttttgcggggaatcatggcttctacgcagtttcctcgcaattgtctcgcaaatttgcgagggatatactcgtcgtaaagttcgcgacggaatagcgagttggtcctgttctgtcggagagatctatttgtcggccaagaagaggtttgttggagagatctattcgttggcgaagttgaggtttgtcggagagaacaatttgtcgacgaatttaagttttattggagagaacaattcgtcggcgaaaacggagaggtttgtcaaaatgaaagtgaaaccctaattattcagtaagggtaagaccgttattttccacattagaaggggcaattttaaaaatggctggcattgttgcaaaaggttattagaaattggcacttttgcaaatctcccttttgattgttatatctaagatttcacctgtagaatatcatcccctattaatatcgacccaaattattctgtccatataaccctgtcctatgaaattaaacatcattttgtcttagttttatataaacttcaaatatttataataagagaactaacgaatgttaccgtaaatgataaccaaaacataaaacaaatagtaaaaaaatttaaattgtgttcacctaacccgcgaagactcgcaactccatcggaaaatttgctagagaataaattatcgtcgcaagtgcgtcacaatttgcgggggaactctgtttcccgcaaagccctcgcaaatttgcgacgtttttgcgggaatcatgacttccacgcagtttccttgcaattgtcttgcaaatttgcgaaggaaatatacgtcgcaaagtttgcgacggaatatcgagttggtcatgttccctcggagagattcgtcggcgaagaagaggtttgtcggagagatctattcgtcggcgaatttgaggtttgtcagggagaaaacaattcgtcggcgaatttgagttttatcagagagaacaatttgtcgacgaatttgagtaggtttgtcaaaatgagagtgaaaccctaattattcagtaagggtaaaaccattattttccacattagaaagggcagttttaaaaatggccatcagaaaagggcattgttgcaaaaggttattacaaaaatggcacttttgcaaatctcccttttgattgttatatctaagatttcacctctacaatatcatcccctattaatatcgacccaaatcattctgaccatataaccccgtcctatgaaattaaacattattttgtcttagttttatataaacttcaaatatttataataattaaactaacgaatgttactgtaaatgataaccaaaacattaaacaaatagtaatgaaatttaaaacgtgttcacctaacctgcgaatactcgcaactccatcggaaaattcgctacaatataagttatcgtcgcaagtgcgtcgcaatttgcagggggtctcagtttcctcgcaattgtctttcaaatttgcgagggaaatattcgtcgcaaagtttgcgacggaatagcgagttggtcctgttccctcgaagagatctattcgctagcgaagaagaggtttgtcggagagatctattcgtcggcgaagaagaggtttgtcggatagatctattcgtcggcgaatttgaggtttgtcgcagagaacaattcgtcggcgaatttgagttttattggagagaacaattcgtcggcgaaaacaaagaggtttgtcaaaatgaaagtgaaaccctaattattcagtaggggtaagaccgttattttccatattcgaagggacagttttagaaatggccatcaggaaagggcattgttgcaaaaggttattaccaaaatggcatttttgcaaatctcccttttgatttttatatctatgatttcacctgtagaatatcatcccgtattaatatcgatccaaatcattctgaccatataaccccgtcctataaaattaaacattattttgtcttagttttatataaacttcaaatatttataataagagaactaacgaatgttactgtaaatgataaccaaaacatagaacaaatagtaaggaaatttaaaacgtgttcacctaacccgcgaagactcgcaactccatcggaaaatttgctacagaataagttatcgtcgcaagtgcgtcgcaatttacggggaaactcagtttcccgcaaagccctcgcaaatttgccaagtttttgcggggaatcattgtctcgcaaatttgcgagggaaatattcgtctcaaagtttgcgatggaatagcgagttagtcatgttccatcggagagatctattcttcggcgaagaagagatttgtcagagagatctattcgtcggcgaagaagaggtttgtcgaagagatctattcgtcggcgaatttgaggtttgtcggagagaacaattcgttggcgaatttgagttttatcggacagaacaattcgtcggcgaatttgagtaggtttgtcaaaataaaagtgaaaccctaattattcagtaaagggtaagaccgttattttccacgttcgaaggggcaattttcaaaaggctatcaggaaagggcattgttgcaaaaggttattagaaaaagggcacttttgcaaatctcccttttgattgttatatcttagatttcacctctagaatatcatctcgtattaatatcgacacaaatcattctaaccacataaccccgtcctatgaaattaaacatcattttgtcttagttttataaacttcaaatatttataataagactcgcatcctagaccctaacccgcgaagactcgcaactccgtcgcaaaaattgctacagaataagttatcgtcgcaagtgcgtcgcaatttgcgggggaactaagtttcccgcaaagccctcataaatttgctacgtttttgcggggaatcatgacttacacacagttttctcgcaattgtctagcaaacgtgcgagggaaatattcgtcgcaaaatttgcgacggaatagcgtgttggtcatgttccctcggagagatctattcatcggcgaagaagaggtttgtcggagagatctattcgtcggcgaagaagaggtttgtcggagagatctattcgtcggcacatttgaggtttgcggagagaacaattcttcgtcgaatttgagttttatcagagagaataattcctcggcgaatttgaataggtttgtcaaaatgaaagtgaaaccctaattattcagtgaggataagaccgttattttccacattagaagggacagttttaaaaatggccatcagaaaatggcattgttgcaaaaggttattagaaaaagggcacctttgcaaatctcccttttgattgttatatctaagatttcacttgtataatatcatcccgtattaatatcgacccaaatcattctgaccatataaccccgtcctataaaattaaacatcagtttgtcttagttttatataaacttcaaatatttataataagagaactaacgaatgttactgtaaatgataatcaaaacatagaacaaatagtaaggaaatttaaaacgtgttcacctaacccgcgaagactcgcaactccatcggaaaatttgctacagaataagttatcgtcgcaagtgcgtcgcaatttacggggaaactcagtttcccgcaaagcccttgcaaatttgccaagtttttgcggggaatcattgtctcgcaaatttgcgagggaaatattcgtctcaaagtttgcgatggaatagcgagttagtcatgttccatcggagagatctattcttcggcgaagaagagatttgtcagagagatctattcgtcggcgaagaagaggtttgtcgaagagatctattcgtcggcgaatttgacgtttgtcggagagaacaattcgttggcgaatttgagttttatcggacagaacaattcgtcggcgaatttgagtaggtttgtcaaaataaaagtgaaaccctaattattcagtaaagggtaagaccgttattttccacgttcgaaggggcaattttcaaaaggctatcaggaaagggcattgttgcaaaaggttattagaaaaagggcacttttgcaaatctcccttttgattgttatatcttagatttcacctctagaatatcatctcgtattaatatcgacacaaatcattctaaccatataaccccgtcctatgaaattaaacatcattttgtcttagttttataaacttcaaatatttataataagactcgcatcctagaccctaacccgcgaagactcgcaactccgtcgcaaaaattgctacagaataagttatcgtcgcaagtgtgtcgcaatttgcgggtgaactcagtttcccgcaaagccctcataaatttgctacgtttttgcggggaatcatgacttacacacagtttcctcgcaattgtctagcaaacgtgcgagggaaatattcgtcgcaaaatttgcgacggaatagcgagttggtcatgttccctcggagagatctattcgtcggcgaagaagaggtttgtcggagagatctattcgtcggcgaagaagaggtttgtcggagagatctattcgtcggcaaatttgaggtttgcggagagaacaattcttcgtcgaatttgagttttatcagagagaataattcgtcggcgaatttgagtaggtttgtcaaaatgaaagtgcaaccctaattattcagtgaggataagaccgttattttccacattagaaggggcagttttaaaaatggccatcagaaaatggcattgttgcaaaaggttattagaaaaatggcacttttgcaaatatcccttttgattgttatatctaagatttcacctgtagaatatcatccagtattaatatcgacccaaatcattctaaccatataaccccgtcctatgaaattaaacatcattttgtcttagttttatataaacttcaaatatttataataagagaattaacgaatgttactgtaaatgataaccaaaacatagaacaaatagtaaggaaatttaaaacgtgttcatctaacccgcgaagactcgcaactccatcaaaaaatttaccacagaataagttatcgtcgcaagtgcgttgcaatttgtaggggaactcagtttcccgcaaagccctcgcaaatttgcgacgtttttgcggggaatcattggctcgcaaatttgcgagagaaatattcgtctcaaagtttgcgatggaatagcgagttagtcatgttccatcggagagatctattcgtcggcaaagaagagatttgtcagagagatctattcgtcggcgaagaagaggtttgtcgaagagatctattcgtcggcgaatttgaggtttgtcggagagaataattcgtcggcgaatttgagttttatcggacagaacaatttgtcagcgaatttgagttttatcagagagaacaattcgtcggcaaatttgagtaggtttgtcaaaatgaaagtgaaaccctaattattcagtaagggtaagaccattattttccacattagaaggggcagttttaaaaatggccatcagaaaagggcattgttgcaaaagcttattacaaaaatggcacttttgcaaatctcccttttgattgttatatctaagatttaatctgtaaaatatcatcccgtatgtatatcgacccaaatcattctgaacatataaccccgtcctatgaaattaaacatcattttgtcttagttttataaacttcaaatatttataataagactcgcaatcctagaccctaacccgcgaaaactcgcaactccgtcgcaaaaattgctacagaataagttatcgtcacaagtgcgtcgcaatttatgggggaactcagtttcccgcaaagccctcgcaaatttgcgacgtctttgcggtgaatcatgacttccacgcagtttcctcgcaattgtctcgcaaacgtgcgagggaaatattcgtcgcaaagtttgcgacggaatagcgagttggtcatgttccttcggagagatctattcatcgaagaaaaggtttgtcagagagatctattcgtcggcgaagaagaggtttgtcggagagatctattcgtcggcgaatttgaggtttgttggagagaacaatttgtcggcgaatttgagttttatcagagagaacaatttgtcggcgaatttgagtaggtttgtcaaaatgaaagtgaaaccctaattattcagtaagggtaagacagttattttccacattagaaggggcagttttataaatggccattcggaaagggcattgttgcaaaatgttattacaaaaatggcacttttgcaaatctcccttttgattgttatatctaagatttcacctgtagaatatcatccagtattaatatcgacccaaatcattctaaccatataaccccgtcctatgaaattaaacatcattttgtcttagttttatataaacttcaaatatttataataagagaattaacgaatgttactgtaaatgataaccaaaacatagaacaaatagtaaggaaatttaaaacgtgttcatctaacccgcgaagactcgcaactccatcaaaaaatttaccacagaataagttatcgtcgcaagtgcgttgcaatttgtaggggaactcagtttcccgcaaagccctcgcaaatttgcgacgtttttgcggggaatcattggctcgcaaatttgtgagggaaatatttgtctcaaagtttgcgacggaataacgagttggtcatgttccctcagagagatctattcgtcggcgaagaagaggtttgtcggagagatctattcgtcgacgaagaagaggtttgtcggagagatctattcgtcggcgaatttgaggtttgtcggagagaacaattcgtcggcgaatttgagttttatcggagagaacaattcgtcggcgaatttgagtaggtttgtcaaaatgaaagtgaaaccctaattattcagtaaagggatagaccgttattttccacattagaagggcaattttcaaaatggctatcaggaaagggcattgttggaaaaggtaattagaaaaagggcacttttgcaaatctcctttttgattgttataccttagatttcacctgtagaatatcatctcgtattaatatcgacccaaatcattctaaccatataaccccgtcctatgaaattaaacatcattttgtcttagttttctaaactttaaatatttataataatagaacaaacgaatgttacaataaatgataaccaaaacatagaacaaatagtaaggaaatttataacgtgttcacctaacccgcgaagactcgcaactctgttgcaaaatttgctacagaataagttatcgtcgcaagtgcgttgcaatttacgggggaactcagtttccgcaaagccctcgcaaatttgcgacgtttttgcggggaatcatgacttccacgcagtttcctcgcaattgtctcgcaaatttgcgagggaaatatttgtcgcaaagtttgcgattggtcctgttccctcggagagatctattcgtcggcgaagaaaaggtttgtcggagagatctattcgtcattaggaaagggcattgttgcaaaagattattagaatatcatcacgtattaatatcgacccaaatcattctgactatataaccgcgtcttatgaaattaaatatcattttgtcttagtttaagaacttcaaatatttataataagactcgcaaccctaaaccctaaccagcgaagactcgcaactccgtcgcaaaaattgctacagaataagttttcgtcgcaagtgcgtcgcaatttgcgtgggaactcagtttcccgcaaatcccttgcaaatttgcgacgtttttgcggggaatcatgacttccacgcagtttccttgcaattgtcttgcaaatttgcgagggaaatattcgtcgcaatgtttgcgacggaatagcgagttggtcctgttccctcgcaaacctctcgcaactctgtaacaatttgcaagggatgttttccatcgcaaatttctctcgcaaatcgcctgttttcttgttgtcaaaaaaaaaaaatctaaactatttgcttcatcatcgctcttcctacaaaccaaactggcttgaaaaaagctgtcattgttttcatcatgtgttatccatcattatctgtccatctatatgtttatattttgataaaacttgtatcttttgatatcatttacattgatttcacttgttggacacatagaagtgtagagaaataatttgcattccttgatttagtggacataatattgtggaactcaatttgcgaggaactcagtttcccgcaaagctctcgcaactctgtagcaatttgcgagggatgttttccatcgcaaatttccctcgcaaatcgcctgttttcttgtagcgaaaaagaaaaaatctaaactatttgcttcatcatcgctcttcctacaaaacaacctggcttgaaaaaaggtgtcattgttttcataatgtgttattttatcattatctgtccatctatatatttatattttgctaaaacttgtatattttgatatcatttacatggatttcacttgttggacccatagaagtgtagagaaataatttgcattccttgatttagtggacatgatattgtggaactcaatttgcgagtgaactcagtttcccgcaaagccctcgctaatttgcgacgtttttgcggggaatcatgacttccacgcagtttcctcgcaattgtctcacaaatttgtgagggaaatattcgtcacaaagtttgcgacggaatatcgacttggtcctgttccctcacaatcctctcgcaactctgtagcaatttgagtgatgttttccattgcaaatttctctcgcaaatcgcctgttttcttgtagtgaaaaagaaaaaatctaaactatttgcttcatcatcgctcttgctacaaaccaaactggcttgaaaaaagatgtcattgttttcataatatgttatccatcattatatgtccatctatatgtttatatttttctaaaacttgtatcttttgatatcatttacatggatttcacttgttgcacacatagaagtgtagagaaataatttgcattccttgatttagtggacatgatattgtggatactatctaacttgcagaaactatttcttatattttttcagaccagtttcttgtttaaaggggatcaagtcaaaccacggcatggactcttctacggtcaatacattctctctctggaacattaaagacataaacaccatttacattatgaagattatttttttacgctacaagtgacaacaaaattgttagcaaataaagaagtaatgacccccaaaaaaagaaagaaaacaatacaacacgtttcatcgagaaacttacagtgttaaagaaacatatagctatttcatcatttgactgattgataatatgagttttgagtgactgagcaatgcaactaacatcaatgtgaaaatgactttttgtttgtcttctttctcttgttaaatatcaatataatacaaaagggcaagtagagctgaacattttgggagaagcatcaattagatagactacaaattctttggaattctttggaagcctctttttcctgttgcaccaaaagattcatcactaaccaatactaatcaatgtttcatttcttttttggctttcactaaaaagtccaagaagaaaaaaaggttaaaactgaaagatatcatttacatcaaacataatcaatataaccggttaagcaattaatgatacagaagactcatcaatggacaactatgatatcatttacatgaatttgacttgttggacacacagaagtggacaacaatagtttgcaatccttgatttagtggacatgatattgtggatactatgtaatttgcataaactatttttttatttgggtggatataaggacaactatgatatcatttacatggatttgacttgttggacacatagaagtggacaacaatagtttgcagtccttgatttagtggacatgatattgtggatactatctaatttgcataaactatttcttctatttttttagatcaatttcttgtttaatggggatcaagtcaaaccacagcatggactctactattgttgataaaaattttcatttttagaaagcaacatgacttttcctttctcaattctagcccattatgatttatgtacatagatatcttatattttttctgctaacgatgcagaatgcagttgaaatggcaacattcatctgattcatggtaaggccacagtctaaattatgtgcatcaatccttaaatcagctatgtaatgttattcagaaaaaactttcatttaatatttcggtggggaataaaagaaattttttgctttatgaagaaccatacgatgatataaagccgactaaagtctgggtgcgttggaagtacacaataatttgcagcaacacactatctctaatcgtcactctcgttagtctaaacttttcagatatctacaagttccataatcttaagcttatcaaagtctatgataaaacatcgctctgccaggtcaatacaaaagagtcggagattccgaatcgacttctatgtcatctttcccatcccactggcggttaaggcgctgtatacacatcgttcccaaaccattgccggttaaggcggaggcaactcaattgaaagagatcgttgaaggagatttttgggatgggagaaagagagcgttgcacagggaatatcaactacttcaaggctcatacccaacccggagattcagaatccacttgccagaagaattccttggctggaagaaatatcagccatcgacatcaatattgtgagataatatcctgtaattgtgaaggtaactccctttctcatctccaaatctcaattgtcgttttattagataccaattcaaacaaaactatgctaaccaattaagcaattgatggtttagtttgaaaaggatataattgtccttttatcctccataaacaagggaaagtgcctcatcctcgaaaagtgcctcaaaaggaataatattctctgaaagtgcataaacgtgtcatattccctttcaaaaataatgacatgtatagctctccttgtggctttgtcatagtatacttgagatacaaacatctaagtgcgaagatcaaagaagaagagaatgccagccagctccgccgctaaccaaatctctttctcccaccgtctccccgtcttcctacgaatgcagcatctatgtcgttcttcatcaccattacattcatgaatcatcaaaagtcgcaacttttgttccgatttcataattgttgtgatcttcatctatgctgagaaatataattaaaaaagctgatgtgattaccacaaaaacattgttatgcacattctcttctcctccaacatactaacgaatcatctctctgctataatattttgtctttttttattattattatcttctacttaaacgttgtgtgtgatttttcttatcatgaaacaatatcacatgcacggttctacaaaccaaccaactgaatttcttttaagaaagctcgccgatgaatttttgatatcgccaccaattttctaacagttttaaaatatagtagcttgatatgagctgaacgaaaaccctcatcaaagtatttttaaggaacaaaaaggcgttataaaatttatggagtttttttttctcgacgatatttatatggaaacaaataatgctatttttatatatacatgtcattatcaacttatatttccttgatttttgtaaatttatggcatgaatacaataacttaaaagcaaatagcttaaatttattatggaaaattttctaaatattttttcatcaaataatataaaaattatcaaaatgaaaatttccactttattaaatttattaaaaaataaataatttattattaatcactctaaatttatcagtacttcaagttattttattcagttattaaagtaaaaattcaattattctattcagtttttattaatgagatggtatatactttaaattaataaaatagaaattttcattttgataatttttatattatttggtcacagaatatttagaaaaattttcatattttcaaatattctcttattttcatatatgagttttttccaatttacaaaaatcaaacaaatagaaaataagaataatttcataaatgttaattagcgagatgtctaatcccgattgattgtttaaagtcctatgtgaacgtctttagaaacaataaaaattaaaacattttaaaactttgtaatgttgaaaattacaacatttataaatatagataaagattataaatatagatatacccgaattaccatgactagataaatttattaatatagataaagattttacatagtttatattacatttctgcaaaatgtatatatttattgtaagtacagtatataaaaattaaaactatagaatatcttattaacttttggtttgtttagtttagatacactaaaattggttcggttcggttcaatttcgatttttgattttctaattcatgaaagtatgaaaccatttttatataagtaaatcttggtttggttttagtgaaatatcagtttggtacaccttagatgtttttgttatgttttttttttttttttgggggccaaattaactccttttgttagtcagtatttaatagttaatacactcatatagtttcatattcacaaatagttaactatggtgcaggttttgtttaaaataactttttcgttacctttatactcttttcttctggaatttttttgccaaattaacctcttacttttaactagtattaaatagctaatacaccaatatatcctcatgttcataaataattaagtatggaccttcggtgcatatttagtgtttactgttagcaatgggtttcataaaataagtttggtagttatttgaataacttacttcattacttttgtattttcttttctttaatttctttgcaaattcatttgaatacaaacagtaaatgtactacaatgaagcttgaaatgaacatatagagggacttaaatcctaatttttctatctatgatatgctcaagattttttattcaacttatttcatagtcataaattgaaatgtattaaacgaataatatttataaacggtgtaaaacgtcaaaagatgtaaattatgtgataactaataaaatattgttggtgagagataaataaagaaagatgttattttcactattaaagagttactaaataataacgttaatgaacattcgacactataaatacacacagaaatcctcattggtaaaacataaacaaagaacccaattaagaataaaagatcaaaatattttaaaatggagaataaaaccatgttcatcctattttcttcgatcatggttttgctatcgttttctcatctaactttggccaaagaaggcgataatgacaagccactcctcatttcagacgacgagtttaatgcgatgattgcaaggtcaccgacagcgaacgattataacgataatgttggtcgtacatattcaaagaaacaaaaaaaatatcttctaaactgcagtaaaaagatggacgtcccagacaaatgtatagaagaagtgttggctgaaattattcagaacaaaagtgcttcaagggattgttgtttagggatagtgaaagctggaaaggaatgtcacatggaatatatgaaattattttttcaaatctatcaacttagacgttttacttctaaaaggttttccaaagctaatgaaatatggaacagatgtttcactgaaattggagctgtttcaccgtattctggttaaaaaagatgtaactaatttcattatatgaatacaatactattatttctgatcgattttgttttctgtgattttagtttttttctttgctaacatggaaccattaattataccaacaatttgatttggttttacttatcaaacatatgacacaaattttgtgtgactaaaaatttttattgaaagttttgaaagatatgtttttatatgtctacttgttgtcaatattataaactctttaaattttaaaattaccatgacaaatagttacaatttaaatacataactaaaaataactttaatacaacttttaggttttacaacatttgaacatttttttggtttataacactttctttagttttagatatttaggataacgacgtgtttttatgtataaaataaattgttgtacggaaaataacttcgacgactttctcattttggtacccacaaatttattatttttttgtttatcttcgctacattagtcaatataactcttctaaaaataatatactatatagaagtatatttataagtttatctacactttcttttaacaactcatattttctcacactcttttcaatatatatatgaatttctgtcttcacaattttttacgaaaagctatcactctcctatttttttgtaagcactcattttatttgtttcattctttcttacagtgtctctttccatcctcttttgattttttctaagcaatatgtgtcataccttttaaactcacatgctccatatttcttcttcgaaaatctcttttttttcttgttagtataaacatttttcaagctcgttaagatgtactctgtttgttttctgttattctaagaaaaagttttcgcttctaaattgttatagttactgaaattccttttccaataagtttaaagttaatattttttattttttattttttttgaaagaatgtaaaattatattcaacaaaaaaaaccattgtttacaataaatgtaacatgaatttagagagttcaaacagagtctgagagatgatcatgtgtcctaactgcgagtttgaaaccaatactgcagcccaccttgaagtcttttgttccccatcttctgaagtgtgctgaatctattccgaatgtttttgtcaatgagcttagttagcttcgaagccggaattgcaggctcaccatgtcgcctaccatttctctctcgccatagactatgaatcaaagcttggaatgtataccgaagggtgaaaacatggagatatggctgagacgagtcaagaaggtgaggagtgattaagctccaactcgaaacgtttctgccattgagaagtccttttgctaaagcgatccaaatttgagaagaatagggacacgagaaaaagaggtggtctcgcgtctccagttcctcgtcgcagaaaacataatttatttaaagttaatatttattattttcctttatatttattttaaaatagaaagtaattactattttcaaatatgttaattacttagatgataaatatgttaattattgatatggctaatctcgattggtgacgcctttaaaagcaaataacttcaacttttatttagtatagatttccttctaatgaaccggtcaagatcatcgatcacagaacgctttagatcgtcgtttcatagccatggtatcaaaagttgactgatgcttgaggatttccctctcgttgttgattattgattttaattagataaaagaaatcttctattaaacttctcattattaaggcaacaaatagtacttcccttatatgtacgtcttttattcctttaattatgtaattaatactaatttcaaaaatgaataaaaaaaaaaaaaaactcacgtgtcattagaaaccctaatggcttcttcttcgtttctttgtttgtagccgaccacggcagtttcttctttctgataaaacaatttcctctgtttttttggattaaagactcatacttccgtcgaatagaatcaatcaatatatcatgatgctcaagttgatcaaatcaatggttcaagcaataactcgtccgatacaatacttgatcatctcttacctccggtatcttgtcggccctccttcgctgactcaccatgataatcaagtcacggttatcatcgaagagacttctgagaacggaaggatcaacgtgatccatggcgccactcaggcttatcttttcgacaaaatcaaccttgacttcgtggaagaacgtgagttcgatgatatataccaaggggccaagctcaagtggaggattttcgtggataaaaataatattggaaacatccctaagcaatgcttcgagctgagatttgacgaaaagcatagagatttggtcttcgactcttacatacctttcgtggagagcaaggcaaaggagatcaagagcaagaagagaatcctcgagatgcatacatactctcactgctgtgacacttgggaaaccaagatccttgaccaccattcaagctttgaaacgattgttatgaaggaagacctcaagcgtagactcatcgacgatattgacctgttcatcagcaaggaagatttctacaaaagagttgggcgacattggatgagatattacttgctgcatggtctaccgggggccgggaagactagtcttgttgctgctattgctaaatatctcaacttcgatgtctataacataactcaaggggtgaaaactgacttcgacactcggagactaattcgcagagtcgaggatagctcgattctcctcgtagaagatatcgacacctccctcgaggttagtgaacttgtgctaataatctatacagtcaagtcaatgggccaaattacacacagttgatgattaattttattagtatatattttcaaactaattaccttttgttttgttttctttggtatgattaacagggctcgaaagtggcattatcgcaactgttaagttccctaacttggccttggtcgaatggcaaggcacgcgtcgtgatattcacgacaaacaacaaggagaggtttgaccaaacattgctatgtcgtatggaaatgaaaatttacatgggacattgctgttttgaggatttcaaaacgttggcttctaactacttgggcatctctcatgacaatgatgccccacaccgtctctacccggacatcaagcgtttgattgatggacaagctgtgacaccaggtcaagtcgtggaggagctaatgaagagccaagatgttgatgtggccctccaaagcttggtgaggactttggagatgacgagtatcatatcaaataagattgatgaagatgacaaagacttatgagttacgtttccttgaaacgagtttatgaaagttgtgctcattttccacaaaacatcgatttcttttattattatacctttaacacctaaataaccaaattgcgtgtgttgattaacctagtaatagtttactaaaagcttgtgattcactaaaacgatggtcacccgatgctcaccgtcctctttttgtgcggtggcttagcccttataagcccaagggcaacacacgagacataaatctcgataagaataaatgatctactcaaaatatatggaaatgatctcccaaaaccaagtttattttcctttatacagaatttcttgtccttgcctacatttcaactaaggtttgtatttctatctacatttcaactaacgtacaataacttgtcttctccattaatgttataacaagaagaacttctaagagcaaagagaaggtagatatctcagtagtcggtcacctagataggctataagccgcaggtaagatatagttcatcgaaggagaatgatcacattgatgatgatctaccacaaattccagaagaaacaagaaaaaactcaaatttggattcaaaacctaggaaaagtcagactattatagttgaagctctgaaccaagttcgatgcaatgagacagagaccggaagtaatatagattactcgagtaacgagaaataagagataagtagctctcaaacttgatttcattggtagaagaataaaacagatctgagagacccaaagtgaggtttaaaggaagtttctaaagaaaatctaacttcttcagttaatctctctctgtggcatgtacttaatacttttgatttaagttataattttcaaattgtataattgaaatagaatttttgccttcataataatttaaaagttttagagctccaaatattatactatttgaagcaaatagcctcgactttttaaaaaaaataaaatttttttttatttctcttaaaagtgactaacctaatttttaatgctatttttattcactttatttattttaaaacagttagaatctgcttcaccgcttctaaatataaatatacttaatgtatactaattcatcttatagtagctttgtttataaataatgatgattatgctgatttaataataataaaaaattaaatctttagcaacatgtctttgagaatgtatcgaactcgaatctaaaaaacataagattatgagaatttggtgaaagccttaattaaaaatgaaggaagaaaaaatatgtcttagtcatattattgtttgttttcaatgatttatatagttacaaaattattttatttaaaaaagattggaaaggcttataatctcaacttcgtcttaaactctgataaatctaggaacggcattgctgaggagaacttaagtttccatgaagacaatttatgctaactaaaaacttacttttttactcgttaagagcattccaagattattcccggatttgacaacatataatctttatgaatataggttttcaaaaagaaaaaaaaaatcttatgtatatattatcttaacttggatgcactaaacacttttgtaaggtatgatatccagattaactatattttttctgaactttctggatataccttatatttagattgattgataattgaaacaacccgactcattttttaaaaatataattaaatattcccataaatatctaattaaaccaaccaataaaataacaattaaaccgcaagtcaaaaatactattttatgaataaataaataattcgaccagcaaaaccaagaataactaacaatcctaaccgggttccaataaccaaaaacacaaaaataaaacaaccgagttcctaaatcatcctttcttccttgccatgattccacgatcacactttatctttacctgcatcaacaacacaaagagatgcgtaagtattatcacaaatacttagtgagacgatcctcccatctacgagctatacacacaagcaaataaaagggtataataacaaatacaacataaacaaaccagtcattgaacaattcacccaaacacacattcaccacacctacatatcatcacataaaacaaatcatacaacccaatcgctcagataagctcgtggtcacgcactcaccttaacaaattgatcctaacaataattaaaccaggagagactctccttgcgtctgaaacagtccagaaccgccctacaacaagtccacaaccaaaaaaaccttgaagcaaactggacaggaaaaatcagaaacaagcagtctcaaagacgaaaccctaaaatacaaactaaccgttaactattcaatcgccccggtgaaaccctagctgccgacgtaaaaacgcctcccacaaaatctagtgccgatcggaaaacaggcgagaccacgatctcagtttcaatctccgctggtcctaattcgcgtctgagaaaacgtgtctcacaaaactgcgaataactcaaccaattttaatccaaatcaagttctgtaaactggagcataacgataaacgacttgggaataactctaccaaatttcgttacctttgaccatgatttgatatgacgaaactgatttcttccaaaccctaacgattctgctccttctccttttctctttttttctcttttataaaacgaaaagtggttaacgattctgccctaatttcgagtttccttcttttataggcacactttagggtttccaattaacccaaccaattaaaccagatgatttaaaaacaaaccctaaccgattttccggttcacgggcgttacaatagtttagtttgaatgaagctttgttttagagattttaactatgaagatttaaatgtaaattagatttcaaatttattgagtgataattacacatgtatatatactttggcaattcagaaaagtgtgagattttaatattatatatagtatagttaaaattgtgatatttgacgaacataaagcaattacatgttttctattataacgtatacgaaattacgaaactgtactataatcagatttcagtctttagaattttatatccactgttttttatagggctcggcgtttgttttttcggtttggttttggtttggttttttcggttttatagttttttggttttaagaaaagtgaaaccatataaaaaccatatgaaattcggtttggttacggttcggttttaacggttttacggtttttcggttttagaaaaattaaaaccaattaaaaaccatatgtattttggttcggatcggttccggtttggttccgattttttcatgtttttaccaaaaaaaaattataagtttgatgcataaataaaatcaaaatctagtttgtatacccaaatcctaaatgacagcatgtaatttatattgaattttagtttaggttagggttagggttttgtttttcgatagtttggtaaatataatatatcaaatggatattatatttatatatatacaattatttttaattttaatcaaaaaccaaaaaaaacattcgattttacggtttttaaccaaaccaaacctaaaccaaaacttaaataaaaattacaaccaaaaggatttttatacaaaaccataaccaaaccaaaccatttgtttcggttcggtacggttcggttttccggttttcgttttttttcccacccctagacttgatacagtgtatgaaatgaaagatatttaaaatgtattatgtggaaactatttgaaaggatgattaaagatcacactgattaatgtagagaaccaaagatatggcccggttttggcctaattcatgaattcgaagcccatattatgaaatatatgtgggttgtggcgacgaggtaattttattgtggtatgcggtgaccctttttccgtgacaaacaaatgaaaacttacaaaacttaaggttctagattcggatggacccagcaaatagacaaacgttgccgtctttttctcgagacaactgtaccttgcaaatagattagtagctgttgatgaaagtcactaaattaaattattcatttttgcagattaataaaaaaatattttgttgtaactcttgtcttcgttttcgctttattttattcagtttatttggtcccttgaaaattacctttggtttaataaaatttattttaaataaactgactaattaaaaaaaaaagaaaaatgtcaatcctaacttttaaattatggctacatatataaaatattcacatgtgaagctgatttataaagatcataatttgaaaattgagatattaaataacattttctcaataaaaaatcatcataatacttgataatagtttttattgttttggatagaagtggatattcagttattcggttcaatttggttctgactattcaaattttttgttttcaataacaaaaattgatctatttgaaatataattttattttggtttgatcgatttgagttttgattcggttttttattaaaaaaaacttatagctaactagtttgagataagggaaaaaccccgaaaaaaccgttatctaattttttttggccgtttaatacgtgtagtattaaatttagaataaaaatactttatttaatttcgcttgtctttaaaaaccttcatttttaaaaaattggtaaaatcgtatctccgacttaacgattgttaactatgccaacggaaatattaactgcggttaaaacttaacccatgcggtttatgtttatatatacaatctattttcaaaattttacgattaaataaagtatttttttcaaatttaatagtaaacgtattaaacagcaaaaaaaatttagatggcagcttttttgggttttttccttttaagataatattaccgatttttagtcaatatcagttaaacagttcgcctttcaatatttgattaagactaggggtgtcaaaatgagtcaaaattcatgggtcaactcaactcaatccatgaaccctaatgagttgaaaattttgactgaaatgagttgatgggtcaaatgggttgatgagtcaattggtttgatgagtaaaatgagttgggttgtaatggttaatggtttcaatggtttacccaattaacccatcaaattttgtaaaattgaattaaaccaactaaaatctctaaatcaatgccaatttaagtttaaccaacacatctaaaccaatttaataaaattaatatttttccaaatttcttaaatatacaagcgatgaaattgagaaaaaataaactcgtaatttttccaccaaaaaacataaacccatgatttttccaccaaaaacgtaaacccgtgattttcccgccaaaaacgtatatccataattttcccgccaaaaacgtaaacccgtaatttttccaccaaaaacgtaaacccgtgattttcccgccaaaaacgtaaacccgtgattttcccgccaaaaacgtaaacccgtgatttttccgccaaaaacgtaaacccgtgattttcccgccaaaaacgtaaacccgtgattttcccgccaaaaacgtaaacccgtaattttcccgcgaaaaacgtaaatccataattttcccgccaaaaacgtaaacccgtgattttcccgccaaaaacgtaaacccgtgattttcccgccaaaaacgtaaacccgagattttcccgccaaaaacgtaaatccgttatttttcgccaaaaacgtaaacccgagatttttccgccaaaaagcttaaacccgaaattttccagccaaaaaatgtaaacccattattttccggccaaaaacgtaaaaacctataattttcccgccaaaaacgtaaatccgtgattttctataccaaaaacgtaaacctgtaaaaagtggaatccgtaaatattttaagtttgatgataatgaattaataatgataattatttattattgttttataataataattaattaaattattacttaatgggttaactcatttaacaactcaacccatcaaattaaatgagttatgggttgacccaacccattttgttaaatgggttgggtcaactcataactcatttaatcctaaactcatttgattatgagttgagttgagttgggttacccattttgacacccctaattaagaccatgtttagcttatttactgtaaaaatttatatactatttggattgttttaatatttattttagcttgggtaaaacaaaatcttctgttcagtttagtgacttctgttcaatttttaattttagtcatcagccaaaagtcactgcttcacataccataatattttctttatatatatatttttaattattgatgtaaatattgtctttaaatcagcagattttcctattattaatttatcatatcttcaaatattttaagcgtaacttgaccggctctaccttcaaatttagactaaaagtctaaacacaaattctgaaatatttatttgcgatacagctagattaatatatatacttttggtttgtccacaagattaatgtaacgtctgcttcttcaaactaaataaaaatagtaaatacatttcttgtcttggttgtaattatctacaaatgtacaaaacgtaaactaataaaacactgattaaaacgagtaacttttggctttaagtgcttctaagtcttaaaagttaactaaagccagttctgtgtctctcttctctttcctctctctcacacacatcttcgagaagtttccgccggcgggagagatcaaagacaactgctgatcagaaatcagagatcagagatatgaacattctcttctccagattctcctttttgcttctgtttctctgttcttggaccagtttcactttcaccacaacaggtttgcttcaatgttctgtctgaaagaaaaagaaaattgttttttacacttttgtctctttttcatctgtgataattatcattgatatttgtaactctttctgaatttgtgatggtgaatgatgatgatgattctgtggggtttctctgaattttaacgttgtctattatcttaaccaattgataggaaaaagtcttaattttgtgtttgttctgttttctggttatgagctcacatgtttgagattatctttctaacacagaagcttatgatgcacttgatccatatggaaacattactataaaatgggatattatgagctggactggtgatggttatgtggtaagaaatttaaaaacttcactttaaatgttgtggttatcacaatgttatataataaatcttgtttcaaatgtgtctttagtgattactactattaacaaattattggcttcaggctgttgtaacaatctttaatttccaacaataccgtcacattgaggcgccggggtggcaattaggatggagttggatgaagaaggaagtaatttggagtatggttggtggtcaagcaacagaacaaggagattgttctaagtttaagggtaacattcctcattgctgcaagaaaactccggctatcgttgatttgttaccgggaactccttataaccaacagatatcaaactgttgtagaggcggtgtgattagcgcgtgggcgcaagaccccgcaaccgcgatttcttcgtttcagattagtgttggccagtctggaacaactaatactacggttagagcacctaggaatataactttgaaggctccaggacctggttacacttgcgggcctgcaaaactcgttaagccgagtagattcatttccgcggataaacgaagaaagactcagtctttgcgtaagtttagcttttgtgttagcatctataagttatattttcttgtttctaatcccacttctcttgatgttttcttatggcagttacatggaacattacttgcacatattcgcagtttctagcacggaaaactccgacttgttgtgtctcactctcagccttctacaatgaaactatagtaccatgtccaacttgttcttgtggatgtcaaaatagttctcaagctggtacatgtgttgagtaagttcctatactcttagaaactccatcttggttttgttttcttatctcttttctgattcatttcttgtgacagccctaaaatagcttcagtagtaccagccttagggaagaacaacctcgaacctctcttgcaatgtacgcaacatatgtgtcccattcgagttcattggcatgtaaaaactagctacaaagagtactggagagtgaaggttgccatcacaaactttaactacaatatgaactactctcagtggaacttagtcgttcagcatcccaacttcgacaatctcactaagcttttcagtttcaactacaaaccgcttaatccttacttgaacataagtaagtttctcattcagattctttctcttgttcttaagaaatgtttggtttctaataatataatgttttggatcatatattgaagatgacacggccatgctatggggaatcaagttctacaatgattttttaagccaagctggtccagtaggcaatgtacagtcagagcttctcttccaaaagaacccattggagttcacattcgagaaaggatgggcgtttccgaggcgcatatacttcaacggtgataactgcgttatgccacctccagactcttatccatggcttccaaacgctagtccaaacattgcaacctcgccatttgtcatacttctcatcactttcttatctgttttgattcttatgtaaatggatatctatatactgtcatggacatgtttggtgatgtttacattataagtgagtgtgttattaggaaatcattctttgtatctgaaatatattattatctatacgttaattgacaagcatgctatgtatgtattgtgacttaactagttatcttcttgaaggttaacactttgttataataaaaccactgacattgtttttaagaaatttgaattttatttgttcactatgactttgaatgaatatgtgttttagagttgtttttggttttagtttttctgatatcctattttagtcattcaagatgttgacaaaaaaaattttccctagagagaaggaaatccagatttttattaatttttgcaaatttctaaagaaaatcaaaaatcctattttttatgagtttttaggaatttttttcccagatattttttgttgttaaaaaacacacacataaaacaaaaactaaaaaattagaatttgtcatgaggttaactacattataatcttttctatttagtccattatactgtcacaaatatattttcttttggagtccaaaaatatctctagtatgatcaagaagaatgtgaacaattcacatggcatccaatgtaggggattgattgacaaggttgcattcaatatataagtacatttttgttagtttggatatagaattttaaacaatgttcggataacaaaagacccctttttttttaatatcattaagagattctaggctttggccttacatccatataatgtttgtatgatattttttctactaatatcatacaaacttacagaagttttgggttgtaatgaccaactaatggactaaattgaatggattataatttgatttaattttatgactcattttactctttagaaagttgattgtctacttagaaaaaagttgacacgtcaacattattgtgaataatgtttttttattatatataactttattggtgatttctatcaattctcactagtttggtaatgttgaatatttagatttactgaataataaagttctatactaatgatgtttccattttttatgagcaatatatgatgattttaatttttattataaatttcttccattaaaaaaacaatgattcaatatgccataagaagaaagaaatctcattcacctcctccttgaccaatttttaaacaaaaagagaaagatatctaagacagattactggcctaaactggactacaatataatacttaacttaccttttatttacttagaaagattactctgactttgagtcatcaaaaaatcaagacattaacattattcattgaatctaaagattcaagagggaggattgatactgatttcatactacaaaattcttagacaaaaacaactcgtgagatcttgacgattcagaagcgtgggtggtgtcaaactttcaggtgcgttggttgttcttttagaaaattaagaaatcgttttggcttttcgtgttgtctacttggttttctagcctcttttatcgttggaacaatcacagatttaataaactcaatttttttttatgtttgatatatgtaacatactagaaataggattggttctttacttttttcatttccaaccatactttgataaaaacaaaaccattcattgattgataaactaatttagtggaaaataataaaaagaaaaatctcaaaaatctagagattcttttacttatgtacgtcacttccacaatttaaaattggttttcaaaattgaattcaactttgtatcagttatggattcttatatatatagctgataaaaatttgattcttttcaccaatatgtgcgtgtgtatatttgaattaccacaccaaatcttttcagtaaatttttaatactgaaaacagataaaccacaaaagatgggaaagttcataccgatttttctttctaacatgagtgataaagttagatcaaaagttcttcggtatcattcttttcgggcagagttattacaaagaatttcttgatagctcaagaaatattccatagtttatgtatgaagaagtttttttgattattacgattgatatcagtaaagcatatgacaagatagaatgaatctgtttagaggttgttctgactcgttttaggctataattttgtttggatttctttgatcatgtaaagcattaattaagtttcttaccatgtgttgttggatgggaaacctaaaagacattgttttctacgatattattggaaaatatggaatagctttaggtcaaaaatcaacttcaatatattatgggttatgggttatgttcggtaagaaaatattaattacaccgaacaaagtaccaactaaataattatttagagttaccatacatatgttcttatgtgctttaatgttctttaagagcttagtgctaagctaacaagtgttattttgaactattgatggagtttaaaggaaagtacgtgtgcctacaatgactggcatcggagaaattgtgtaaattaacacatggaagggatggggtttcgatctttcgaaaaaatcagtgaatttggatggatttagtgaatatcttaacaaggggtttcaacacccttgctaaacattattggtgatggatttaattctcaacttcactagtatatatagcaggggtgttgaaagtgagatactacatgaatgttcacattatggaggcaaaaacccctaactctctgtcatttggatggaagtgtataatttagacaataaaaacacgtcttaaaaggataataaatcggcttggcgctatatagatgatcctaggataccaaattttaatctccgacaaggaaatagcagagaaaagtttctccatccaaacttaatggtaacaaatttttggcactaatatatccttcgagagtttatggttctagaagatattccattttgggtgtggatgtaatccaaaattagaaactagataagctaattaggtatcatacaaaatgtgagagacatacagttaagtcaaactattgattaactaacatatgtttgaggaggtagagtggaaccttagttgttagttgaacattaaacacgaaagcaggaaaattagagctctttcggagacactttctttgggcaatctagtctctgggcaagagtggtgagaagtaagtacaagatgggtgatatccatgatgccaaatgggtcactgtgaaaagcaactggtcatcaacatggagaagtattggtgatgggctgcgtgatgttattattcatggacatagcgggtttgggcgacggaaaagatatcagattttggatagatagatggttatcgaataattccattatgaagtctccaaatgcaccgttagctgcggggatggagatgcaatcaactcgagatttatggagagactgtaggggctcagatatgagtaagttgataccttttatttccaaaaatacaagactgtaactgtgagctgtggttctagataatgttactggtgcgaaggataagatatcttgaggagatagtgcagatgggaactttattgtgaggtcagcttatgctatgttgacactagatgatacactgagacagaacttggagcagcttttccgtctagtgtggagggttttagtaccaaaaagaatacgagtgtttttgtggctggtttgtaatcaggtgataatggtcaatgcggagaggaagcgaaggcacatttccaacacagatgtatgttctgtctgtaaaggaggggtggaaataatcattcatgtactacaagattgtcctgccaagattgtcctaccaagattgtcctgccataacatgtatttggaccagaatagtaccaaggcaaaaacaacatgtgttttttactcaatcactgcatgaatgggtttatgctaacctagatgaaggagcggttgttgagggcagttccttggctactttctttacaatatcggtttcgtggggatggaaatggtggtgtggtaatgtctttgggcagaatggggtgtgccgggatagagtaaagtttcttaaagatgcagttaaagaggtggccttagctaagctcgcaaatatggggaatgagaggatgatcagccgagaggagaggatgattggttggtcggcaccacaagtaggctggattaaggtaaatacaaatggtgcttctagaggaaacctgggcttagccacttcagcgggggtttgcgagatagtgatggagcttggtgtgggggctttgggctgaatataggtaaatgttcggcaccgttagcagagctgtggggtgtgtactatgggctgtatttggcttgggagaggatggccacccaagtggaattagagattgattcaaacatggtggttgggtttcttacgacagggatatgtgactatcatccgctgtcctggtgtgattgtgccatggctttatcacaagggactggatagtccgtatctctcacgtgtataggaaagctaattgtcttgctgacggattagccaactatgcgtttactttaccgttaggttttcattcttttctttctgtaccagaggctgttgctccgctttggttagaggataatcatgggtctacaagaccaagatgagtacagatgtagtttgattttattttttctaataaatcacgggaggcgtttgactcctggtcgcacacaaaaaaagacactttctttggtaaattgcatcggcatccttagtagttacttcaagtatgctcatacatttcagatcacatgagacaaatttaaagatatgtcactccaatattttttttttaggtttcttcttttaagaaaagtatttggtgcccatttggtataataaaaaaaaattgtgccccttttatatagacaattttttttgtgccctttttgtatatacaatttttttttgtgccctaaaaatttatgtatatggggcggtcgtactaccaacacctatagttaagccgacactaagtctataacgacgcgaaaaaagttgtgacataacctgtcaaagtctgggacataagaagaaaccattaatcatgctccttttatgtctccatcctccttgcaaacttgagagttgtcaccatttctattaattcttggatttcttacaagtttggtgcccacgaatctgaattttctagtttggagagtaccatcttaccataaggagcaggaaatcactttagttgtttcatgtggattttatggttcttacggaatgataggataactaatattttgcagataaagtcatgcactgcatgatcatgcccgctttttaattttttttttgtgtggaataaacaaaatagtaaccaaagaaaacaattccttactcctcacaaactcctctaaaagtcaattcatctctaccaaatcggaagagtctgttgaaaatgctaccctcttctttagctggtctatcatacagtaaacataacccatttgagttattctaatttggaatgtagtagagagagacttactgtatatttcgagctcccataatggatcctactacatcatcttgatatcaaaaccatgtcaaaccaaataagttttgctccttccaaagctatatatatatatatggaatggtatcttgcaaaacctaagttttctaataattgaaacctgtttttagtataatcaagattcataagaatttattcgagcaagtttttgcaatttgtaactgaattacaattttaatagtctaattagaccaaatatcatattagtactaatatagagaaacatactttcctatgttgttatccatttactacaattactacgctagtgcttgtgaagagttgtgtcccttccttcgagtgaaatcattccgtaagaaccataaaagccacggaaaacaactagagagatttggtgctctttatggtgagatagtactctccaaaatagaaaattcaaatttgtgggtaccaaacttgtaaaaaatccaagtgttaaatgaattgttgccaactcccaagtttttaatgaggatggatcataaaacgagcatgattagtagtttcttagatgccccatacttttgacaggttatatcacaacttatttcaagtctttgtagacttgaaataactgctacggatcccgatgcaagttaccaaagaaagtgtatgagtttagaaagagctctagttttccattcttaagcgtttaaagctctacaactcaggctccactctacctcctcaaacatatctcagttaaccagtagcttaaccatatatctctgacatttcgcatgataccaaattagcctatctagtttgtgattttggattatagtcattcccaaaataaaaggaatatcatctagaaccacaaacccttgaaggatacgttagtgccaaaattttgttggcagattcatcaaatgatttaccattaagtttagatggagaaaacgaccatgattctaggaaaatctatgacacttttacaatgaaagataaaaaaattaccattatattaaaaaataacataactgaactaaacatgtattgagataatttaagtaaaacatagaaatattttactaatggtgaagaaaagtgtgagctaaatctataaagtaaaatattttgatgtctgctttgtttcccactaactcattttatttaaagatgttttgagcatctttgttgcttttggttttgcaatggcttatggcttcatattttttcttaagaaattatagatacaaaagagtatatttcattgtccattttcattttgtccatcgctaattgttttcttcttctatcgcagttatttccaagtggtaagaattcaaggagaatggattcagtcaaccaacgagacagaatatcaagtctaccagatgtagttctagttatgatcctctctttcttgtccttcaaggataatgtaaagacgagcattctctcaaagcgttggaggaatatttgctatgaagcaaagaacatttcctttaaggaatcagagtatgtggacatctctgtgtttgactatgtctccaaacgggtatcatttgttcggtatatgctcaactgggtctctagagttcccattaaggttatcgaaagttttgaaatttgtctcggttttccggtgggcttcgaggtagagatcaagtcattgattgagttttccatctctagacaagtaaagaagttagttcttgatttctcaagccctttttgggataacacatgggatgggttgagaaatgatgactttgttattgaattgcccgcactcatttacggtctacaaaccctcgaatcattgacgatttacgcatgcatgtttgacccttcgagattcacaaacgtaggactaagaacgctctctattggttggtttagacttgaaaagatcgaatctttgttatcaaagtttcctttgcttgagagtctgagtattatctcttgttaccttgatgaggttaagttagctgggcaaattagagtcagagaactgatcatcgataactgcattatccctaccatgtattgtttgttaaacctacctaacatagaaatcttcaagtactccggaaatgtcatcgtcttcgattttcagaaagtgaatatgatattgttgaaagaggtttacttagatttttttatagagcatgaaaatgacgaaccaacctattcacctaaagaagctggagatattctttcccatcttcttaatgatcttcgatcttctaggactttgaccgtctgctcttatctccttgaggtatgtttttaacaaataattctttgccatataaacaaatttttacatattttgttttttccagtatttaaacgggatcgagactgattttactctattttacgttagtttctagaacaaaatatttgcgtaatcttctaatatataattatggcctagaggattataaatatcttgaacacgtaaatgagatctgtccattttgttaaagtaaagtagatatatcacccttaaattattaggttgaattgttgcacaaaataatataattgatcgaaccatttgtgtgcgtgtgttttattttcttatgataggtgatttcagaatgtaacgatccggttgatatgcttcgtgatgtccaagcacaacatttggtgctagaaaccctcatgcatccgaacgagtttacgggtatgaggctccttcttgatcattgcccgaacttagagaccctcacgttccagcttctttgtctaaaacctttccctgtaagattacaatatattgaatagtcacattactctatataaatgattattattattagtattactaagactcatgttgatcttctccagatggcttcacatggtggctccagttcacatacattatggctggaaaacatctcatcaaggtgtttgagaaggactctcaagatccttgtggttaggggtttttgtaatagctggaacgagttctatttattgaactatttggttctgccggagcatgggtttgcattggaaagagttgaactttacttgcctccgttgcaagaaatgccaaggcagtgggcctatcatggagccgcgatgttacaaaaaacttcaaatcgagtacaagttattttgcacagcgcttgaaaagttccttttcatgacttctcaattatggggtttagcccattcgttgatgttttcaagtttgatttatcgacaataaggttggtacttttggtaccttggattgttatttatgaataagagcctcgggatatcgaggactttgttttggttctgtcagcacaccaaaaacaatattaaatatttgagtattaccattatgatatcatctactgttaaaaattattgttaaaagataatataattaagaatcttttcattttatttctttgttcttttcttttttctactcgattttaattttagtaggttttatatttttgtttctttggtactagaattagattgaattctacttaattttttcacttcaatctatctaattactttccattaaatgcatgtacatgtgcataaactaataaggtaagtatgcaaaaatatttatttggaacataaatttttaaaataaggagacgccaaagctgcccaaaagaaaagagtctaaagaaggtgaactcaaattggtctatccacattgaaattcacctccatttttgtgggtcccatgtcctttcttgaggaacggcttcctactgctgaattgctatattttagtctttcacaacatgtttaccaattatgcaatcaccacgtaatctttctttgtgtttgtccttgcacaatacctaaaatcacttaaatgtttgttaactgatcttgaaatcacttctggtcaatcatgcttatttgtgaaacttttttcatgatgtatgattgaaaatataaaaaacaattatgacattgatatccaaatgaattattttaagatatcttcatgcaccactatatttgctgatattaggttgttacaatctatttactaacacatcacatcatcctagttgtttacgaagaccatcacccccgaccgagtcaacccttttgtctttacactcgtttgggtttggctctgatatcaccagtgattttatggctgccacctttagtggataatgttctctctcgacacatgtgtccaccttcttctaatggccaattcgttacttttagaagatgtaaagacttgtttaccgatctacatatcactagtgatcttttccggtattttgtccttacttgtactgataattacttccatataggtcacaaatcctaaaagcgctctaaactctcttcatacaccactatctcctgaagttggggtgtttcaatcttgtaatgttacgaccgccacctttggtggaccccatgtcttttctcggtctgtgtgccaccctttttcgatggcatgctcactatttcttgaggctttaaagagttatctaccgatcctacaaatcactatgtgatctttcctcatgttttgtcttcgctcgcatggtaacaacaaccacttcagctcaagcatgcttaactgtagataagttcactttaaagatatagatgatcaaattaattattttaatctcttctcatgcaacatcatatttcctaaaattgggtcttacaaactcaaaaaagaccaacaattctaacatgtggacactcgcaaaccagcattaacttttgatataaataaagttggttgtgtcctagccaaataataattaaagatctaaaatctgcattataacataattcgaatctcaaaagagcttcctaaaagaggaagtcaatgccttaatagcagaataccatgcgaatgacgacctcaatagaaaagtttttgatcgaaactttctccttacttgcctaaataaattgtttgtgagatctcggttcttacagttagctgctaattattgtgagtttaaagcctattttatttgtaaattagaaatatggaaataaattagggtgattgcaatgcctaatttattgttttaacttttcacattcatcttttcacctcttcttaacttggataacagaatgtaagtttattttatcttttcttctatttattttattttaaaccaaaacagaattaattggtaagtatcttttccattataactagttaaaattctatgtcatgcacggataaaccttattctatttaatattatgaatagttttattataatataatatagggataatacagtctaacctctataaattaatattctataaattaataatctctataaattaatgaatgttttcggtgccgagttgggaccaatgtaaaaagtgacataaatcgataaattaataagataataattgttttgaaaatcctatgtaaatatatggttccataatatcataaattaataattgtataaatgtatcaactatatatatatatattatatgtaagaaattctttaaaatatatttataatatttttttgcctaaaattcattttttttttgtttgactacagttctcatattttactgtatcaaaattgttggtgttgttttctagacattattactaatgttttaattgtaagggagatttgcaaaactaccctttttttaactacccttttgcaacaatatccttttatgttgtccatttttaaaaataccccttcccttgaacaaaatgaccaaattaacctcatttaatagaaacatgtaattgaaaactgaactttttccgccaattttttggcgccaaaattttttttcccgccaaaaaaaacattttccgccaaatttttcctcaagaaaaaaaaagattttaaaaatccttgtaaatattttttggcggcaaatagatttacaagggattttaaaagggttttaaaagatttacaagagattttaaaagagttttaaaagatttacaagagattttaaaagggttttaaaaaatttacaagtaattttaaaaggttttaaaatcccttgtaaatctttcaaaacacttttaaccctttaaaaagctttacaaatcttttgtaaatcttttaaagccctttaaaatcccttgtaaatattgtaaaacccttttaaaatcccttctaaatattttaaaatcctttaaaaacaattttaaactctttaaaaatctttaaatgacctttgtaaatcttttaaatctctttaaaattccttgtaaatcttttaaaaaccttttaaaatcctttgtaaatcacccttttaaaatcccttgtaaatcttataaaacccctttaaaatctcttgtaaatattttaaaactcttttaaaatcccttgtaaatctatttcccttcaaaaaaacaaattggcgggaaaaatatttttgaaaacaaaatttggcgggaatttttttttcgaaattttttggcgggaaagttttggccggaaattttttttgaaatactttaggcgacaaaatattaatattttattttgttaacttaaaacaatttctaaataagggtaaaatggtcattaaaaatttaaagagggtagaaataaaaatggataaaacaaaagggtagaattgaaaaggggcatcatgaaaacggcagtagaaagaatttttctaattgtaactggttcaagaaagatattttctataatgaaagaaatcttataatttttttaaaaaagttacctaattaagaaaatctctctataaattaataaatattaatttattgataaattaatacctctttaaattaataaaattttgcaatcccaacattattaatttatagaggttttactgtatatgcttctataaatttgttatgaattattattgcctgaagaaactacatagtacttatgtttggctttataataggttttaaacacaactcgaaaatcaaatgggactatcttcgaggtctgtggatcaaactggtctaattattggtcaacgactttttagttttttattacaacttacataaatatatttacatatatatatatatatatatatatataatacatctaattctttataaataagttatatatatatataattctacgtaaaatgtaaatatatcgtatattaaaaagcattccaaaaataatttatttttgttgccaaatccaagaaataaagttagttttcttataagaaattagaaacgatgatttgttctaaacagaacgggttttaaaacaataaaaaaaaattatctttcaacctggagaggttaaaagttaaaacaaaattttctaggtacattaaacatttaaaattcaacataattatatataaataaataaatatgctttaatctataataagcttacaattttaatttcaaataatttaatgatttatattatacaaataaagttgcaattagtcatttacaaaattaagcatatatatttgcagtttcaatttaaaaacttataatatatgagaattggttagtgatgaaatgtgataacacgtcatttcacccgttttacctattgtttttttttatgttttagggagaatttggtgccattttagagctaaggagatgataaacaagtattttgggagtcaagaaagttttaagagttttagagtaaaaaagacgaaaagacgaacaattcttgtttcaagacaatttatgtacttcagaattttgtcatttgttggagacctccacgtgcatcaaatttacatatcagtgtttatggaaatttagtagagtcaagatttacttctatttggaacgaataaatctataaaggtgttcggaataatacgacccggagaatgaagacatatgcgagactggctgtagtgcgaagcaaccgttctggagcctcaaggtcagctcggttatgaaggcccgtacccgggcagtccctcacacttcccacatgtcacttgaccttgccacaagtccagaactcggccaatcacttacccaatcaacgaaattgacgtttttacccctaaactgactccttggtgtgctttcttcttgtcttcatcacaagcgaacctagctgctgccgtgagcctcccagctgccgccacacctctccaagcctggaaagacaccaaatctctatttttctcttgttttgtctaaaatctactaaggtgaagtcttaccttttatattttacattcaaagaagtaatctctaaactctatttaagtcttattcatctctttcttatggtattatcaaagcaacctttgatgagttacttaaccatgctagagtaatcctctacttgggtttagagggctaatcaaagggggatcgatgatcgtttgtctctaatgcagattagagaaatcgccatagagaaaatatatggttcttcatgcttgacaaataatagtatagtagtatcagggtcggcttagagaaaagtggaatcctgtagccattttaaaaaatatatttatctcgtatactatatatactatatgtatagatttgggcattttcgtataatttcttataccctagtttcttaaagaaatctgactaaaaaatactggactatgtgcaaaaacaccctttgcacaccctctcagccggccgtaagtatgttgtattagatttctactattttttagtgtttaatcctcgaaaaataattttggatctattatattttattttttcatttttaatgggctttttgtatcagaattctgtttaaaacaaatggacttatgatccgcagacttctgctccaccaatttggactaggcctataactgtagcaaaattaatgttatagtatcatcccaccccaaggtttgattgaagctgatagaatttcaaaacaacggaaatattgattgactttgtcaaattttgaataaaatgatacgtcaaacagaagaaatgtaaatttgagaaggctgaaccacccacagatttaggatagcggtaagaaatcaaaaactttgaaagcaattaaacatgtaaagaaataaatatattttaaaatactgtagaatcctagttacgtaggtataacaacattaaataaatgaggtttcatcaaaggtgcaataatctcagattatctcaataatttttgtaattatcgtcaaagctaaatatgttgtatatatatgcatatttttaatagatttattacttcattaaacagctcaccataagagggaaatagtacttgagcaaaaataaaaaataagagagaaagagtatgtaacatatggtaaagcctctactagacagaaataaaaatatataatagtaacaaattataattaacgttacaaattacatattgaaccaataagcagaatcaagaagatcagcccacaggaacaagtccgtgggtttttaagtttcaaattatgagggcatggacttttctatcagcatgtcatatctctacactatatataccatatacgtattgattctcttttcttacacataacaaaaccaaaagaaaaaaaaattcatattgaatagtaccctgaagattttatatatagagagtagaaaggatcaactgaaatggggcgttgggtgagacctgaggttaggaaaattttatttttatgaagaattgcaaactttctatgataaaacagttatcataactaaggtgagaaataaataaattaattttatcttagtttagttttaacagaagattaaatgaatcagttatggatttgccatttttctggatagcatttgtggattttgccattttttgaatagtttatggattttgtcttttttcaaattacagaaatatgatttaacatgcgttttattcgttatgtttaggtttagtcggttttggttgttattagggtttaatatttatataaagtacatatttttaccaaaaaaatcctaaatacgtatattttaatgttaaacatgacatatttgtaagattatagtaaaaatgggaaattcaaaaaattttgatgaaaaatagcaaaatcaacaataatcccaaataaaatagttacaactgttttaatattatgaccgaattgttaaattagcatatttttctagaactagatgaatttgcttgtattacttttgtaaggttttcttttttgggacaaccgatcattgatgtgttatttcaaaagtgtgatgaataaaaaaaagagtataatcaaatatataagaatagtaaaataccgataccttaatttatgttaatataaattaaacgaaacaatttaggtgtaccctcttcttggagcaatgggatttgtgacatctatggttgtgtttcaactcacaagaaatgcattcttaaaccctgactgcaggttagtcttcatcaaatctattattttttcttaatatgtggtttagtaaaacttaggacatgtcatgaaagatgcttatttacattgtcaaaaatgggataacaatttttcttaaatattttcaaactttactaatatatgtcggttatatagttttccaaatataactaacttatgactaaattaactattttttttgtatttctatattttactaatgcttttttacatttaaaacatttgacagaataaataaagagcatagaaaaatgggaattctagaaaataaagacgaaggagaaaaatatgcacaacacaattttcgcaagtatctaaggacccgtcaacctcaagttatgccttcactcaaccgtttcttctctcaagaggacaactaaatcttattttattatgaattgttatcagatcctcgtttatatgtatctctcaataataataaaaagttgaatcctgtgtcccgagtctcaaaaacaccaaagtcttaagctcattacaaccatcgaccaaatacatagatgagaaacataaatcctaagataaataacaaaagaggcattacatctccattaaacccgttattaaagaaccaaaaaacctaataatccaattacttcttcttagatagtttcagcaatcacagaaaccacctccctcaaaacatctatcttctcccacaacaactcaagttccttagcctccaccaacttcatcttctcttcaatcttcttcttattctccttagggtatctccaactcatttctatttttgtctcaacactctatttttgcctctatttcactccaacacatctctattttttatcctctatttttcttctaacaaatagagatctctatttttgaataaccattggagtgaaaatagagatccctaattttttctctatatttagaagaaaaaatagaagcaaccattggagatggtcttagacaccttactccatttccacttcacaatacactcatccacatcgagactcgcaacaacccgaactaaaaacgacttctcaaaccaattcactacttccttatcttttttaaccaaaggttcaaagactccaccttcttctccttcccattagccttaactacaacagattcaacaacaccaataccatcaagtccccaaatagacttagctaataccatcaagtccccaaatagacttagccaataccaaacatttcttatcatgaattcatgatccagttctacacctttcttcttccttataccaaaatacttcttcttcaaacctctaatcttatcaccgaatttggattttactaacatcaaagcttatatatttcttagcgatatcgaaaaaaccattcatatcatcataagcacttgtacttgtctcagattttgaaatcaatcataccttgtaatagagagatctcatcttcttcagtccatgatctctgaaaatagggctttttgttatcctttgaggtagttccttcactagctcgcttcgtccctgatttcatcgctggtgaatcagtagcttctttcttcttatgcttgaggatgattggcttgtctaagttagatccagaatcgagagctggagcagcggcggaagtagaagttagggttttagtggagggaattatggagggatctttgggtttcttttcagaagaagaagaagaagaattgtagatcccgccacaattccgtcaactaaaaccctaacttctcatgaaatctcttcgtcgtcttcgtcatcgatttcgttaatttggttaggttatatgtctaaaatccatacaaaaacttggttttgttttaaaaaaaatggaaatttgcaaatataacaaaaaaatattaataatttggaaactataacttcaaaaactagaagatgatattgtgtgtattatatgtaataaatacaattctactatttctctcttcctttttcttttcctccactaccaccacaaccaccactacttttaaagccactatcaccggaaaatcgtatccggagccactatcgtcggaaaattgtcaccaaagctatcatcaccattgtactattctattctactgctattgtactattaagtattaattatgattgaaaagtttaataattaaaaaaatttggatttaagatgtaaaataatcttaatatagaagacacagagatgatttcattttttcaaatttctgaaaactgaaacttgaaattattttattttgtttaatgagttttgtttgggttccatgtatagtatcttagggtttagtttttttagatcaacatgtgtttgttataattagaatggattgagatataagaattattttttctggaaaaaattcttggattgaaaactgaaacttgagatgataacatttcgtttaatgatttttgtttgggttccacgtatagtatcttagggtttagttatcttagatcaataggtgtttgtaattaaaatgaattgggataaagaattattttttctggaaaaaataattggattgaggagaagacaagaaccgggaagaaggtgaaggaaggagtgtgttgtattttcacacctcatatgtgctcctcaatgaattatgcatattatagtgttagatatttaataactttatgtagattggctattcaccaaattcaccctttaaaaaacaaatcattctatgttggttagaaaataataataataataaatgagtcggttcaataaaacaaaccaaaaaccaaacctacttcaataagttgttgatcctattactacaagaaaaaaccatttttcctactaccaaaatcgtaagaattttgtaggaaatagatttttcctacgaaaaatgtttgtagggaatgttccgtaaaaaatcgaaattgataagattttcttaagaaaagtcgtaagtaattttgtaagaaaatggaaaaaacttttgaccattttctaccagaattttcgaaggaaataggtttctaccatttttctacaatcaatcagaaactttaccagtttcctacgactttcctaagaacttaatacattaatcaaattaattaatttgttttcaataattatattaattttgaatattaaaattgaaacagttaaaaatcattattattaatctaaatcatatatataatcaaattattaaaaaaacaaataatttgaatgtctaaaattaaaataagacaaaaaaaatctattgtctaaaatcataaccctaatctaaagaacaaatcgaataaacacagaaacaatgtccgtccgttcattctctcatgcctttatattttcatgagcttcatcaccttaagattacaagctcgagttatactattgcaagagtttatacatatcaacaacaagtctctcttctcactctttttcaagagtttcatttgcagccttgaaaatgaaagaaaacaagttactcttaatagaactagtgtttcatgacaattgaaaaagaaaacaagttattctaaaatcttaactcataccaaactagacctatcacctatggattaataagagcaatcaaacggataaagtaacaagagaagctaatctattacctgcaacagatgatattgatcacatgagcaggtttaagggcctttggtccatttcttatccttgtgtttagaaatctgcatgatagaaagaattttaatcttatatcctagaacccaaacttagaaatatttagatgagataatgatttagcccttcccaagcagccaattttattattaaattagaggaatatggacaaagatgtaagtatgtaacacacattcatacgaccaaaaacatcttaatatctgaatagattataacaccaaaagacaatctcaatcacgatcatctttttttttcgagaagtcaaactatcataattaacatctttgattccatatccataacatagaatctataaaccaacgatgtgaagttatcatggtgagaatcttagtccctaaatccagattttgaaacttatagatccaaatcgtggtgggaatgttttgtaatttttcccatgacatttttacgaatttcgtacaacttttcctacgacgatatattttgtaagattttcataggaaattccctacaaacttttgacgaatattttcgtaggaaattttgcttcgaattttctacgaaatgtatatttcgtagcaatatcgttaaaatttagtagaaaatttctcctaccaaaactttgatagaaaattaggtaaaaaaaaactatattttcttgtagctgaagcctgaaattaataaccaagttagatgggatataattgaattaagttccgctaattctatctcattttaatttgcttcgcttctatttaaagaaataaagaaggaaaaaaaaataaatatatatatatatatacatatttatctattaaagtaaagtacgatttattctctaaaatctttttaatttatgccatattaaaaaatttgaacgtgtattaatatttgtctttaaattttataaaaatatttttgaattatataaccttagtaaacaattataataaattccaaataagtaaaaatattttaaaagaaaatggttggatcactatagcttttgtatacaaactctcatctttatcaataaacttaaaattcaaccacaaacaaaacgttgacttgttttttatttatttaaaatcttttatgtcaaatttttaagtcggaaaataaatatattatgtaggtgattggttcgtctgtagctatagatatatcgttgtaaaatttttgatataggtctgtagatcttattgctgtaaaaattaagatgtagattttattaataaaatattattacctaaataaattgattgttgaataagattttggtagtatgttttcttaagcaaaacaaaaaagaaatattattggtaaattgttcttatgtgttatataatattattcacaagtatcaatttaatatatatatatatatattaaaaaataatgtgagttgcatatatgtcataagtaaatgtttacctactatttctgtccataaactatatatatatatatatatatatatatatatatatatatatatatatatatatataaactatagtaatatttgtaaagaaaataaaaaaataaagtgaaaggaaaaagagaaaaaatgtaccgaccttctaaagaccataaagttgtggtgtagaaaagcttgtacttacagccaaaataattaaaaaattattaattggaatgtgagagaaaatagaaaaactatattgtgattgtttcaattttggggcagtaactttttagtggctttataaatctcctatagctcaaccaatcatgctatgtatatcaataggttactttagagacgtatcttttagagaggatcaagctctaatccaaatcagatattaatttcagttttcttattttctggttaatgagatctaaaaattttgcttcgacgattattaaggatgatttagttttatgggcttgagcttcaatttctataattctattttttatatttatatattccagccttttgggctttataaatggaacttaaatatttaatgccatgagccatgaatatgtttcatgcctaaatatttcatgccataaatggaacctaaatctgttttgaaacaattatagaataatttcttgttaaaatatatacaataagaagccatgagccacatcatacaaataaatgtttattctatctcaaaggaaataagaaaacctaacttgggctataaggtttcccacctaaaaacttctatccacgtctgtgcaaaatctcacgaccttatctggaacggtgagtgagaaaggaagtattagtcctcatgaagctcgtagaaccgtttcccaagcaccatacttggagctgaaagtgcctccaccatgtctctctgcgtactcaaccattgtcgctctcacacaatcagtccacgtttgagctatttctttcagagaccctggttctgaaatttccctcatggacaaactgaaccttgatcttgttctcgcggatagatcctcatacttgtgtacactgaaacatgtgaatataaatccttaagatcatatatgtttagtccaaccgttgttacttgatttctatgtaaagtttcatacctagtgtcaaaggagatttcatctagaaccatcggggaactatacggataatccaaaggaactagtaagcgtaaaggttgaatctgtgcctgcatcaaacattggagacatcaaaaagctgagcacagtgaggaaaaagaagaagtttggagagacttacgatttttccagacttgtaatgatctttgaatgtgacactgagagccacaggagcataagtacacgtgactattgttcctgaagtatcttcatcacatatctccaccactgtctctacaagtctcccatttgtttctttgatttcttgcaaaatggcatcaccaggctacaagattgaaaaaaagaatttatttcgatgtttcatttgctttcgtagttcgataaaacagagtagatcttaccgcaatattgttaactttcaagccagatgatgctgtggaatcaacttcagattcaaggctactgaactgttcataactatcaatatgtgatgacatatctcgcgacacaatgctgaatgatcgcttcattctcttagacggatttgtttcttcgtgtgtcgtaaagtttcttgtcctctcactcaaatcctcgcctaaaccatctctcgatcctccactagggtggaacgatcctgcagtcctgtctaccatactgatcaccgagctaatctcacttacagattctgccaatgattttggtgatgctgcttgaaactagaaagtacagacattaaacattaggtcagtaaataggagaaggtaatgaaagtaaacttggataagctatagagtttatgatttctttacttaccgcttttataagtcgatcaataggccgctcggtgattggctcgggcggaggaacagataacagaggagtttcttgtgtgcccagtttactagaagaatctaaagttgagtttatttcaacaccagaaactggagactcaacagatataggcatttcagaatctccaggaactggagatggagctggagcaacaaaaggcgagccactagacttcaatggggtgccggttttgttaaccgtcgcaggaagaatctgctggtcaactaactgaggagaagagtggttctgtatctgaggggatgaaactttagacacttgctttggaacctggagctgactcgatgagactagtttctcaagcaacctctgcctaatcctcacatcattcatctcatttgtctggtttgatctctgcatttgatgctgatgattcccttgttgtggttgttgttgttgcatttgtcggtgacggaatcgcttctgctgctgcaacgactgaaccggactgatatttgtgtttacggcctgaggattctgtttagcagaaggtaacatgacatttcctgaggaagccataatgttgttctcatctcttggttccaacctaggccttgtctgcaacgaagacgaggcctcattttggcaacttggcatcaaccgtgatctcatttgctccttatcaagagactgtgacacatggacttgaggactttgggattgcattgctgtttgagaaggaggaaattgtccttgttgttgctgcgttgacctctgaaccatggtctgactcttggtaaatttcaatatgtggtgctcatatagactaaacttgtctctatgtttctctgatacattgctcctttgaacacttaagaaaaacataaggtgttccattgacaattttcccgcctttagcttttcaatcgactgagcttgcatcggttgcggcggaagagattcagtctgtaaacattaggtttattaaaccaaaaacaacacaaaattgaaaaacaaatgcttaagaaaaccattagaacaaatccttgttccagaagcaaaaaaattaggttataaaatgaagtacctgccgcaatttttccgcaattcttttgtgcattaaactcagaacaggaaaatgcatctctttcagttttataatctgcaggaaacaggaaaatgttgagatgtttgaaaacaaaatcaaaacctaattgtgatgttaagaagcgaagagcaaggcaagtgaagataccttctgataggtctcctcctgccagtccccgggattggcatttaccgtctttcccgtagaatcttgagaagctacaaagatattcattattagaactaaaaacaatatcacatctacaagttagtaagagaggaaacatactagatggatttgctctctgtaattgttgtggctgattctgttgatctgttatgttttgtgtttggcgcaacgaatatgctgcttgaaacagattggtattgtttctgttctgaggctgctgctgctgcatgggatattgctggcggtattgttgtgacatcattggttgagattgttgacctctagtcatactttggaggttattcttctgttgagccattgcatgtaagccaacagtattgttctgctgagacgatgatacccgaaaagctccttgttggtctctgttgttaggtcgtgatgttggaacattcatcagttgattaatgacttgctcttgttcttgtctttgggacggcagaaccatctgtttttgatgactagaactgacccgttgtgtcggaaactgatttcttggcagtgattgagagttttgttggcttgaacttgattgtggaaaggactgttgaataggttgtttcaacagactttgcggatgatgctgcggctgcggtggctgagcttgttgctgcatgtgcgaaggtcgtagattcccatggcggatttgattcatttgaggctgttgaggctgttgctgctgaggaagaagctgttgcctaccatgtacctgacttggcaaagaagatgacacaggaatgttgagatttctctgtgtattttgctgtatccattgttggtttgttgtagtctgcgtatatggcaacgaggtgggaagagattgagcttgattcataactacttgagaagctgatgtttagtttagataaagacatcgaaaaaaaaaagttagtaagtaatttgtttgttattaagctaaaatagtgtaattttgaaaccaaaaacttattacctggaactcgagtgtaagttctcagtatataatgcagcttttcactgagtttccgaaggtaatcattctgagacatagcaaggagacaatgagtaagatatcaaattcagattctgaagttaatagatggagaaagaatttgtattttagcaccttatcggttgctatgtcaaaaaacttctcttcaaatttggaagcaatgtcgttaatcttgtattcttcatctgtaggaaacttttccttgaacttttcaactctacacatagatgagaacaaaaatatcagtgacagtttgaataataatcggctaaacaaaataatactatgaagaatttggatacaactgatactctagaggaagttaatgttctgtctgacaggttcctcaaaacttttaatctcttctattttatcccacaagactcgctagttaaaaaattattagtaatggaagatatgtttcattgtttctgaaatacatgacgcgtaataaatcagagctatcaaagacgatggcaacagtaaaccagagctacacttttttacaagtcccttttcacctagagctacaaaacaagtccttgagtcgctttttacaagtccctttcgcttatatacacatgaaaccatacaacaaggcgctacgtttagcgaacaaatactgaaacaaatgtacatatgtgccaaatattaccaatagaagcgagagtaaaacaagattcttctagtgaggaagagcataaatgcagctaatgaggttaaaagaatatgcaaaacttaaagtacaaaaggttgaagttaggttttgtcaactataataaacatttatgcacaactcttatgctttaactgttgcaatctttatcatgtggaagctacaaggatcacatcgaaagcatgaccaagaaaacctcctatctctctttcatgaatgtcaataatcaaataagaacaatgagtccaacaaaagaaacatgaaagaatggcttacatttttgaaagaaccttttgccgtaattcaggctcaagttgtgatctccaatcaatacaattattcgcagcagcgcggtctccgccttgttcattaggcttccagttagtatttccctccattagatgtatgggctttgaccaagaaccgccttcgataaaccttaacaaacaaacaaaagaatgattagagaaatcactcaagagggtaacacaaaacagataaatatatagtacaagaaaacgacaaaagagtattcaaaaatcatagatataatctatatagatccatcactcaaactaattacattagagttgttaatactgcaattaactagtaattataagccctcataatgccctaacaaaaacaaagtggcagtttggttctgtaaacgatattaaacctaagtttcacaaaaccaaagtaatatacaactgaaacatatgtcttgatacgatgtttgtgtaagaaaaccctaaaaccatcaatatctaagaagattatagaccaaaatcgaaacagagatcatattaaacgaaaagacgatcacacatcgcacacaaccaaaagccagaatccgaaaccccaaataatttcgacagagatatgctagaaactcacagatcgcagaaggaggatcgagaaattgaggaatcgagaattggaggaatcagaggagaagaagagaaacctagacgcaaaaaaggaaaaagagcggacaaattgaagaagactacacgtaggaagacttatatatggtgtcaatcgggcctcaagtccgcgggcctggtccgtttagggatgtggcggggcgggtacgggcccatgtaaggaagcccaaaataatgcgggcgttgcggtcctggtccgtttggtttgcggaggataaaaggctgactcatttttcgccgacgaggagctttagtcaagtactgaatctgatggaccagttcatggagatcctctgttatcagctactcgtggcattggagcttcaggagctcgtcgtggttgggatataaaagttgtatgggaatgtgttgagattgaactctccgattgatccggcaaagaagaagaagaacatcagtgagaaggaaacaacaatgatgaagaacaagaagattggaaactagaagaagaagacgacgtaagagagagacgtgagaagaagaagaaaattcaacaagtgaagtgggtttttaggttttatcttattgggctgatgaagttgtttaggcccaaagtggtgaagtatgttttgttgtgacccattcgtagaagtagcttattctagctaagtacttgaggtagagtagttggggttgttagtggctaaggtaaggttgtgtaaggttgcttgtatccctaagtctaatgtctagaagtaaggttaaatagtgactaagtttaaggtctaagagagtgggtatggtgagtagaagaaatctcctatatgtatgtgtaatgtgtgtaaacttatggatgtgtgaaagtatgaaagtttaagagagaaacaaaacaaaattgtgacctaaggagaaaaacaacagaatggcaaggtacgaacatggaaaagttctttattctctttgactcgtcgatttacatccaaaagttgtttactcatccatgattcagtcgaaggttcactaaattgaagaaacagcaagagacgcagaagaaagatagaaaaagtataggctgaagcacatgcttgcaagaaagttacaacagaagaattgccggttagaagcttataaccttttggtaattgagtcaaatagacattgttttaagattgatctttctctggttttgttacagagacaaattcttagtacatgtacagaagaacaatatagaagcttgttatgattcttcacgtaatgtttgaagatccaaggaatgtaagaaatcttttttttagaggtgctcaattcggtttttggttcagctttagttttagttcaaaagatttagtttatgtttcagtattagtttggatttggtttatgtttcagattttcagttttggatttatttttcagtttcagttctctttttgttttagttcatctctttttgttgatgtgttctcttttgctagaagtaatatcggaatactgtgtaaagattttatttaaaccattttaaaaacaatgaatgtcattctaaagtcctttcggagtttagtaataaaagacgtttcaagtaaacataagtagaaactctcttgagacaatcatgtcaacatctctaaactaatggtcaggatcatctttgtctaaagaagaagataagaagcttagagatgaaaccatctaagtctccttcaagaaccgagtcaggatcagagacctcgtagtttgttctcagatccttcaccattctgtattgctacaaaagcaaagaataattactcagatcattgtcatgtaaaccaaattgcaacggaaaatgtgtggattcggtatctacatacatggagaacataagttcgtatctggtttccccagctgatctctgttagtgatcgtgtatgttgagcgttcactgatgtctgacgtgccatctctagttggtctaaccatgattgaagtaccgccattgctgaagccttgttcatatgcgtatttaccgttcactttgattgtagcacgctgttcaagacattggatcaatcgttagccaatggttcaatattatagatttgaccaattgcactaaacagaacatgagattttagcagtgaataatggataaactacacattttgatcaatatgtgagcctatcagccaacgcttatggatgtcattttgataattttttgtttagtctagtgcagaggagcattgaaattagcctaacttgtttacaatgggaagaaactcatttcaatggtggaagcgtgtaacaatgggaagcttgtaagttcaatttatttgtaaccttctcttgatgacaacaaatagtatagatcatgtaaactcagtattgtacgttcagtttatctatgtaacgtatacaatagccaaagtatatgcctatatatctaaatcatgaatagtgtactgcatatgtagctaaagcaatggcaaatgataattcttgtactttgaaccaggcatcaagatctcactacccagtagacgaagacgcagcagcagctattcaccaatgtacattctcttcttcttcaagaagagaataatataaatcattcatccaaattcagttatgctaatacggtatcagagcatttcttctaatatttactttaattctagttcaatcttccatctattagctcattttcacttattcgagttctgactcatatcgtacaaaaaccattgcatataccgaatagctaatgtccacaagtaagagcatttcaatggaaacacataccagatcaagttcagcatcatcagccattcgaacggcttcgtctttagacactaaaccaagctatagagagcaaaacaaactggaaatttatgagtcctattgtgcagaatcaaagctacacttccaagaatttgagtcacatttaccatgttttgttggccatcgataagcctaacagtagctgacctactcaaacatagacatcatcatcaccaaatcgaatcagctcctttctttcgtgtaccaaatggagggttcattacaacagtatcaacaattgtacctaaaaaaattcatagagccacaaaaaagttacgagtaggattgtaccaaaaatgaaaggaggatagtaccttttaactctagctttgtactgtcacactgaacgaaatctatctgcacctacaaaacaaaccaattatagcaatggtgtttgctatacaaccaaaagaaaactcatttcatttcaaaaaaaacctcaagttcctctgcatttagtgttgctgtttcaagagattcagggtcgatatcgaatccaataacagacatgttctgaagcaataaagagattaaataaccacagagtaagcagccaaggccaagagcaagcaggagtagaatgaatagaagagtgaggtaaatagtcgttactaaatgaaagagtcttgaagataggtacctggcatgtatcttataacacttgagctggaatttgtgtctctgtttcaccaaaaacattagagaaacagcacaccataagaacatcaagatgacactaccatattgaacttatacaaacagaaccacaaaaacttaatcaatcaaagaacaataaaaaagaggaaattagaagaagagaaagcttacagattaatggacaaaggtgtggaggagctatgattaatggtgtaaagacgctctgtaatgtaaaccaagatagataacacaaagaaacttgtttagtctaagaatgcccaagaatctatgtcttcttactccgttgagaactctcgagttctagccgcaataagggtttttagagtttaaaagctctttgattaaattaataatgttgtgtccttacaaagcttaggctatcaactatatataataaaacatcaaacctaatctttcaaggaattggaaactaaataaaggaaaaatactaaactctagataatgttaaacttctagaaaaaaagaatagaaaactattaagaagaggaaatatgccctgcatcactctgcctcctcagcttgctcaatgatggcgtcgatgtcactgacctcggtcacagattcgagaactttcttctgaagattcttgtagtacttgcctttatcttccgattcttgtatcatagggttaatgaaatattaatgacaacaatcgatgggtaaatgacgcttatacccttaattgtttttttgttcctggaccacgaaaaacgaaaacggctcaaatggttcatatatttcattctctgttaatagtatagatttattattaatttcaaattatgataactcttacataaataatatcttctgatctttattagatctacgacatatgatatttcttttttctattttggaaactttcaacgatctacgacctacgacatttctctttatacgtataatcacaatgaagggttctaattatagatcgatggagatttcttgtacgtttgtctccattaatctgtaatattaaaaatcattgaagaacgattttgttagtcgttgctcattgagtggagaaaaaaaaatcatttcgatgttggtgaaaaacggtgagtatttagatctacatttttttttgaaaaattgtaagtaaaggagttttagttttaaaacctatttttattatatgaattacttttagtcattcaaaacgagattaaaacatatataaaaattatactttaacaaatgtctgttttccaaactttttgtgtttttcaatttttttttgtaaataaatgttttcttattttaaaaaatattattactaagatatagatttgatatgaatatacatattttttttatataaaaaattagtacttatccattaatatgaaatgggtagaatcaaagtccaatatattatgataaaataaacagttataatatattgcaaaataacatatataagattaaaatttgttttaaaaaaaatatactaaattaaaattaaaaaatgtggaggttactgtatagaattaaaatatcaacaatttagatattaatttggtttaagataatatgactaagttaaatattaaaaaggtatgaattactatttagaattcaaatattattaataaatatttatatttatttgttacatccttctatttaggcaggctttatccaataaatataataatattaactttagttatatgttgtgaatcatgtgggtggagataatctttgtcacatatagtatcttaatcttgtttctcaatttagtttgcgtttgaacaaagttccaaagagaatgatgagaacacaatttcgatagggttttgtgggctttaaacaaagttctcaattttgtatgctctatatatgtttgcaaatgtttcacaggaattggatactactttgtattagcttactaggattggatctgcgctacaacgggggagaatgtttttgtttccgaatttatttgacgtttacggaacgtgtttttatagtattaaaaggatacgtatttggaaatttctgaaaaaaatatatttggacatatatatatatatacatttttggtagggtttttggccaaaaatctcttacctttttattattgtcaatattagtccttacagatttaaactcaaccaaatattatatgtctaaatacttacaaattgttagttttcattaaatacttcaattaactctttcctaaacttttatccttaattaaatcttttttttgaactatattcgattaaggctaattttctaaaatttctatatcgacattagatataaatatattattttatgttactatatttgttcttatatctaatttattttgaatttatttataaaatacatatagttaataaaatatttaatttttctgcatatgatgcaattcaaattttaaaaaacagacatataatactcaatctatggaaaaaaataagtgtacaatatttcacattgcttaaaattaggaattcgtttagagtcatactataaaaaagactaaaatatttttgaatatgaatgagcaggaaccttgatatatcagacatccaaaattaaaagtgttattcggtttactccggttctttattttaaataactaaaaacttaaaaagtttaaaatattatatatatttaaactttattaaaatttaagtattaaaatttttaagaccataaaaacttttaagtattaataattttaattttttttgaagttttaaattttgtaaatatttaaactttattagaagtttaaacatataaatattaaaaaaatataaatacgggcaatatactacgggtgaaatcttagatgtaacaatcaatatgcaattatgaaatttggatcgaattaaaacttttttgaagtttctaatattataaatattcaaacttcataaaaatgacaaaattatgactaatttcatggaactaggttatatggtgggacgggtttgaattgatattaatacgggatggtatactatgaatgaaatcctaaaattaacaatcaaaatacaattatacaattttaaacactaaaaaaaaatattaaccaaacaaatatataacttaaaatttcaaaaaacaaattagttaataaaatcgtcctaaggtgtatcatagtatcatacataaaaaaatagcatgtacctgtagatcatcttaaaaacaagaattcaattttttatttaataaaaatataggcttatgatgtaccccttgaatatgttatttacatataaataatattaaataaaagaaaaatctctaattttcgaacaaaaatattaacatgcggtataccgcgggtcaacctctagataatacaagttttaaatctttattacctcttaaaaactcgaaccacaaaaaaaaaaggagatttacaaaactaccctttttttactacccttttgcaacaatacccttttatattgttcatttttaaaaatttctcttcccttgaacagaatgaccaaattaccctcatctaataagaacatgtaattagaaactaaaagttttctgccaaattttttttcgcgccaaaaaaatatttccgccaaactttttttcccgccaaaaaataattttcccgctaaaattttttctcgtaaattttttttcccagccaaaaaaatgcttttaaaaatccttgtaaatttttttaaaactcttttaaaaaaccttgtaaatcattttaaaacctcttaaaatctttataaagtctttaaaaacataggtaaatactttaaaacccctttttaaacctttgtaaatcattttaaaactttttacaatagttttataagaattacaatcgttttttaagcataagtaagtagcattgaatgattacaaggaattttaaaagcttataaaagggtaaaacattatttacaatcgtttttaaagcataagtaagtggcatagaatgatttacaaggatttttaaaaagggttagcatggtttacaatgtttttttaagtataagtaagtggtattggaatgatttacaagggattttaaaagcttataaaagggtaaaacatgatttacgatcgtttttaaagcataagtaagtggcatagaatgatttacaagggattttaaaagtgtttgtatggtttacaatcgttttaaagcataaagaagtggcattgaatgatttacaagggattttaaaagaggttaacatgatttacaatcgtttttaaagcataagtaagtgtcaaaaaataatttacaagggattttaaaaaaggtttgcatggtttacaatcgtttttaaaagataagtaagtggtatagaatgatttacaaggattgtaaaagctt

SEQ ID NO: 74 - DNA, 84157 bp, Arabidopsis thaliana
gatcttgatcaaaaaattcaacggctaagatgaactcctctttttctcatgaggtattaattgatttacgatatgaaatgactaatcaatgcaacggttagatcctcttcaaaaaaattcaatggctaagatgaactcatctttttctcatgaggtgaccattgatagaagacataaaatgactaaacagtgcaacggttagattttggtcaaaaaagtttaacggttaaaatcaatttatcttttcctgataagatgaatatcacaattccatgctcttctatataatgcgcaatatgtttagaactaaaaggaatatcactatcttcttctatttcttctcataaaagatgagttttaactaaggtagttcatcttcttcttcatcttcttcatcttcttcttcttcatcttcttcatcttcttcatcttcttcatcttcatcttcttcttcttcaacttcttcttcttcatcttcttcttcattttcttcttattttgtcgtgccattgttgaggtatttgcatgtcgttatcttcgatcacctgacgctaatgatgttgcacgcctactctacattagcgaatcccgaggatttccaggtatgttgggtagattagattgtatgcattggaaatggaaaaactgcccaacaacttggagaggacaaaatgctggtcgtagtaaatctcctactattattctagaggctgtagctgattatgatatgtggatttggcatgcatattttgggttaccaggatctaataatgatattaatgtgttagaggcatatcatctttttgctaatctagctgaagatactgctccacccgctagttatgttagcaatggaaaaccctataatatgggttattacctagctgatggtatatattcaaaatggtccactcttgttcaaacaattcatgatccacgtggtcccaaaaagaaattatttgccatgaaactagaaacttgtagaaaagatgtggaacctgctttcgaagttttgcactcgaggtttgcaatcgtggcagagccatcacgattatggaataaaatgacatcttgtatcataatgcataatatgatcatcgaagatgagcgtgatattgatgcaccaattgaagaacaagttaaagttccaattgaagaagttgagatgacgggtgatgatgatgcttgatttcaagaatttttggcttggcacagacaaattaaagaccgagaagctcatattgaacttagaaatgctttaattgaacatttgtgctcacaatatactaattctgagaattagtacgatgtaatttatgtttattatgtttggtttatcgattgtaatattatattaattaatgaagaaaaatttgtttaatataataatatgttgtgtttttttattttgtattaaatttgttcaatataataatttgttgtctaacatttgttttcaatattttttttttttttttaagtatcaatattttaggttaataatataataatagagaatagtatttttagtgtgatatttggtgttgtggttggagatgaaaaaacatttagtgtgaaaattacattaaatatagtgtcatttcaccaccattttagtgttgtggttggagaaaaaatgtgtaagcctgccataaaaaatctgtaagtctacggatcaagaaaaaatgtgctataattaaacgatagacttttgtaaaatcacaatatttttaaagggtatttttgtatttattatattttacagaaatgagaaaatagtattttaaaaaagaaaataaccaatttaaacccaacttttataagacattttagtaattaatctcattatttgagttaatcaagacatatcgttattagtaagtatcatttccatagtttccttgtttactttgtgtattgaaccatgagtgcacactcttaacttggattttccattctcttttgaaaggcttgatttcggaaagcctagagatgggtaactgtgcggccattttatgatgtggaaggggaagagtaattttgctcgatttttgaaggtgagtgtatgattctaggaattattggacatatatttatagtaaatcaatttcgtgaagcaataagttaggttttgcgaatattttcagttcattaggatatgacctaataatctttgataaggtatatattctttctgcaaaaggatcaaaataattaattgtattagttttagtaagtcatcatattatcgaatgataattagtttagaagaagattgctagtaataattgaataggatactctcatcctattattcttataaatgtttaaagtacgtgattcagttattataagtttggtatgaagatattcggatatcttaatagttttgagatttatttgttatctatactatttaaggaaaatataggttgtgtaatttcacttaatttcaaaattaaggtgattttcaagaattatgggataatgatcttttggaagttacgattttattgttgaaggccttatagaatatatgtgttaatatgatttcgaatataaattcttgccatttctttgtgttcacgcacacaatttatgggatagtaatattttcaaagttataattttattgttgattgccttatatcatatactagattctgacccgcacatacttgcaagatttcatattttaagaaatgtattggaatacatttttagtaaaagatattgtagtgtataaattataatgtgcataaaaaaagtgtatagtgttaattatgatacaatagctaaattttttattaatttatattatttatattttatttgtattttgcatagtaaatcgaatgttagatttgtttcgaattgcggaataatatagagatatttggaaaatctgtgtatttttgttagtttgatatatatatacaaattaattgttttgtttgaaatttgatcaaattagatgatataatgtaaaatttactccgcggtacaccgttggtcgatttttttttaactaaaaattcgaattttaagttttagttgttttgtaaatattgtttttttttttgtttagtgtttaagattgtataattgtgttaaaattattaattctaagatttaactcgtagattatcgtcccgtatgaatagcaatccaaactagttccaccagataattttattctgtaaaattaaatattatttttgtaatttttaaatattcttattgtaatatattaaaaaatcgagggattgacctgtggtagatcttggattaatatatttaaaaataattatgatattgtagtatataaaactgatttttagtgtatacctttcaataattgtataaagtatattttaaaagtcaaaatttgtataaattaatattgcaacctcatgaaatcgtagtgatttacctgtagggtaccacatgctaatttttattttatttttatataaactaataaatttgttgattttagttaaaaataaaaaaataaattaagttatatttgttttgtttattgtttcagattgtataactctattttgattgttaattccatgattttatctgtggtataatattgaccaacacccagctagtttcttgtaatctagtgttgaccctgaaagaaaaatccataagaatatgcataaatgaatagtaaaattaggagataaacatcattagaacatgaagtaatttacttatgaatctctatctatttttttaaagaatcaatattctagattgattgtgaggcaaaatgtgaatgtatgtataacatttataagagatagattgcacgcaaaattagattttaatttggattcaatcttagattgtctgaaaaaaactaatctgaattacatattttaaatttaggatgaaaaaaatattttttttttagaagctaaattttccaatgatctcaacgattttggtattttttaaattaaacttatctttatgcattattgtaaatatggtagtcattattgttcaaatacagttaatgatctgtcaaaaaaatcatattactgtttgttccaaagaaaagtcattcaaatttcaaagaaaaaataagaatattggtgtgaatcaatattttctcatttgaatatttgcattaaaaattttaaacattggtatttaaactttgttttactgtttaaaaaaaaagaaataatcgaatctagaagaatgaatattccaaaagcttgtaactattataatacgtttaaaaatatattttcttttatataattcaaatttagcttagtgatgtatttttaaaataatgaaaattacctgttttagaaaaatactttaagagtttatatcatttaaattctaattaaaatgttaaatattttaatatatactgaaactattttctagataattacaaatctaaaatccaaaatttctcttttgaatatgctaaatcataatttaaaatcatttttatgtgtactaatcgaaaacaattaacatagttttgttaagggaattgtataaaatctaaactaaatgataatttgttattaaattagattgaagtttccgaattatctaatattatattaccaaaataaataagtttacatatatataatttgaattaaaatagcctgatatgttatggaaatgtttttaaatgatttccgaaaatattgggtatttattaatttattgatttaattcgatcttgtttaaacaaaatccaagatatttatttagttgtagtagttgttaatttactaaattacccatgcaaaaattcatttagttagttttaaactaccattacaatgttgtagttcacacaatgcttcccaattaatagtatagatattgaaatatgattttgaatctaaatacttgctatttctttgcgtgcagattagtggtgatgttagtgggccatatagtcacgaaacccatatagcctcgtgcataaatcctttaaatatttgacctgataatagacccgacaatcgaataaggatccgggcatttttattattttaaatgacaagattacatatgaacgaatacttaatttagtcttagacattataaaactacccttcaaaggttgtaaagtttcccaatgattcccaattaataatataaatgtgtcaatatggatttgaatataaatttttgctattttttgtgtttactcacgcaaactatgggatagtgatatttttgaagttacgattttattgttgattgccttatatcatatatattaaatataatttcgaatctaaatacttgctatttctttacgtagagattagtggtcatgttagtgggccatatagtcacaaggcccatataacccagtgcataaaatcttttatatatttgaccagaaactaatttactcttggcttagttaattttatttgcgtcatttcgagatatgaataaggatcaaaggcaaaagtggttttatttgataagcaaaatgttttgggttatttgatttttgagatgataaatgtgaaaaatagtcacacatatgtaaacaatatccttcgggattggctcttttgagttataattaaaatcggttaacaaaaaaaaatgtgaagaaaatacaacaagtatttttcaaacttatttcacgaattataatagatacactacaaaaaaagttcattttaaatcacttatatcgaatatttgtattacttataattgatgtaaagaaattttacatcacttaaataaacgattcgtatcttgttgatgaaaataatttacatcgatttattaacaactgatgcaacttcacataatatttgcatcgcttgttataactgatgtttactttgagtcggttataaaaactgatgtgatatttacatcattttctataagtgatgatattatttacatcactttgtctaaacgatgttagtatttgtaacggttaaaaaaacctgatgtgatatttacataattttctataagtgatggtataatttacatcactttgcctaagcgatgttagtatttgtaacggttataataattgatatcaatatttatatcacttacaaataaatgatactaaaactagtgtcaattttcataactgattttaattgttgtatcatgtctggtaaacgatgttagtacatgaatcatttataataattgatttaaaacattacatcacttctacgaaattgatgttatatttatgtcaattttcaaaactgattttagttgtagcatcatttttagaaattgatgagaatattattttatataattgacaaaaacatgtattgaaataatttcacatcatttataaagtggagctaatgaaaataataactaacggcttttagtttttttttttaaatccaacaaaaattaattaatgaaaaacaaaaaagcaaacttaattaataattaaaaaaactgaaaacaaactacataatcaatccattgtgtgcaaattaaaagtaactaaaaagttttgctaaacaaactttgattatactaattaactagcattgccttcaactctagcttaaacgtttatccactagctagctagcaccaccatccctttcctgaaaaaaatcattcaatgtataagttaattatctaaatttttagtatatatgaaattaatatgtaaatactctttacctgaggattaggcagatttgaaatgtttacaaatgctggatttgggatgtttgcaaaagctgttgcaaaatttgcagcccacgcacttgcctgaatattttgtttaaacattagtatttgcctctatatatataaaattataataatgcaattgaacttacaaagtattattatattattacttgttcaccggttgaattaccaagtatttgtccaaggaacgtagacattgcattaacttgatcacctaatgtctttacttgtgtcttcagctgggcaactaattcagaattttctatatcttttcttctagttgcattggaatgtctcactaatcttgaaggtgtgggcccacgaccaacacaatgtactcggcctggacgctctggaccgaacacctgactatattcgtcatccaagctagcagtaccgttgtatgtgacttgcggatttagattcaataacgtcgtaagtgcttcctaaaacgagcaaagaaagataaatattctacatagttaactagtaaatccaacagagactttaataaaaccaatcgcgcgtaattttgcctcatctgatacgaaacttccatcatgtttcttgcgactctcaataaaaaactccactcgacatggcgttttcccagtcttgattttctacgttaaacaatatacaaattcaacagaataaactaggtttctatatatcataactaaataactcacaatctcgtctctttttcttgaaaaactcttccttccacataagtgaggcatgatatgatttttctggttctttgtattccgttcttgcattttctgaaagctcacatgttgaaaaagattaattgcatttgatatagaaactatactacatataaatatccaacaaataaactataccctccacttatcggtgaatctcaagtgaaccaaatgagaccattgatcttcaggaactttttcgggtcgattctccaacgtttcattcagattgttacgtttgtgttctctccaaaaacgtaatttaacatccttgcatctgctacctagtgcacccatcacataatctttcctcatcattggatcatcaaatctgaatttggactgcaatgaaaataataataaaaaaaagtctatttcaaactcttcggctatttataaaatcattagtaatgtttagcaaacgttatccactaagattcgaagtcaatgaggtagaataaaaaattgagtcaaaaatctatagacagatattcttcaacgttctataaaaatctatagtcaaaaattgagtcaaggaggtagaataaaatctgtaaaaaaaagagtcaaaaatcaaaaatcatcaacgtccttcgcactatgtactgaaatttatatattataattataaattacgttttgaaaaaaacttgcaaattaaccgagtcatcatacctaactataatcttaaaacatcccattgtacaaaaatctatagacaaatgttacctgaattactgcccatgctctgtcttttatgtgtggactaaccaacctccaatcagtgtagttgatgggtagcaacatgacatcattgcttaactgacctaaccatgatccaagtaaacctccagaatcaccaattggctgattggtatattcatcaaaatgcacaataactcggtggttttgcattatctagacatcttttgatgtcatcattttgccttctatgtttccatcaacatcttgttgataaaccacatatacatcaaacccccaaaatcgaattagtctataataaatcaaattaacagatatactaaagcaaataagttataaaggagtgaatatttgactttgaatatatcaaaaaccaacgcagattatagaattacctatcacttctattttccatttgaagcttttacattctggggcaagtggaggaggcatagtgtaatctgtttccagatttggtagatcatcaggttgttgtgtttctgagtcggtaaagtccatgatcctaatcaatgtaaaagaaaaaaggattagcaacaaataattccattacagagaaaggaatatgatccttgattttcagcttttatctatgattcctaagattcttttgtataagcctaattgacatgcaattgcagactacgtactatcattgtaagaaaataggacatccagtttaaaagattgactctttcaaattcaatgaatcttaaacaaagtgtttttaacgtgacaggttgcaattgtttccaagggaatctcttgcatataaaacaaagcaacaaatcttgactttctaatctcaaatcattacacggtgtgatggaaaactgcgcaaaaaattgtgattttctatgactcaaatgtacttaaactattagataaataacaaatctctttatagcaatatagaaacattcatctaacttggaaaaaatcggagaaagagtaaaaaacagaaggagaagatggaagataaattcatatgactttgaaaaaacaaataatagagaaccaaagagctcaaatatcaatcttctaatggaggtactaaatgataaagatattagtatgtttagatgatgagaatgcaaacagtctacacaaacaacataaatagaacacaaaactcactttgtgtctgctggttgaattctaaatcgtgacctgagagattggattacgctctgtgacggttcctcctcagagaatatttagaaaccctaaatcaaacaatttattagtggtctatatttataaggaaaatattattactaattacacttaaatttaattcccgctgggttaaaatttagcgggatctgaaaattttagtgatttattattttaaccaaatgcatatgtataaattaactttttaataagtttgtttagtctatgcggtaatctatactaaaaaaaattaagcccaccttttttggaacctccatcaaaaattcaaggaaatgttacacgtgcaataacttagataaaaatgtcaaggctcacaactctaaaacttagcaaaattaaaacaggaagttaactatttgactaagaaatttaaacaccaagaaagttctcataccaccgtatctatttcatccagcaaggatattaatcatgcagatgattaaacaagaaagccgaaagttaattaatggaggacatgcatctaccacgcaactaaacaaagtactacctttgcagatggtgatccatcaaccgtaacaccggaatcttcagaatttctctgtgctgcttttggagtactgtcattaaatgaaccagaagctgaaagagatcgtggattctctgcattatccgccgcataaacaaggtacgagtttgcagaaggcgtaggagcaggaacttcataatgtgcaagatcaagctccaaactttctaaaggacactgctttatatgagacatcaaagtccataagatttatttctccccatgggaattctagattgatatggaagttgcagtcaaaactttgaaattacgggaggcatagaaaatcattcctgttgttttagttcacataactaacacattacagatagatagaatggcggtagaaacaaaaaagtagaagaacaaagtacctcaacagattttggatcaggattaatgctgacatcaggaattccacgtacagtagaaggctggaggttctccctataagctctccaactagtagcaagatcaattggagaaactctgtcggcgttgatgaagacacgaaattcttaaatcaccttaaaaaccaaataaaaaaatgtataatttgtaggctttaaaaattcacaaacaaacattaaaatttctaaaaaaaaatagaatccatacatataaatctttcgttcatcatacaaatatgctttagcaaacatattgaatctaagtgatgaacaaaaacaaaagactgaaaaaacaaaacaaaagattgaatcagagtataaaaagatataaatctaattattcaggtagtcttcataagttttgtggtttggagttagatacaatatcatcagtatttataattctaccatgatcaaagttttatagacttttataattgccgactatctaaacaataattgatcagaggaaacttacgtgtgatggtgatgcctaaatccagaagaaaaacttgccggtaaaaaccagaattcttgaacaatacttaacctgaataaatattacaccatacttcaatttaaaaaaattggagtaaagaagatgaaatagatatcataatttacaataacttacgtgcaacaactcgatctttgtttaaaaccagaaaaaaatggagctaagttgagaagaatctgattaaggaagatgataatctatcttatttataacaattaattctgtcgagataatataggataggtaggtgattaattatcaatctgattttttttaacgttactttttattttttttattttataatattaataatagaattcattttacatcagttttttttgatgtaaattttgaatatttttacaaatgatgttaccaaaaattaataaatacatcagttatctaagtgatataaatttctattttatatcgattattgtaaagtgatacaaataaatagaaattgcatcagttttatttaaatgatgttaaactaattaattatcacatcagttaatataaacggtactaaatcatatatatttacttcatttataaataagtaatgttaaataacatcacttttatttgtgattcaaaataagtgattcaatccgtccctttttttgtagtgatacgagatagatgtacatatcaaccaatcctctagaatagtttgatggtcaacgttacaaagtaaaataaaaggtacaattcttaaaacatcgaaagtatgagtcttgagactcttgaaaaacatacattcataaagttcaaccgcgatgatatttccagaacaattgatcttttccagaacatgaaatctcctcaacgatcagcttgctatgatgagccatagttttacaaacatccttgattttctctgttagttctattactttctccttgattgaggagaggacgagtttcatgttcacctcttttccttcattctcaatatcatcatccacatatatcaaaagatatgagatcaaaaatctttacttatgtacgcttaaacttatatacacataaaaagtggtcggaaaaatacaaaggaaaactctcccaggcactattaccaagacaccaaaattcattatttttttcaacgctggtgaagcttcggcttgccgacgttggaaccgttcttctcctctcagttacctcaacaatttgtatttcatcccaaacttttttcccatttacaagctttgacaacctcgtgaacgtttatgagagaaagcatggaagatgtctggagaccttcttccgatttcaccctcaaacctccctgtcgaagctaataccattggaaccgcctcaattcttccaatttaggcttacccagaaatctctctcgaaagaaatcacaatggacaaaatccgacgcagtaaggccacctcctcttcgctatggatttagagtgcactctaaccaaggcgaagtcatcccgtccggtgaagagatcaactttgatttgtcatttgtgtagttcctttgcacactcactgctacaagaaaactaacaacacatacacaggaaaattagggtttcacctaatgggcctatttgtcattttggtccatcaccactaaggctttattcattaatagagggaatggctctaatctccaatctgttaggcccaggttcatttgctcctttactttgctcaatccaattcaatcgatttctcgagttcctgatctgtgtggtcgaggacaccgccagaggtggaatttaatttctttgcattggtatagctatctttgtctaagaaaccttgtctaattccaattaatggccatgctttatgaagtcataagcttgacgatccttactcggttgattgacttttgtcacgactctctcatgtttttaaattatactctggtaagcttccaaccgatctcaagcctcgtcccacctcgaacagctctttgaagaatgttcaatatgcttccccaaccttacttaggttgtggctgaaacattgctctcggattgaaactttagaatgttatacacatgtttttaccttcatcgatttcaaggataaacagtcctcaatcgcctccacatctcagattcgattctagctctgacataaaggatgttaatatgttatatgaggtatcattgccaagaaggaccttttccacggatttcgtcggcgatgaccgttgcttgcgtcttgtccgatgagtttatcgaggacgaacgacattgccttcttctgtgtaggatcgtatggatttatcccttttgtttaagactttctcaatctttctagctacctttgttgtaaatttgctctaattttgtcttatgcatcaaaccattagagttgatgttttgtactctatatccttctttggttaaatgaaaggataaatgttttgaccaaataaaataaaaagcttatatacacaaggctaaattacaacattaaaccaagatcaggttaatccaagataaccagtcaacccatttattctaataagatgcatactgaaaatcgtacttaaataaagtaaaatttataaattaaaaaagtaatatatataatatatatatatatatatatatatatatatcaatcaaatgattagtcgaataacaatgtttaaacattaacataaataaacagtcaaaaacattaacataattacaactccctcaccccatcagtgactttcatggatgcgtgtataagtatatgatggagcacttcaaatatgatttgcatccagaagtacataaacattatttttcattaactaatcctttttaaaaactcgaatagatgcagcccgtaaaaacagtttttttttggttgggttttaataaattgtatattcaattaaaaaaaaatgagagtgaaagacacatcaatgattcaaatgtacaaaaaccttgtgaaatgtaaaaaaaaacccggagccttgccttgttcacacactaaataacattctcttgtttaacaattttaatgttttatatactttaatagtagttggggcattagactggataattatattgtttaagaaaagactaaataattaatgaatatttcttttagtaatagtaaggtagctggacttatatatacacgttagcaacaagttttcaaacttctttcaatgggtctttgctctatctcgatcctcaagtcttttaatctattttagtcaaaatgtagtatttcatttttcttactttataccactactgtatttaattaacttgtggtccttctcgtatggaatatgagagaaacatctaattgtttaaacgtgtgaggtgtcgaccagctctacaatcacatgatgtaacaataattatttaagtcttattcctctgtttcaatatatttgtagcttaaatgtgttttttacaaattaagtgttgtttttatttttttatacaaaattaaatatatttaatatcttttaatcaattagattttatagcatattttttactagtttaatttgaaccatttttattttagttgataaaaatcataaattttcgatttattttgtacttgactggtcgtctaccgacttgtaaattttagaaaacttaagaatacaccggataaatgtatgaaagaataatttgaaaagtttttagtcatcgatcgacttgtgattgaacattgaaaattagaaacaagttaaatagtaagaaaaagtaaagtagtaaactatgtaatattttgattacgtatggaaaccatcagaaacaaatatactcatcctcctaatcatctcgtcatccgcatgattgacaagacaatctgaaacatgcataatatcataaatgggtatagctctcatgatcttttccttatattgattcattctttgccggtttttctttgcaaatattcttttttgttataaataaattatttataattacatttcaagaattttctttttaaattacgaattcgaatatccacacgaaaattgatttatatagcatattttgatatgaagaaattgtggaccaacagactgtaatatattttaaagaaaccaaactaataataaaaatgttgctaacaattatagtcggagaagtttaataatctacacataaatagagtgctaaaatagtaagcaatctaagtgacgaactactaaatgggtccagcaccatgtaccataataatcattctagaagctttataatcttaaacaaaatttacatattttaattttattataaagtatatctggggcatatatcttattgtaagacaacctggcaatttcatttagttttcaaggagtgtttgttttcaagattcgtagttcaaataattttctcgagttgtggatcttgtattcttgttcgaaacaaactcgtacatacatacatacacatataaatatacattcataaatactaaaggttcaacaatttaatgatacactagcgaaaatctattacaaaaattaataatgcagtaaaaactgactgagagaagtaagaacttgcgtaactccggtattcatcctcataccactgcgtttaaactttaaaccatttcaacctttgtatggctgatgtcagcagacaccttctctttttcaatatgaatatgtattggtttggttacttatcttaacttaattatagtaagacatgcgcaacaaatttagagtgcttttgtttcccccaaataattgatgtgcataaatggttaaatagcaaaaatgttgtccatacgtgtagagtctttgtcagaatagaacttttatatttttctctttaatagcaaaaattatcatacttctaacgtcattaaagattttgtctttgatgcttatctgatagcatcgaccaaaaactctacttcgaaatgtaaagtgaaagatttcttattaaacaaattcttaaatacaaattaccaaaaccacaagaaagatttaaaaaaaaagtatataagaaacaaagaaaagagtcataattctgataatttaacatgtcttcaaagatcatttttaaatttcatttccaaagttgaaatgttcagggttaagagaacttttttctctatcttatgtaagaaatattaattaacatttttttccctattatatgattttatagttatctgttttctatgaataatattattatttaacatatttggtaattatttaaattggtaataaagaagttttttctaatcaatctctatcgtaatggattgatgagatctaattttaaaaaaatcctaatgaggaataggtcctctctccacctataaatatatatatttaaaccatcataagaatataaaaaacacaacacgttaaaaactaagtttatagacaaggtaagagaaatctgctaacctaaaaattcaggtaatccgttcacaaaaaaactatctgcaacaatgaatagaggtaatcttataaacctcctaatgaatctattatgtgattaacttaaatatttaaaaattttaggggttcatgtaaagttacacgtacatcttaatctagttttcaagtacgaatcttgaacgtaaaaatgtttaaacattcagattaaaaaaagacagaagatcgtataatctttggttacttggtttaactaattcaagaaaaccctaacattgccataaatgttgatacgtacagccgaaaggccacatggatacaaggtgagtcatcgttactttattgtatggaaggcattttctgatttgtttattgcccgatttagtatacacttcattaggcccattagttagagcataattatatttttatatttgtaaactaatcacaaattactcttaaagcatgcctcttttttcgttattttattacacagatgttgagattctagtggctcataagttcctttcgagaatttaaagacaacccactaatatattttataatatatattttccgccgagaactgaatccagaacaaagttatgcctctgtgatgatgtctataagaaactttttaagtgtccaaagacaaaaccttgttgttcaagaatattttctttttggtgatgacgaataaattcatggtacggatctatgtatagatttggtaatagggtacttgtagaatcctaattgggtaagaaaataatgagctggttctcattatggtatcgacacttgttcgaagaatagtggcttctcaagattgtttccgtgattgaggaagtctagctagtaaaaaaaaattatgattgacgaggctaatgataatgcatatgctacatggttaactatagagtctataagtacatgaaataaaatatttagaatcaaaacacccacaaaaagtaagaagtgactgttgtcaagcatataatagagatccacatactatttatatccacacgcacatgttcaagcagagacaaagatatagaaaacataaacatagaagagcaaattaagcaacagtcttacacagacagaagttgtagaattgatttgtgagtgaaaaactatttaagactgaacaagtatgcttgattggggagttcaaggtcatcatcaaaagcatgatcatgatatttatcaacaacaacatcaacaacaaggatgtaggaagggaccatggacacttgaagaagacaagcttctcgcagagtatgttacttcgcatggtgaaggaagatggagcactgtagctaagtgtgcaggtaactattttgattcaatcatggcttctaaaaacacataagttttactaatctaatctttataatctcgtagacatattagtaagcgaatcaccaaattataccaaagatcttgatcttctttctgtttgagtctttttttcaatgaaagtaagatttaattataatagttatatatacatctatataattaaataacacatgcttttatgacgattaatatagataagtgtgagatcatataagtgtatatggggtatagttgacctgattaagctctttcattctttttctttgtctcttttttatttatttataatctagaagcagtctcaaactttcacaaacagaaagaggacaatgtcatggtggaaaggttttacggtttattgtttttcgaataatcaaaagatgatcttttatgattccttgttttctgttttcaggagttgactttcataagttttgggaacatttttacatatattataccctttttattcgagcattttcgtcgagataatgttaaaatttaagagattcatactcatatattatatagataaagatcatcaagttgcattattttttttatatccatgttatatgtcaaacccatttatagtgctccatttcctttcatggaatttaaaaattagggttgaatagaagtggtaaaagctgtagactaaggtgggtgaactacttgaggccagggcttaagagaggacaaatcactcctcaagaagaaggaatcatccttgaacttcattccctttggggtaacaagtaagctactcttttttttcttcttgatattctctagtaaatggtaagctcaaacctacataatagattgatattatatatcaatgaaagaaagagatacaattactccaaagtttaactaaaatatcatagtctaaactattcttcatgagtctcaactctttattatcatacatttgtactagtgtatacctatgtttagtttttgtaatcaatcctttcatgagaacttacatattttcacaaaatatatataggtggtctacaatcgcaagatatttaccaggacgaaccgataatgaaataaaaaactactggagaacacattacaagaaaaaccaaaaatcttcttcgaagcaagacaaagtaaaaaaatctctatcccggaaacaacaacaagtggatcttaaaccacaaccacaagcacaatctgagaatcatcagtctcagctagtgtcccaagatcacatgaatatcgacaacgatcataacatagcttcatccttgtattacccgacaagtgtcttcgatgacaaattatatatgcctcaaagtgtagcaacaacctcatccgaccactctatgatcgatgaaggtcacttgtggggcagcttgtggaatctagacgaggatgatccgcatagctttggtggtggctcaggacagggaacagctgcggatattgatgagaagtttccagacagcggaattgaggccccgtcgtgtggctcaggggattatagttatactggagtttacatgggaggctatattttttgattagtatgctcgaagatatcaagaagttgtgtcttcgtaggttgagaaaaaaattaaaacacctcattgtgtaatttataactttagtagtgatctaaaactagagtggagtgaggctaataagatggtttggaatatatatgtctattctaccattgtttgtataagttttatggaataaatagtttcaaaataatctttccatttttttattccatgaacccttaatagtggtagacatcatgcattgtactatttcagtgaaaccttgactctgtcacatataattcatgttgagtaatctttcaagttaacttaaggcctacaatagctttaataagtcggttaaagtataagataaggcttaaggaaatatattagttttaagagttatctaaacctaattgtaataggattagcaaagttgtgtcttctataaatacatcttttggttaagttgtaaccataagagaagtgatagagcttgtttagttttgagagagtttctaaagatcaaaaacgagagtaattctttatataagtttgttcgaatcttctttgtttggtatcagagcggtttcgatcaacttgaaggagtcaagtatggaatcttgaagaacacagcagagacgtaatcgagccatggacgacatcgactaaccaccacaacagaaggatcttgtccagacagccatctaatgccctatgctaaccttgccaaactatacagtttgtgccatgaggatgaaggtcttactacgggttaataagttgtggggcatgggcatagttgaacgcggtttagcagactccacaaaacgatatcgcaatttctttgttgttccaatccatctcgaagattctaatcttacaaataggtgaacaagtttcttctaaagggatttgggactcaatcaaatctagaaatctcggagttgatcgagttgaagaagcaaggctgcaaacactaatgtatgaattcaaacaagtaaagatgaaggactcgtagatggtgggtacctttgcatgaaggatatcagaactagcatcaaagtccgcagtcctaatgacgcaatcagaatctctaagaatagcaagcgtcgaacttgaagggttaaaactctagaaatccactacattagaaaaactctctacttttattaattagaatgataaaaaacgtgtctaacaaataacttagggtctctatatagagaacaaaccaaaacataaaataaaaaacttgaaataggaattatcaaaagaaatgtaaaactgctaaatctctcctctctaaagaacttgtccccgtctgcacaatactcatgaatgtcagctacattgaagatattggaaatgttcatcgattccgagagagccacaatataagcattatcattgatcttccgcgacaacttgaacatgccatacttgcgaggcttcagcttgttgtagtaccaactggaaatctctctttacggaggaacaccatcacatcatcaccgtatttgaaaactttgaatctccgacgtttatcagcagggaccttgttctttttccttgtagtctctaacttagtcttgacaacttccttaacaactaaaatctcttcagccataatttcagctgatgcacttaccccatgagcctttggtaatttaaccaaatcaaccacatgcttaggaacagaagtatacactagagagaaagatgatttccctatcatagaatgttcagcactattgtaagcaaattctatttgaggcaaagctaaatcccattgctttggtttatccccgcagatacttcaaaccatatttctcaaggttctatttgttacttcggtttgcccgtcggtttgcggatgagctatagaactttggttaagagctgttctaaacatcctccatagagtaattaagaaatgacttagaaactttatgtccctatccaaagtgatcgactaggaaccccttgaaggcgcaacacttccttgaaaaacagcttggccatgttggatgcatcagcggtcttcttgcatgcaataaaatgtgtcatcttggaaaatctgttaactaccacaaatagagaatccacacgccgttgtgtacatggcaatcctaacacaaaatccatagctaaatcttgccaaataccatcaagaagaggtaaaagcatacagagaccaatattttgagattgacgttttgacttcagacatgtataacaccttttgacaatagctccatcgtctcttctcaaatgtagccaaaatatatctctcccatattagcaatgtttctacgtaaatgcccactaataccacccccatgagaatcttggatcaacttctctcttagtgatgagcaagaaatgcacaatcgatctcctttgaacaagtagccttctcggacatgaaactatgcagaaggatgcttctcgttgcacttggcccaaagttccttgaattcaacatcattttcatacaactccttcataaactcaaagcccaaaatctcttgtgttaaagtaagtagcaatgacgctctcctactcaatgcatgtgtcaccttattaggtgcgcctgacttatgctcgattataaaagggaatttctgcagaaaacttatccaacgagcgtgcattttgtttatcaccttttggctgtgaaaaaacttcaaagcttggtggtcagtgaagaaaatgaactctctctgaatcaaataatgctcccactgccttagagctctaaatactgtatagaagttttgatcataggtactccatttctgtcaagcttcactcaatttctcactgaaaaaagccactagtcatttttcttagggcaggacaacccgtactcccactccactagcatcacattcaacttgaaacactttatcaaaatcgtgtaatgctagaactggtgaagtacaaagcttcttttaaataaatcaaaacttttctcttacttgaaaccccaatgagacgttcctttcttcaaacactcagtaataggagaagtaatagtactaaaatctcttataaatctcctatagaaggtagcaaaaccatgaaagctgtgtacctcacagactgatttttgggcaggccaatccctaattgcttttactttatcttttccaacaacaaagcccaaaaataataacttattagtgaatgtacacttttcggattgatgtacaatttattcccttctaaaacctttaacacatgtctcacatgctccaaatattcttctttggttttacaataaatcagagatcatcgaaataaaccattacaaaagaacctgtaaacggacaaagaatttgattcataagtcgcatgaaggtattaggggcttttgacagtccaaagggcattaccagccactcgtacagtccatcttttctcttgcaagctgtcttctattcatccccatgtctaattcgtatatgattgtatccattgtgaagatctatcttggaaaagaccttagaaccacttaactcgtcaagttgtagtccaatcgaggaattgggaaatgatacttgatagttattttgtttatggctctactatctacacacatccgccattgattacctttcttaggaacaaggtggactagtactggcccaaggattcatactctcatgaatgaaccatttcttcagcagatctttaatttattccctcaatatctcttttgcccttaggactcatacggtaacgaagaagattcggtaatcttgatctcggaataagatcaatatgatgctcaatgttgcacataggaggcaattcctatggtagctcatctgcaatcaattccttgaaatcttttaggacttctagtatatctgttggaattgttttgtcttcttttatagcactcatcagcctttaatcaccactagacatatacattgagtttccttaattgcttcatcaagctctttttcactttgtgtcacaatcaagaagttagaatttttcttcactagattctgatcaaagtgtgaaacaggagccatagtgatcttttgtccattccatgtaaacattaaaacgttgtcctttcctcgatacgtaatatcattatcgtattgccaaggacgaccaaatatgatgtgacaaacatccaagttgagaacatcacaaagaacctcttctatgtaatgcttaccaatggagattggaactttataagacagtgatacacgaaattgagagcctttactaacccatcctaaggaatatggcttttcatgtaacgttgttggtaacttcatgaattccaccagtttctgagaaactaagttttcactgctaccattatccacaatcaagttacacactttgtcgttaatatattatcgtgttctaaacaaattcttccttagatgataataagatcctttgaagtacaaaatttatcatctcatttgattcttcttcaccaaattcaacccatgcatactcatctgcctcttcaagttcttcttctccctctagaaaagctacagttctcctactaggacaaacattcgatttgcgtccttgtccttgacaacggaaacacttatcgatggatggtctcacataagtgttattttgcttctagattgatgtttttttttttcttctgagcattattataaccattgttagaactatcagatcctttgttaccaatgttagcatcccttgtcactatagtcttctccttatctcttgttgcttcacaattattttgggggtgagtatcttctaaactaagtaaaattacgggacgatttttccattaactcaactttcaaagctagaacagaagtttcttgcagagtccacacaatttgcaagcccatcttcttctgtatagaactctttaatccactgatgtaccttgccactttctgattttctgtctcccctagatcattaggctaagaaaatcgcaggaactccacagtatactttttcacggtcctttttccttgaacatattcagtatacatattatagagaatctgttcatagtcctccaacaagaacctttccattatgagctgtttcatacgcctccatgtcctcaccgccccttttatttgtctttgtatctgaacaacaagtttatcccaccacatagcagcaatattctttaatctgattgctaccatcttaacttgcttgttttcagggacgcccataacttcaaataacctataaacgttgatttgccaatgtagaaaatcctaaactccaatagtaccatagaacaatggaatgtcagcctatacacggtaatcatgattattctgtcaattccttcgctcaactctaatcatggaatcaccatatgattggtcatagcagttagagccatggtaacagccttgatcaagtcctgaaggtctgctttcgtcaatgattgatctgccatagttgatcaagcttgaaaagagactatagaaagcatgctctgataccacttgatgcagttggaatcccttggaatagcaagcactatgcctagatagaaatcaagttcggaagcatcaaacttgaagggttgaaactttaaaaatccaccagattagagaaaaaatctatgactttattaattagaatgataaaacgtgtctagaaaataacttagggtctctctatatatagagtagaaaccaaaacataaattagaaaactctatgcaaagtagtaagtttgaaataaggaagtataaaaaaaattaaaactgctaaatctctcctacatcacctagggaagtcaatcgatgaaacaaagttagtgaagaagctccttaatagtctaccacgagccaagtatattcaaatcatagcatcacttgaataaatcttagatctcaacaaagccatttcaaagatatagtgggacgaataaaaacttacgaggagcgtatacttgacgaggaaggtaacattgagactttgggaaacctacttttctcaagtatgaattcacaagataggctacaaagaaagccgtggcagattcaacatacaagatcgatcaaaggaaaagacggatcaacccgatgtgttgtgtttttgatgtgttaaaatgggacactttgcttcggtgtgtcttgagagaaaacataaatttcaagaggtaaacaaggttgaaacacaagaatcggatgcggatctctacatgcatgaatttttgtttcctaatgaaaaaaatatattgccaaaagagtacaagaaagaaaaagcagaagatgaaatatagtactaagataatggtgagctaaacgaagttagaccattcttctcggagctaaacaaaaacgtcaaacagaaggtgaaatttggagatggaccttgtgttaacatcgacggtaaaaggtcaattctcttcaaaggaaaaattagagaacaaaaaactcttaaccgatatctacttcatccagagctaaagagtaacacactaagcttgggaaaaacaacttaacaggttaggatgttagaataagacacaaccacctaacattacgagaaccaaagatcaatctcaacattggaaagtcggtttgcttgcactcaacgatcgaagaagaaacatggagatggcatgcaagacttggttatataagcttcagaacagtcaagactatgtcaactcgtgagatagttcacggcatacccaagattaattgtgagaagaaactctgcaggtcatgtttggttgaaaaacaaactcatcaatcgttttcgaaagctacacaataccggtccacacgaacgttggaactactttatgcggacttgtgcggccctataacactagttaccttacttttatcaggtatatctttgtaatcattgacgattacacaagatacatgaggacgattctactaaaaagagaaaagtgaggcgtttgaaaaacgaaagtcgtttaaagctcttgtcgaaaaggatcttgaaaacgaaatcatgacaatgcgtacagatagaggaggggagttcacctcacaagagttccaaggattctgtgacaagaatgggatcaagcggtacttgacgactcttatattaatcatctccttggttgagttgtaataataagaaaaaagagaaaacttgtttagttttgagagaactctcaaaacatcaataaagagagttatcttatataataaagagaggtttattttctctaaaaataatttatctttcaaccgaagatcaaataatttttctctaaaataacttcgagatataaaaaatgtatgagtagattatagtatgtgtatgttgacaatatgataatttgtttatttgttttaaaaaaatttggctctcacataatcgattaaatgtttatttgtgtaaaaaacatttttgtaaaaagttacgtatatcttgaaagaaaacaaacaatataactgaccatataacttaagtcataaatatcatttacaatataataaattgaatgaaaaaacaatataataaagtaaggtttcttcaaacttgtgctctaaaaatctgacaagtggcgctctataaattcgacatgtgtcattcttctgaattaaagaatgaaataatttttctctaaaactaatttatctttcaaccaaagatcaaataatttttctctaaaataacttcaagatataaaaaatgtatgagtagattatagtatgtgtatgttgacaatatgataatttgtttatttgttttaaaaaaatttggctctcacataatcgattaaatgtttatttgtgtaaaaaaactttttgtaaaaagttacgtatatcttgaaagaaaacaaacaacataactgaccatataacttaagtcataaatatcatttacaatataataaattgaatgaaaaaaacaatgaattactcacactacatttcagttatgttgtgaggttaatattctatttaatgacacaggtgatatcacgttttattttatttattatgtctaactattgcagttttttttttagtcaactaaactgttctatttcataaatcaaagcaggtacattacacaaacataattatcatttatgtaattatgatcatgatttcagtatttagtatcatattaaatatcatttttaatgtaacccttcaccttataaaatgcaagacgctgcatgtcagtttttttaagcgggtttctctgcatgtcagttaattaacgcttgaggttgaagcttcattctttctataggaagaaaataaaaacgtgcatggtaaattttatatttttcctgatacctgaaacatcgaaataatattttgtggtctgttaagtctttccacataattaaattgaaagtagagagaaaaagagacaaaacacgaaccatatgagtatgatggattggagaaaccaaagaatggtaatctcaaaggtttgcttcgtcctctgtattatgttgttttttatttttctcattttcaccaaataaatgaactaaaatcaagttaattttcctctctcatttttataatttttaatatctgttttatgtagcctttgaatcgtccaaatgtggtgatactgattcacactttgttacttctcttcattatagcatgtttcatgtgtttttgcttatacatccttttataggtgcaatggtagatacaaagtggcttaagaattattacactaagaatttcttagcaactattacactgagaatttctgttcatgatgaaggtagtaggtaggcaaatcatatatgtgttgctcgatgctcatatgtggtctatatcttatttaattattaatgtcatgattctaatttttttctccgactatttgtgttttaactattctagtcacaaccatagttaaagtttcaaagtttagtaaatggtttcaaaggcttttaacttcactttagttgttcgacatgcgaacccgttgtcttatacctctcttcaacctgctattttttgaacatgtacaatattttaatagaggatataaacatagtattaatggatatatatatatatatatatatatatatatatatatatatatatatatatatatttaactaaatatctttttaaaaattcttttatgtgacatttttgtaggttttaaaataaataggttgagtcaaattttggagtatatacataagtgaatatgtgaaaggtggatttcctttataaatgacttgatgaaaaatgtctaaggtaccttctcacttttacatgagaaacaaggtattgtttaccttcattttctacttattcttcatgttttgaagttgacaaatggtttataatgtttattttgtcaagttgctaaaattcatattattctttaaaattattttagtttttaaatgaaaaataccaaaagtgagtactcaaccaaatgataaacatatatagccaaatgtttattagatccatatgatatttcctggttggtcctgcttaatatattcacttttttattttaatatgtggttacttctttaatttccgtctttttcattttatttttttttgtcaaacaaacttgcattaaactaaaacctcaaaagaggaaggttcatacaaattgaaatagagattacataaagggacataggataaaagctccatgagttttccaaagaggtgctagacttgaagaagcttgtaaagtttgaaaaatctgttgaagccaagatggattcgaccatggagacgtactccgcgaaatcctcgaccattgaatggtcataaacggcatgagcaaaaaacgcatacttgcctttgataaagtgttccacaaaggaggctgagacttggataaaacctcttaaacttataaagtgttccgtctctttcatttaatttatagttttaatatacaaacattgttcctatttgtacacatttaatttattattggtcatgtcataaaaagtttgatctttgcaaatttagataaaatcttatgtactaaatagtaacttataactcattttactaaccatagtagttgaaagaatgcttatcttttacttatcatgctaaatttacactatattttatttcttaagttttatagtgaccataataattcctcttttgatgcatttgttggcaaatgaggtaatctataaagatattacatggatgaagataatatagagcctaggagatttgatgaatgatgaaactatacaaaatatataatcttcattgagatcattggtgggaaattctgttaattgaaattaatttctatgttgttacattgtactttcaaatttaaatttactttatttttcaaccgaattatagtgtctttccttcaatatttgattatgtgcatcgaaataattttgaactttttaattaaaaatcatgtgtatatagtaaatcattagtaaataaattcaatactttcttaccatattgttcaatgatggaagaaatagtaaataatttgaatattaattgtataaagcacttagagttcttttgattaatatcaattagtatcaatatatcaatatttatatatgttaattttactaattaatcaagactttatcaatctcacaacttcaaatctattaactattttacaatttacagacatactataatcaatatgatataaacaattatgaattcttttagtcagagaaatattgcatatcattttcatatatatttaaataaagcacaaggcttatcttgtatatcaatattataatttatttcttttgatcaatttgataattttaaattttaaaataccaaaaataattttagattaaaattcataaactaaataattagtttaaaactaaaatatcatagtcacaatatttatgataatttttattaaatgtattataaaataatttaatattatatcaatatatatattagttatagacatatatttcactacattcatttcacccacacatcgcgtgggtcattttctagttctttatataagcttgttcgattcttctttagttcatatcaaaacacatttggttaatatttctcaatactattaccggtgaatgtcgactaacaaacatgtgaatatatgtatttgctgtaaaaacactgaagttttggagtactgaagttacgagcgaagaatgacattgctaaaaacatgttacttactgtaaaacgtcataaactcataccaaaagtttaccatattatttttaaattacattagaagtctacaattcaatttttgttgaaaaggttatagagtgtccatgataatttttcaaagtagtttgagaaacatatgtatttgagaaaaaaatatatgtacatatataaactgtatggttgtgatacagtgtctcgatcgtcttctcttatacgttgggctttgcgtttctgcgttgttagttggacatttggttttaaaaaaaaaatagagaccagagaaaggtgatttgcaaaaataaccatgtttacaaaatggtgtcatatagatttgatctgatatagataatatttttgatgtaaattattatcacttaagatgatatgtgtagaagtaaaatcaaatttattatgatgaaaatatgtaccatcccggtttcagaaatacggtgatgtatgtggagaggtttaaaagaattgatttggccacatttcaccaaagtgcacttttctttttggttaaacgtcgttagaaaactccacagttaaacgtgtttgggcaccaataatttcagaatgggtgtgcttctggaatgtaattgtcggaaccatgtgagtgaggacaaagcatagggaaagatcatgtggtagtttgtaggatcggtaaacaagttttccaagcctcctggacatagcagactgaccgtcggacaagggtgggctcacatgcccgagagagaacgagggcacattagtaaggacggtcgggatgttacaagtggtatcagagctaaactaagacaagtatgggatcaagagggctcacactgtcggggtgacaatcttggtgtgcaatgaggatgttgcgtttggttagtgggatgaattgtaacaccacagtctcagaaatatggtaccgcacgcatatatatttaaaagaattgatttacctacttgtattaccaaactgctcttatcattttggctaaacgcgctgaaagaaatccattgttaaaggtgcttgggctggagtaattttaggatgtgtgaccttccgacaagtgattgtcggaaccatgcgagtgaggacaaagcatggagaaagatcatgtggtgatttgtagagtcggtaaacaaatattaaagtctgctggacgtagcagaccgaccatcgggcaaggatggacagagtgtccaaaagaggacctgggaccctagtaaggactgtcgggcgttacaaaatagatagttaaactgtattgcaaaattgaatgtataagatagaaaactgtatttttctaaatactatattaaatatagaaaaagcgtatgggctattatttagaattcaaaaatcattaaaagaatgtgtgtgtagaattaaaatgtataaaaaatataatacataagacttaagttttgtttaaaacaaaaattattcaattaaatatctagaaaaatttatagattactattttactattctcaattcaaatactatccataaacatttacatttatatcttacacctgtctatttaggttggcattatctagtatgatataaaattatgttgtaggatatttgaggttttcatcctttttaatatatagattttattattattattatgagcgttgatatacctctattttttactgcttttagctatgattgaggtataggttataaagtctatttgttattcctaaagtcttttctagtcattttcaggtttttacatgtttgggatgcatttggagtttatggatcattatggaggaaaacagagaacttatgctgcagaagaaatccggagaccaaaaaatcacgaaggtgtcgagcgacaccaatacctgacgacaattaaaatacgcaacttgttgaagttttgaagatttctaaatttgtcccagaacgtttccttatttttaaagaaatccctgcacgttttaggacatatatattaatatatatatatatatatatatatatatatatatatatatatatatagattttaaagtaattgttaaaacctaagcttttggaggctattctctttctctgttgttctttgaagcaaagcgctgtggagactccctttagagaagatcttcctaaactctaatctcttgatatattcattattgatttctattctaatcatgttgtttgcttcattcatcatgtgtgagtagtcttcttgttaggtttagggtttctcattagggttatagatgatttagtagatcgtccaccttttaggatatctttagagttcttcatcttgattattcttaatgctagttctagattggccacctagaacttgatcttaaataataggtatacccaccataagtacctgttaccagaactatcatagatggacctaagtatttaagaaacaaacaggtaggctcatagaagggctacggtttagatacttatgtgaactaatcaaacttgataataatgtatgtttagaattagggattcacggacacatcactgggaatctttagctctaggcatagtgagtagcacggcacatcactggttactttatattagtgacttgagttctagaacggttcggtaagaatcctaatcatagctagatctgttagtcatctgtttcctgagaatatcctaagcctaacgcttttattatcttattttacttccatctaatctattgctattgcttacttttgtttctttttattttctttagtattttacttagcttaattcgatagccattagtctactgtgtgatccgagaactttgtgaatttgatccctaagtgctgcaattgacctctttatttgagagagtggtcttaggattaatttgaccaatatcaaatttggcgccgttgccgaagttctctttgattcaccattagactaggtgtagaatttatactaagttttttctttcttttgttactcacgcgtttcctttcttcttttttcctctgacagggaaactaaaagatggaacgcaacaaattgattgctgatatcgacgacagtgtcaaacgacaccaacaggatgtcgatcgacaccatctacagaacaaaccagctaccataggtgacttcaacaatgttgatcttttctactcaaatcggtcatcgatctagctacctccttttgcaagtgaaaaatttgctattctcactgccaattatgatcttgtttcagaaggaaagtttagaggtgctcttgatgaatcaccactagatcatttggaaatcttcaaagacttagtgtcctcaatctatgcagatgatgtaccaactgattatcttctttgcaaactctttccccactctctaacgggaagaggaacatcatggctctgacagctagacgatggttcattgacaaaatggacggacacgaagaacgcattcatgaaccacttccttgatgattcagtgacagaattactgcgagaaaatatttcttcattttctcaagatccaacagaaagtttgaaggcaacttggatcagattcaaatcctatcagaaggactgcccataacatgttttccaagaaagccatctcatcaacatattcttccgcggaatcgatgagtagtataagatgtgtttcgatggtgcaagtgatggcaatttcatgaaaaggtgtcatagcgaagcactggtacttatcaacaatgctgtcagaagtctcacaacaaagaggataaacagtaggtagagaacattggttgaagcttccaccgttagtagagaggatcacgattctacacagattacttctctagctgtcacttcttccatcaaagcccacccaccacctgttgttaagagtaaaactgaagccatgttagaggaattacttggagagctctttgaaatatgaatagacattaggaaactccatcagtatgttttaacgaaggaatctatcaatgcagttaaactgttgagtggacaacaacaacacctcttcgagaaaacctctccgagatggactgagagcagccttacaattgcttatcatgttgttttgctggattgtgaagatgagttggtgcaagttgaaaagaatcaggttcattttgacactgtagaggtagtgtcggccgataccaaccactggtatcgctcgacaccaacaactatataggagaagtcacgctgtgaaaaagtcatatctaccagactcgacctcgacagtgtcgaccgacagcacctgggtgttgatggacaccagcacgaaacaaacgagctagtgttgacgtttgacagtgtaggatcggtgccagacaatagtgtcgaccaacactcacctagtgtcgatcgacactggactcacactacacatatcttccttgaatctccaccagttactggacaagtcttcacaccaaaagttctttgtccaatatctcgatagtcaaaacaggatattcatgaggagtattgcatgggtataatggataagattctacttcaattgcctcctgttgataaagagaagttgtcaccatcgcttccaaatgctattacactagatgaagctccagagaagcaggatgagaagggaaggacagtacttgtctcagaacagggcagtgacataaatccaagtaggatttcctgagaagctatctgttcaaggaagctttgtactcgatttttcaatctctacagacaggtttcctcgttctctttgtgatcttggttcttgtatcaatttgatgcctcattctgttgatgtaagacttgggatgacaaatttcatggctactaagattactcttctcctagctgatcgctcaaagagaatccctgaaggtatcttagatgatattcctgtgaaaattggagaatgcttgattccaactgacttcttggttttggaatatgaagaagaacctccagatcctcttattttgggaagatcattcttagcttctgctggtgctcagattgatgtgaagcttggccgaattgctttgaatgtgtgtgatgtggttatgacttttgacattgacaactagaggaaaccacctatgattatggccaagcattctctatagagacctctatagacacagttgtttatcctggcaaggtattcagtaacagcaagcgtccacatgaagaaagtttgaaattcgttgttgagaatcgatcatgcagagatggtgtcgattgacaccatcacttgtgtcgatcgacaccccacacgggctgcacaagagttgttccctaaagatagttttcgagttgacatcactgctgatattccaaggactgttgtaataacaaccaccacacctctaccactacacccacctccgaaaaggctacggtactcatctcttccacctaaacctcaggatatcatcaatacgactttaaagttttcaaaacactgttttacggtttagcaagccacgagttttttgtcgagcgcttgttctttcttttgatgattgtgcaggaaataagagtattgcacccatacctgagtcatgccctgctgatgttcctcacttcctaggtcaacctcacacgccaactgcctatacgccactttggatgatgagacgtgttgttaataagcatttactgtcaccttcttatccacttaatgtgtaaaccctacaaagtcaaactattgactataaataagcgcttagtgggaggtaactcactggtatgattttctttttaattatccagtattttacgtttttcttttatttttctcgcttactttgtatttgaatgccactagggacaatgttgtttaagtgtaggggacgcagttactaactacgtttttctttttgagtcttattattactcttatttttctttttgactcgttttattgagtcaagatttagttagaaattatgatctgtatttcttaagaatattgcctggttgattaatgctgcaggttcgactattgaaaaatcaaaatggcaaatcgacagattttaggatatcctggtttacaatacaatccattgaggctggcgctaatctcattgctcttccttacccttggtcaaaacggttaatattcatataacttgactccttgttcatacctgatatatgagaccatatagaattattatcttcccctctgtgataaaaaaaaagagagagtgtttcctgtagtataaagggttaataatgtttcctttcatcccataattttatattctcaggaatgatcaattgcaaaggttggaaatatgcggaggatatctatctgatgaagcgagtactcctttgtcctatctctgaaaagaataagtctggggagagaaagaatataaaaatatatatatatatatatatatatatataatgtatgatttatcatggtatagtagaggaatgagtctagaaggttcttgaatattagtttgcttgatgagacccagcaatgaaagcctgttggatatagttgtggaatttaggtatggaatctagaatgttgtgtaagcttgcaaagaattacatgttgcttagtgatataaccctatttttactgttttagctatgttttagatatgggtttttgagtctttttgttatttctagagtccttttagagtcttttcaggtattttattgaaagggacaacaatggagataataagacattttggagcataagctgaggaaaataagccaaatgacgaattcactgccagatcaactcgagagtgtcaatcgacacaccctttgtatcgatcaacaccaattgcggcccagagaagtccatcacgctttagagtttgaagataaggaaatttgcctcagaagactttttattttcattattagtctatgcacgttttttaggtcatagatatagttttaatggtcattgtttagacctaagttcttttctagcaacaaagtcttttgcaacttgctacaaaatactttcataagctattcatcccctgttttcagagattttcaataacagtgcagagatcttttctaactcttttctctattgatttgtttatgttttcttactcatatatgctgtttgttttatccatcatgtctgagtagtctacttgttagggttagggtttctcactagggatttatatgatttagtagattgccccttcctaggttattagtaagattcttcatctttggttattcttaatgctagttctagaataattaactggaacttgatattagataataggtatacccaccataggtacctgttaccaaaaccactatttgatgggccaaagtttataggcgtctcgaataagatcggtctattcacttaggtgaacttatcaaatttgtttagatcggtctattcacttaggtgagtagcacgacacatcaccgattatgcaataattacggttggagttcgagaacggttcgataacaacctatctaattctagatctactaatcatatgtttcctgagaataacctaaacctgacgttttattatcttatgttacaaccaaccaatatgctatttgcttaatttgctttcttttaatttacttattacctatctagcttaatcttcacacttaagtttattgtgtgaacaaaagaactttgaggaattcaacccttaaatactatcgacgatctcttatttgagagattggttttaaggtaacttgaataatataagttaggatttgattaaacttgctaggcatatggatttggttaaaatgatcaaggcaataggctagagaatattgggagttcctgcgttttcaaacctcttccacgggatcggcttttttgttttgcttgagggcaagcaaaagctaagtttgagagagttgatatacctctatttttactacttttagctatgatttaggtataggttttagagtctatttgttatttctatagtcttttgtagttcttttcaggtttttacatgtttgtcatgcatttcgaaattattgagcattctggaggaaaaagagaacttatgctgcagaagaaatctagagaccaaaaaaccacgtaggtgtcgaccgacaccaccaccgctggtgtcgagtgacactaatacctgacgacaattcaaatacgcaaaattattgaagttttgaagatttccaaattcgtccttgaaatcttccttatttttaaagaagttcctgcacgttttaggacatctaatatatatatatatatatatatatatatatattttaaagtcattgtttagacctaagcttttggaggctattctctttctctattgttcttgggagtaaaaccctatggagactgtaactgacctctttatttgagagagtgctcttaggattaatttgacctacatcaagagtaaagagtagtcctgtcacacccgtctacctcaacattgagacagtgtgctttcaccttacttatatctttgctctattccactttcttaattcaaatacaaaattgtcttaaaaataatcttaaatcactgaaaactatttaataaatcgtataagaaaataacaagacagacttgagcgactacacacaattctcaccgtgacctggggaaaaagggaaaagaaagggatgagtaaagaattactcagtgagaggatcctttccgcccactggaaatacgatacacgattctacctttaaacaacaatcaataatcacatagaaacagacacaacactcatatagtttgcatcaatattcaaaactataacacacaactcattcttgcttaagcaagatctccacatcaataccaggttcgatcatttccctgacctttgaaccaatcttattccactggactcgtcagtcttttattgagctacaaagaacccgtcaattcaatgtagaccattttccactattccacttttccacttttccactgtgattccactttctcatataactcataatttacttgttatcacaagtacaataattcaatcatcctattttactagaccaatcatcatatcatcaatcctaattaacaattcattattactaagcaaacagatctattcctatgcaatgaatcatgaagcataaaaatagaaacatgtaatcgaatctccgcagatcacaccctcactgaatttgggataaaagaaaaaggttgtaaactccttgacaatatctgaaacttgcagcacaagaaaacaacacaaagaaaaattagggtttctgcagttttcacaaaacagctgattcttgctcaacaagcaatcgacatggcagctagggtatacttttccaagtaaagacaaaaagttccgtgtcttccctaacactttctctaccggtatccaccgtcgctccgagatgaccagaaacgcctcctaaaaaccttaagatgaaactgcaatgttcctgacacttagtatttttctgggttcagggaaactgttatttttcactaacttgtaagtcattttgcgaatggagcttaccttggatcgtaaaaacgaaacttgctacttcttgctctcctcaagatctttccaacgacaccaaattcacgatctgattccttcagatccgatgggaaatagatctttaaaacctctaccggaaactgcaaagtttcagatacttagaaaaaatggctctaaaaattgtgagtaatcaccaattttaaacgcaatttcccgatcgatcttacctccgattttggatccgaaaactgttctgaaaacttgggaacgagatctactcagaaccgttaagaactcgcccaaactcctccggacgtgacgggaaacggatcaccaattccattacttgaactgttttcttctttcacatattcacacaaaaatccaatagttgaagttatgatccatgaatccacttgctaagtgaaccaatttcagtagtataattcataaccatgataggttttccttacctaacaatccggtgatgaacgacaacgaaaccaaccacgtagaataatcacgaccacaatgtgacgtcaactccggtgtcacaacgatgatgatgatgatggctgagattgagatgagagataaagaagagatggtgatgaagaagacgtaaatggctgctgcttggttgatgaggaagactatatatacacatgtatgtattaggtttttgtttctagtggaattgggcctttgttgggcctaagtggggtttgggtctcacaagtcctctgacttattatctaggatccaggatccgagatccgatctgtgatgatgtccaatcctctcaggaaaacaaaaataccatgcaaggcccaatcctgatctggataataaatattgaagaagtgtggttgttactattaaaaatttaaattactatccaataactaaaaaataagatggagggagtaaaattattattttttagcttttatccattaagatgaagtgaatagatataaaaatcagtttcttgtcgtgaaataaatagagtaattgcattacaaaaatgaaatatataagattgaaatttagttttaaaattatttagataaaatgaataaagattaccattacaattcaaataatatattgataaaatctatttatttttcacacccagctatttaaattcgcctttatctagttgaatataaaagtatgttaaagtgaaaatataattagtaaaagtttgtaattaagctcattatggatccaacaaaacaaatgcaaaaacttgatgtgtgtagtgtgtgtatataagcccctaaatttttttctcgtcaagccattttatataataaagaagggttcctctcaaaaagggaaaaatgtcatttaatcccccaacttttaaaaaatggtcattttatacatcaacttcgtatgttatacatcaagttcagtcattaacggaacttctaacgtttcctgattttcatttagaaaacaatcctgattttcttttgattattctcaaaacaaagtcgttttagagatactaatagagtcgttaacaagtaataatgaatgttataagttcttttaatgaatgatgacaacatgtttattttggcttggtcaacgaatttctcatgttttaaatggtagtcaacgcttagtttatgtttaaaatggccacatataaagtcgatgtttaaaatggccacaatttaaaacttgactaataaagtcgttaacggatgataacgaacgttagaagttccgttaatgactgaacttaatgacaacatacgaagttgatgtataaaatgaccattttttgaaagttgggggattaattgacatttctcccctctcaaaaaacacacttccaaaagctgacatgtgacacttatagcaagggcagacctattaagtcaaaaggtggttcacttgacccaccattcattttaatttttccttaagatgtatctgggcttgctaataatgcacctaatttattttcgtttttgacaccctattaattgtggcccaatgtttttgtttatttggagaaattaaaaatccaccagaaataaatatatagattttacctaattaaaaaagcccatcattaaccaattaagtctaataacctaaactacaataaatctaactaattaattctctacggaacttcaaaagtcaattccaaaaacttcatcataaatcagcatcgtgagagaaaaggagagtgcacaacaatcaatatataactaggtgagtacccacgctatgtgtgggttgttgtttaaaatttgttttaaaataattatgtttaactctttttattgctaatttatgttattttcgtgtatgttattatgtagttaataaagttatattcattttatgtaattatatttgtatatttagattcacttttgattcaaatatcaattatatttttttcatgtataaatctttttatctatatacctaagtttctaaatttttttaactatcatgaaatacttacatcaacaatatgatacaattcgatgcaattatgctacttatttgatttgaaagttgcctaacttgattctaagcaaataatttcttgttccatggattctctcctaatctaatattccaatcacatcatgataggctcatggctaaatattggattgatataatttgaataacaaatatataaactactcatttgctttaaaagttttcacatgaaaaaaaaataaatcataaattaaatagtcttttgattcaacacttttagatttctctctttgcatttgcatatatccatattagataaagggtcgtatattgaactttttggtatatctaacatctcaaaagatcactatttaacaaaagatgcatgtcagtattaatgttatcaatttatcataaaaacacaaaaagacaatatcatataaacaaaaaaatataataaaaagaaaagagtaagttaaaattactaaactaaggaaggttaagtaacaaacagttaagttgtaatacacgaaaatttctagtcattatcaaataatgactattataaaaataacaaaaataagaaaagtaaaatgagagtagtgtttgatacattaacatgattttttatattttttcttttaaatgaagatattttgttaagagtgagattaatggatgatttaatccaatgtgaaacttttaaaattttatcactaaattttgttataatttactaatattaatttacaatgacatgtggcactcactggtgtgatgatttgtcactcatatggagagagttggccaactttcatatatataatttctcttcaattgtattttgttttttttatcatcaacatctccaattgtatctatcacctagatatatttgattatcctactttaaaaaaaatctatatacccaaatttatgatttaaccaaaacatgaagtatgatctataaagctttagatatttggttcttggatcttggtatgtagtttgttggatattaaactagttaataacttaaatttttattttgatggaatgagaaacgtgagcttcacttcactaggcgattaatttatttttatttgtattatgtagtaactttttatgaattttttttttgtttgacatgataatttgttaacttttgttatttcagacctaattacagaaaagtttttgaagaggaaagctacgtcctcatctcacactgatttggatagtctacctagtaatccagctgaccgaatttttttcagaatatcatcctaatgaaagaaatgaggtaactcgtagatatttgattagacgtccttttcaacctcgtggtcatatttttaagtagacacaaatagaaggcttatggagacaatttaatcctgcttggtttgataagtatcctatcttgttagagtatagtgtgaagaaggacacaacgttttgcatttactgttacttgttcagagatagtgccggtaaaggtggaagaaatgatgcatggaccactgacggtttctctagctggaataagtttaagaacatattcgaacatgcaagaggtgttaataattttcataacaatgcagcaatgagatgtgaaaacttgatgagacaagagcagtctatcaaacaagctttgcataaacaagattgttggtgtcggatcccgcaccagagtccgagacctaccaaagattcccacgtagatgaaaagtaagcccacaaggagtaacacccgtaagattcctgggagaaaggcaaattacgggcaaagtgatcacaccgcgaagtgggggcaaagtcaaagtcaaggacggattgggctttatcggttaaagggcgaggcccatgaaggtcagagtcaatccaaattcgaacgtttgagcaataaattcaaagaccgaaacagacacatttaagagagaataattgtgtgtaattaaatgtcatttgtgagtataagtagtagggcgaagagccatgaaagacacacacattgttttgcaaacttacatacgcatttttcatcaattcacagcttttggcaatccatagctttttatacttaatttttgtcctcaagaataatctttctcactaaataaataaatatttgagtgtgcgaatccgacatccacattttggcgtcgtctgtggggacggaggattcttgagtcgtcagattttttatacaacattttcaagacaagcagcaatggccgtagaagacgtcatcattgcatcattggccaaaattctcaaaatcatgcagcaaaccatgtcggacatgtcacgtaagttctcggatgtggaaaaagccgttgatacactacaaccaacccaggtatcttttagacaaaatgttagtactatagaatctcgtgtttgttctatgaatgcaggaaatcctgttggagttcgaaagactattttcaattcgccaagctcccttgcgcgagatggaaccagcggacaaacaactccagatgccgctaacatggtagttcagccgggagacggggaaacacagctcggggacaaagaccaattcgcagatcagcacgagcaagaaagtctcgaccagttcgagaccatgagaaggttagtcgggacctgaaagaaataagatcaaagttccatcaggccactagttcggagccggatatcaatcaggtcattgaagaagctcggcgaacacctttcatcccacaaatcgcaagtttgagaatcagagattctcggaagctcaatctagaaccttacaacggtttggaggatccaaaaagttatctcgcagcttttctaattatactacaagaataccttcattttgggactctttgttgtgactaaactttcagtcgcaaaataaaccgacatttttgtgatccttttgcgactaactaacgactgtcgctaacatgaaggcaaattagtcgctaacatgaaggcaaattagtcgctacttaatgacgaaaacaaatagtcgcaaaaaagtctcaggtctgcgactatttaccaacccgttagcgagaaaaaaatataatcgcaaaaacatcgcacttttgcgacctttaagctacgtttaaccggcgctcgcgttttgcatttcaaaatttgtattatgaggtgtgtttgcaagttttcttatatgtttatagtttgatttgatcgatattagttataagaatataataaatctcttcaattccaatgtttacaaactaaacattcaaaaatgcctaatctatatcaagtgttacatgttctttaacatacaaataatctttttcaaacaattataaaataagttaagaaagcaaaacatttacaaacctaacacttatttatgtactctatactactaaatcagtgcttctcaatgatttatggatcaaactcaatggatttcaaacattttattatacagtgtcacaaaacaatcgcacttttgcgacttttaagttacgtttaaccgacgctcgcgttttgcatttcaaaatttgtattgtggggtgtgtttgcaatttttcttatacgtttaatagtttgatttgatcgatattatttataagaatataatcaatctcttcaattccaatgtttacaaactaaatattcaaaaatccctaatttatatcaagtgttacatgttctttaacatacaaataatctttttcaaacaattataaaataagctaagaaagcaaaacatttacaaacctaacacttatgtatgtaatctatactactaaatcattgcttctcaataatttatggatcaaactcaatggaattactgaatttaataatgtagagtcacaacacagtcgccgttttgcgaccaataagctacgtttaacctatattcgacttattttgtgactaattgctgacctgtttgtgattaaagaccgactagtagtgcaactaagttgcgactgtttttaatttcaatcattttctccaattttttgtctaagtgtttaggcgctcaatatttcccccaaacaatttagtgtgcaacggttttgcgactaaatatagactctttttttaatcaataatttataaagtctcgatttcttgtttttatcgtttcttcttcttctctttcaatctctttacagttctgcggttaaacgctctcacctctctcctcttcttcaactcgatttcttgtttttattgtgtagatctagggtttctagatttagattctcttctctgtttcaattcaaccccttcgctttctaatttcaccatttctagatctagggtttcttcattcgttatggctgctagtggtaagggaaaatcaggtagagatagaggtagaggtagaggtcgaggccgcgaatcgtcaactgaagtccgagtcttccagggtaaaaatccagtgttaggttcgagttgtcacggagcctcttctcactcgtcgaccctaatttggcgacacattctgctacagaataccataggagcctatcttcatagtatctgccggctattgtaccaaagacaacgccaccccaaacaacactaaccccgactaattcttgttaacccttgatctctggttctcaacaaccgcctcccgttcatcgcaatctgcctcctactcgtcaacgtcaggctcctacgagccaacaacagcctcctactcgtcaacaaaaggctcctgctcggcaacatcaatcttcgggtcttcaacaacagcctcgtcaaacggagcaacaaaacactaataatcatgaagaggaagatggggtagaagattgggaagaagatggggaagaagacaaggaagaagaagaagaccctaattcccccgaagaagaagaccctaatgtcgactatcaagatctgttggattctttactagcccttccaggtcgacaacagcttccacttctgtctgaaaagcctatccctggggtcgagactctctggtaatctctatcttttcaccttttttagatatcattttgagttggtgattgagcttagtaaccggttgtgtttttatagatatcattttgagtttgtgattgagcttagtaaccggttgtgtttgtatggatattattttgagttggtgattgagcttagtaagcggttgtgtttgtgaatgaccatctgttttgagagcgtttttaattaagttgttaattctctgttggttgctgataacgttcaaattaccctaagaactactctctcaaataagagatcagttgcagtatttaaggatcgaattcacaaagttcttttgttcaaacaatgagttgaatgtcgagattaagctagtaggtgatgattgaaataaaatgagagcaaagtaaaaagacagcagattgattgtgtggtaaatgattaaataaagagctaggaacagggtattctcaggatactattggttagtagatctaatgaaagctaggttgttatcgaaccattcttaaactcaaactctaattatggaataaccggtggtgttccgcgaaactccctatatctatagctaagaataaccggagaagccgagagattattaacctaaatatgcattcttatcaagtttgattgttcaccttagtagataagccgatttttattacacacctataaaccaggctcatcaaataatagatccaactacaaatacctatggtgggcatatctattgtctggattcaaaatctagttaattactctagatctaccattaaacataatcaaagatgaagaattctaccgataacctagcaaaggggcaatctactaaaccatatgaatccctaatgagaaactatattcctaacaagcagagtactcaaacatattgaatgaaacaaacaacatgattgaataagaaagcataaacacagcaatacatataagggaaagaaaggatcccttcactgtattaagaactgaattcaatctctgaagaacaaatgatgaatagcttatgtctctgaaaatagggatttgcaaaaagcttgataataagaaactaaagtctaaaacaatgtatataaaccctataaaacgtccagggactaataatgcaaatagggaagtcctctggggcaaatttcttcttctataaacttgaaagcgtcttggactttgctgggccaaaactggtgtcgatcgacaccaagagtgtgtcgatcgacactcctttgaatttgggactgaaaatcgtccttagcttccttttccttagcttttgctccaaaatgtctccttatctccattgttgtcccactgtataatacacctgaaaagacactaaaaagactcgagaaataacataaagactcaaaatcatatacctaaaacatagatcaaattagtgaaaatagggatatatcagttgcatcaactaaagtctttgtagtttgtatacttacgagttatttttccattgtctaatgtgatatcaacttaatattgtgtcttttgttacaggtttaaccggcacaaggggaagctgtctagagtgattgctggaatatttcggaggaagtttgatgggccttacttcagttggaaggttacaccaatacacattcaagagagatactttaggaattttgcggtactatcttataaacctttcattatgttattgtatatatgaagtatctttgctaacttaactacttgttttgtagcggaagtataattgggatagtgggattactgagcttgttaaagaaggattcttggttatagccaagaagcgtatgaaagggattgtcagtcaagcaaagaagagtggttcacaaccaccgtggattcgagataaactttggggtcggatgtgggagcattggaacactggagatgctattgagagaagtgagaatgcttcacattgtagaaactctactcgtggaggtcttggagtgcacaaacatgtagctggtcagaaatcatttgtgcaagttcatcaagagatggtaatatttctctttttatccaaatgattcacttaacagattatctaatgttgcttatatgattttaatctcttttattttcattgtaggaggaacgtttgaagtgacctgtcacatttggagaagtgtttattgcaacacatactagggctgatggatcttttgtggatcaaaaatctcaacaagttggtgaggcgtatgcgcagagccttgaagagaggatgtctgaaatagatcgggatggtcctcaaacttctgacaattcctctcagcattcaactcagcgtacactcagccttgaagagaagaatgagatctttcttaaggttattaatttctgtttttatttacttagaatgcttgtctttgtttgcttggaaattatgattgtcttactctttgtttgatgagtgataaatgcttagagtaatgatgattctctttttttggttctcatgatttaattcattttatttgtgcctttgtcttcttgttttagtgtactcatatagatggcaaaggcaacccttatggccttggatcgcttgtggagacgctgaacaaaagaaaaaagaacgagtgttatgcgagctcttctacatcaaccattgtggatcttcaagatcagctgcagaagaagatatcagaacatgaagctcaaaatgcaaaacgtgatgaggatcactagcaatatcaatctcggatggagaagcttctcctcttcatgaaggaaaaagatcctaagttggctgcatttttgcctactgattctatagaacccgaaccacccctcccaccaaccaccacaggcacccagctaaacaagccagctccaagcacattttcaaccaccacatgcaccccagaagacaccggattaggcaccactccattagcctccacttcagctactttgtctgatacttcttctaaccattgaacttgattttctaatgaatttttgaaaaactttgtcttttgttgaaaactatttaggatgataatataatgtatgagtgaatgattttatgaatgttaacttgtttcatgtttttaatcctctttatttactactaatagcttctcaattcaaaatctaatcaggtttaggagattggtaacagacagtagaacaaagagtcccaaatcacttgagaccgacaatttttgtctcaaaactgtcttaagtaagcggcgttgctttttagtcggatatctacaactttctaaagtagtcacataccggtcgcttatgtgcgactgaaaactgctttcagataatagtcgtaaataagcgaccctgttgtgactaatttatttagcgaccgttttttagcgacaattttttcagtcgttatatagtcgtaaaaccttggtttgcgactgatttgagactaatttgggggttgaaaatgacgggttaatcgccgcaggaggagttgacttggatgaagctgaggaagacgcggggtactccaagctcttttctgagaatctttgtggacaagcgctgatgtggttcacctaattagagccacgttcaatcagtaacttcaacgaattgtcagccgtgtttttgaaacaatacttcattcttatggataagagcatttcggacaccgatgtttggaatttgtcacaagggccgaatgagtcattttggatttttatgaccaaattcaagggtgtactttcaaagcttccaaggatttcgcaacaatcggctttgtctgccctacgaaaaggcttgtggcatgattcaaaattttaaaaggatctaatactacacaagccggacacaattcaagatgcactttttcgagcaaacaactggacggaagtagaagacgaaaaagaaagttttgcaaaatggaatgagccagcaaaaccggcggttacttttcctgccaagaaattcgagcccagggaaaaccaagggccaaggaagtttggattgcaaccttttaacaataacgtctggaagcagttccaaggaaaaggaaagtcaaacacctgggtccgagatgaaagtctatactgcgacatacatatggtaatcagacctctaaccaaagattgtagtgtcctcaaaaggcatctcgctgaactatgggccagcgaagatctttccaaattcaacatagacgatttcgtgaagaaatatcacgaagctagggataactccgaagttcaaaattcaaaaaggccaaggttgaccaatgaagaagaaccaaggagttcgaaggggaagatcaatgtaatccttggaggctccaaactttgccgagattctattagtgcaatcaaaaagcataggcgaaatgttctacttaaatcaagtttgagtgaagaagttaactaccaaggcgcttcaatatcatttgacgggaaagaaacgcgacaccttgaaagacctcatgatgacgctctagtcattacactggacgtggctaactttgaagtctcaagaattctcgtcgatacggttagttcggttgatttaatctttctaggtactttggaaagaatgggaattagtcgggtagacatagtgggacctccatcccctttggtggctttcacaagcggttcaaccatgtctcttagaacaatcaagctaccagttctagctggaaaaatgtcgaagattgtggactttgtcgtttttgataaaccggcagcttacaacatcatcctcgggactccttggatttatcaaatgaaggcgatcccctttacgtatcatcaatgcatcaaatttccaactccaagcggagtagaaacaattcgaggagatcaagaagcttcgcggacatgttatatggctagccaccgtttgaagatccaatagcaattaacaaagcccgcgaagaaaggaataatcccaagattttctagtgggtagaaagtggatgatctcgtgatcgaagttatgttagaggaggacaaacaagattggaatcttcgaattggagctactctaaccggggaaataaaagaggccataatagagcttttgaagaaaaataaagcgtcgctttcgtggtcagcaacggatatgcttggcatagatccaagcataatctgccacgagctaaacgtgaatccaagcttcaaacctgtaaaacaaaaaagaagaaaactcagagtggaacgagcaaaggtggtaaatgacaaagtggacaagcttttacagataggatctataagggaggtgcaatacccgaattgggtggcaaacactgtcgtggtaaaaaaaaagaatggaaaggacagggtatgcatcaacttcacaaacctcaataaatctttcccgaaggacagtttcccgcttccgcatgtagatcgccttgtggaatcaaccactttggacgagttactaactttcatggacgctttctcaggttataatcaaataatgatgaatcccgaagatcaagataagacgtcatttatcacggatagaggtatttattgttacaaggtaatgccttttggtttaaaaaatgcaggagctacttatcaacaattggtcaacaaaatgttccacgagcatcttgggaagacgatggaagtttacatagatgatatgtcagtcaagtcgttaaagaaagaggaccacgttaagcatttagaagaatgttttgagattctcaatcaataccaaatgaagctaaagccgacgaagtgcacgttcggagtcccatccggagagttccttggttgtattgtgaccaaaagggaaattgaagccaatccgaaccaaatcaatgccttgaagtacatcggttaactggccggattgcagctttgaaccgttttatttcaagatcaacagataaatctttgcctttttaccaaattctaaaaagaaacaaagaatttctttgggatgagaaatgtgaagaagcatttggacagcttaaggcgtacctaatcactccacccgtattgtccaaaccggaagtggatgaaaagctctatttatatgttttggtgtcaaaccatgcagttagcggagtcttgatacagggggatcgtggcgaataaaaaccgatttactacataagtaagtctaagacagatccagagaccaagtacacaatgatagaaaaactcgcacttgcggtggtaacctatgcccggaagctgcgtccatatttccagtctcatccaatcgaagtgttaaccaaccagccacttcgaacaattcttcatactccaagtcagtccggaagattggcgaagtggacagtggagttaagtgagtatgatatagagtacaagagccgagtcgccatgaaggcccaagttttggcagatttcttgaccgaattaccagtgcttagcacactagaacaaccagataatcaaacttggaagttgcatgtatatggattttaaatcaaaacaaggatccggagtgggaataaagttggaatctccaacattggaaattcttgaacaatcattccgtttattatttagtgcttctaacaacgaggcagagtatgaagctctaatcaccggactgaggctagcacaaggaattggagccgaagaagtgattgcttattgtgattcgcaactagttgttaacaagttcaatggagattatgaagccaaatattcaagaatggaagtatacctcaaagtagtgaaagatttggctaagaacttcaaaaaatttgaactcattcgcataccgcgaagagaaaatacgattgggatgcacttgctgcgcaagcatcaacgtcggatcctgaggtaaaaagagtcatcccggtggaatgtatttcagaacggagcattaaagaggagaaagaaacacccgtcattacaaggtcccgagctacggcacgtgatcatggagaacctgagatagaattgccacctgtcaaacgaagaaagtcaaagggttcaaccatacccgagcccaacgtgtcaaaagaaaacagtagcgcagagcatgtcaatctgacagtagacgtagttccagaaacagttatagaaaccgagccactaatctaggaggatattcttgaaccaaatgagcatcccaaaccggaaccacggatattctacgagatcgaccaaatttcggctaaagattggggggctgattggagggagccaataaaacattacattgtgacaggcgagctcccaaaaataagtggcaaaccagaaaaatgagaatcgttagcgcgaaattttgtttatcaaaagacgcgttgtatagacgaggtgtcagcgacccttacctattatgcatctatggacccgaagtcgaaattgtcatgagcgaagtgcatgaaggtttgtgtggtagttatttgtcaggaagggccatggcttttaagattaaaagaatgggaaattattggcccactctgatcacggattgtgttaagtactcccagcggtgtaaacgttgccaacttcatgcacctctaaccaccaaccgtcggagttattctcctccatttctgccccatacctgtttatgaggtggtcgatggatatcattggaccattgcacaggtcaacccgaggtgtgcaatatcttttggtcttaactgactacttctcgaaatggattaaggccgaagcatacgtgagcatcaaggactcgatggtaaaaactttcatttggaaaaacattatatgtcgacacggtgtcccatacgagatagttacagacaatagaccacaattaatttcacacgaattcgaagctttctattcagattggggaatcaaagttagttactctactccacggtaccggcaaggaaatggtcaagccgaagccgcgaacaagacaatcctaaacaatctaaaaaagcgacgagctccaacccgttttatgggcttaccgcacaactactaggcgttctactggggaaactccattttctttggtatacatgatggaggcattggttccgactgagctcaaaatgcctggactttgccgaatagaggaaaactctgcaatgctcgatgattcgatagatactatcaatgaaaggcgagatcaagcctcaatctgaatttaaaattaccagcaagcagcacctcggtattacaatacctaagtcaaaagcaggcctttctttgtaggcgattttgtgctaaaccgtgtttttgacaataagaaggaaaaaggagcaggcaagctcggtattaattgggaaggaccttacattgttaccgaagtggttcacaatggtgtttacaggttaaaagatttagaagacaggccagtccaatgtccatggaatgtggtgaatttaaagaagttttatgtttaagtaacacgcattttttgttatgtacatgaactacggtatggcttgatcccgaaatgggtacgtacgcagcttggaaacgagttcagcttctaatcaaatttgtttgattcattaaaagggaaaggagtttgattgtgcgaacaaacaaagcaaagaaaagttcgactatgcgaacatgcaagtacaggaaacaaaacgatgtttattcaagcaataagcaaaaaagacaagtttcaccacgcccgcatttcgagataggaaacctttctcgacgtagagaacacttggactccttgaccagcgaggtcaaggatcaacatcatacaattcgggatgcgagcgaattcggagatttcgagctcgatccagtcactggggtgagagttgagggtgtgaagctcccttgatatcgcggtgaccctacgtaacattcgattaatcttttttcgaagcttccttttttccaacgaacgcttttggtgctgaactgcaagagctttgatgaaagccatcgcgatttcttgatttcaatctgaaaggcctttgatcagtgcacatggagctcggatttaggaccggaagaagccacgaggtggagaaggccctctccccagcacgtttgggatgtcttcgtccatcattctgaccatgcaaaagtctggcatgtactccgagcatcgaaggttaaactccatagttgcaaaaggaaaagaaagttgtgatgaaaaataaggtaaatttggagtcataatttatagggactttgtatcccttgaggatcgcaattccatttgagaccggagtgattcacggaaagaggggttgtaatttatagggactttgtatcccttgaggattgcaattccatttgagaccagagtgtttcacggaaagacttaagccttccagtcagccctgcatttaaaacatatctccaaaacgaatatttcgagattaaggaaagtagcaaagtttccataaaataatatgggccggagcccatagcaggttcaaataaaataaaataaaataataagtaacgagttcgggaacatttatggaagagactcaagaataggctacttcatcgccggatcagcgttcgaagtggatgcttcatttttatcatccacctcgggttcattcttgacacgcttccagtggttgctatcctcttcctcgtcgtcctcctcgctgtcggacgggaccacctcgacgggagcgtttacgggaccttggacttgaccacgggcatggaggtaaatccgaagcatagtcgggatcctggccacgcaccttcctccaattcgattggaaatgatcactctccatggccctcaccttcctctccactcgagcgatgcgggcctcaagaggcaaactcttgaggcctaaacgctgcctctcatcgcacaagcggtgatgtttgtcgacaacgtagcccggaaaattgtttagcataaaaagaggaagaggaagaagtttaataaaggaaggaagagtgaatcccgaccttgtccatgaaatcgtacgcctcctttttgtcttttggaggaaagtgaaaagcagcgtggggaaagaggacactggccggttcaaaaccatcgccggataaaaacatttgactgccaaggtcgagaggacagacggtggaggctccgtcgttttccattcttgtagtgtttaccaagtaaatttatgaaatcatacttggaaaattcagcggcatctgaactcttattttatagagggttaggttttgtcttgcaacaaaaaattcaataattatggtatgtccgaatggtttaaaccatttttggaaatcgaaaaaaggcaattattgtttcaaaggcgtgaagttttttcctgtgtctcgaggaatgggaaggaaaatggcaaccgtcgcattaaagacaaaaagcccattaaatacaaagtaaaacagttaaggcccaaacccaacaagtttactgaattgactaaacccgagttggggaattcacgttgaaaacgagctccgttctcactaactaagagaaaggccgaataagccgagaaatcttgaaacttaaccacatggtcaaaaatacctaatgcggactttgcaaacccgcattccatcttagcaataccctcaaagggttatagtggaaaaggtttaaaagcctgctcaggcaaaatcttgttcaaacaaaaaaaaagcctctttaggcaaaaacataattatccgaatattaaatttcaaattcttaaatgtttgggacaaaccccaaatttaagtggacgcagccactatgaatccgtagccatctcgagctcaacatcaaccggctcggtttcattcggttcgacggtagggacttgctcagaagaggctcccggttcatggccggcatcaccttcatcatctgggatgatcaccgtctcactatccacgatcgaaggagcttaaggcaaagcaggatcaggttcaacaatccctatcgatgtagcaggcacctcgggtgcggcagtatcaacgggctcacttgatcctgaggagaacagttcaaatcagtcaaaaagatatatatataaaagaaaccgatatatgataagctttaagtatgaaagtttaccagcccaatttaaacccgattcacccaaggggggtgattgggtaaagaactcctcgaagtgctgagggttgaaggatgaagcgggaagagcagcaaggcgaatacgtttctcgtatagaacggctttcaaatcggacctttcttgctcctcagagaaatcatctttgtggatttggtctagtaagagtaggttgctttcatgctccttgatatcagattctagttctgaacgtgcctgctcggtttgaatgaaaagaatggccccttgaatcaactccatcccgcgacccttcacctcatttctggctttagccgctgacttagccaactcagcatctcgaagtttggtgatggctttgtacttcgcctcgagtttggtgaactggttgttcaaggtgtaggcggccgatttggattcagaaagcctgcctcgggcaactgagagttcatcttggagtttgtcatgtctgcgatactgatcttgcaattcggcgtttgatttcttgagttcggtagagaaaaggtcaacttgatcctccaacttttgtttggaatcagaaagggagcggaggtcagcctcaagggaagaaaacttgcccttccaggtgcagatgtcttgctccctactaagcagcagtccttcatagtgctcaaccatgtcgttgagttcgctgtttgcttggcatcgagtataaaatccggaaaagcaagttagtacataaaggaatatcacgattagaaaaatagaaatgaaactaacctgagatgaatggtaggcatgaagtaaaaagcgtttgtggattgtaggacgccatctatcaaagttcggcaagatcgcgtccttttgggtcttgaaacatcggaaaacgttaccctctgtttccatagctgaaaaagagagaagggatcaagggttattcaggccgcgaacaacgcagaagttagaaaaggaaacttgtttaccaaacatgaaagcgacttggcttgagaaacaagaacgattctttgactttggaggagtatctcgtgacttagaaccttcctgtcgaggagtcacacctcggtcagtcttctcgccactaagtcgaggagggggagatgtgaccacaggaaggggaggacccatcgatcgaggtggaagagataacctaggggaacggtctgtccgagcctttgatttctctctccgtggggaagagttacctcgggctgatctgtctctcttcttgcgaattaagtcagcaactggtttgctactcagtctatttcggggagagtaacgaggagagttgcgatggggagataagtttctccgaggcgaacagccaccacgacgttcaggacatggagttgatctaaaagcgtcagcagattcggccccctcagcactaccgactaacagggtcctactatactccttttaaacgatgacggacatgaggaatgtcttattttcctcacagtcctcggccatcggtttggatagcatcatgcgccgggaagcaagggcccgagctgatgttccttgaggtaaagggggaggcagtggaaggttctatccggatggattcattatgagtttgcgattagcttctataaaccgatcaagagtgaaggagttccaaaaggtatccccttcaaggacgattttcaagaattcgatgaatattttggtcgggaaagtttgagcgatgaaatctgcgaagcgagacaatggatttggtcagtagcaataaagataaataaagaaggtgtatattacctaatttctatcgggctttgcaaaccacttagatgggagtgcatggaacagatttttgattgaagcaagggttttcttaatcaaaaaccaaggatgatgccagtttttatccttgttcaggagatgcgagatggttcctgttagcattcgggtatgccgagaaatacccatttttctttgatgaacttctcatggtgagaagctcgttcagttcagggaccccgataacgaatccggcttccgccgcaatagttatgatcccaaagatagttcggaggaggttgggggttagttggggtagagcaattataagagcatctaagtaacagaccaaggccttgggaagagggaaggtcaacccgcagcccttgaaatagatcttgtaaacgcataaataaccagggcgagggtcttccggggactcaaaggggccatgcatctctgattccgccataatctcaggcagaatctggtagagatcttttagtcgttcgagggattgaagggtacagatggatgtgtagtgtggaccggcgatatcgttcaggcgagtgcatatgtcattgttagaacccccctcgtcgaaagacggggattcgggtctttcagtatcaggattcatcgaggaaggtgaaaaaattaagcgttcgaagaagagaaagttggcagaagaaaaaggcgagaaattttattctaaagaaaaagcggaaaagtaagaaagaggtaaatgaatttacctcacgcaagctggtggtgatgatgaaaccgcctcgggagtcgtggaggaagcggaaggattttcccgctttaatagtaataattaagatgcggtcataatggtgacagatgtcatacggataaatatggacattgccggaatcgaaggagtaacaagcttttggcaggaaatcggaaagtcatctagctcaatctttgcccattaagatattagtcttccgaattggaagaacacttcgaaagacttggggggctaattgttggtgtcatattccgcaccagagtccgggacctaccaaagattgccacgtagataaaaagtaagcccacaaggagtaaggcccgtaagattcctgggagaatggcagattacggacgaagtgatcacaccgcgaagtgggggcaaagtcgaagtcaaggacggattgggctttatcggttaaagggcgaggcccatgaaggtcagagtcaattcaaattcgaacgtctaagcaataaatttgaaggccaaaacggacacatttaagaaagaataattatgtgtagttaagaattaaatatcatttgtgagtattagtagtagggccaagagccatgaaagacacacgcatttttgtgcaaacttactatacgcatttttcatcaattcacagcttttggcaatccatagctttttatacttaatttttgtcctcaagaataatctttctcactaaataaataaatacttgagtgtgcgaatccgacatccacaaagatgatatcaccaaaaatgagtatcaaattaggttgaatgctttcattgatgcttctagacacttattacgacaaggattacctttttgtggacacgatgagacagaagaatctgttaacaaaggtaactttctggaactcttgaaatatactgatgaccaggacgaggttgtgagtaaggtgatgttaaaaaatgctcctggtaacaatcagatgacatctccaaagattcagaaagatattatgcatttttttgcagaaaaattagccaaatctattattgaagaaattgaatgccatatcattggtgaaatcaactaagagaaagctgcaggagtttagggttgatgggtggaattctctgatgattaaaatctcttctttttgtgagaaacatgatattgaaaagcttaacatggatgaagattttgttgactcaaggaaacaaagaaagaaaacagggataacaaatatgcatcactacaaggtgaattgctaacagggatatcaaatgtgcatcactacaaggtgtattgcttatatgcaattttagatttacagcttcaagagtttaactatcgttttaatgaggtaaacaccgaattgcttatttgtgctgttttttacgtcctatcgattcgttctctcaatttgaccactcaaaattgatgaggttatctacgttctatccatacgactttagtcctggagaatgcatatgccttgagcaacaattagagatttacattgataatgttcgaagtaatgacagatttgttcacttaaagagtcttgaaaaacttgctcgtgtgttggttgaaatgcggaaacatatgtcatttcctttggtttataggcttttgaagttgattttgattttgcatgttgctactgctactgttgagagatgtttttcagcaatgaagattgtgaagacagatcggcgcaaccggattggagattaatttttgaacgactgtttagtttgttttgttaagaaagaagtatttgaaactattacaaatgaaagtgtgatgaaaagatttcaggatatgaaaaatcgcagggtgtttttgtaaggtgttattttttattaaaaaacattttttggatattttatatgttgtagtttctttatatatctggctcaaatgtcaaacgcacatggctcaaatgcactcatggatgcacctggctgtgagcaacgctcccgacatagatcgagtaatagagatgacaaagcgtgccccgttcacggacagaattgcccatttttggatccgagtcgccgagagactctgcttcccggagtacgatggaacggccgacccgaaggttcattttagagctttccggctagccataacactagcgtacctggcagacgaggaaagcgaagcaggccactatcgctttttcgcagaaaacctcgtaggccatgctctagattcgttcacaagcgtcgaaggaaacactatcgctactttcgatcaactcgcagctgctttcctcaagcaatacttggtgctcatcgtgaataaaacatctcaggctgaccaatgagacttaactcagctccaaaacgaatccctacgatcctacgtcgaaaagttctaaggaatcaagtcaaaaattgtgaacctgaacgaggaagtagccatagcggccctccgcaacgaattaatgttttcctcaagattctgtgaggaactcactctccgacaaccagttacattagatgatgccctccacaaggctctctacttcgccaaagccgaagaagagaccgccgtcctagcccttagattcacagagtctaaaggataaagcacctcatttaatgccaaaaaaactaggcctatgcgttgcttcgcggacctagttttttacaccgaaactccttttagctcatttgcttccaattcgcatataaggcatatttgactttttaagatacatggctttcagctcgttggttaaaccgatcctttcccgtcagataggacactattagcatgtcgctgatacaagtgtcagctcgtccgcttgccttttgatttccgtttatgtatctcttcactagtacataggcagattaactctcgagcgcagaaattatttttcatgcttcttatcagcaaagttttgaattttaggtattaaaaccgaatagcctcaaaccagttaagtgaataaccttacaacaggtccacacttaacatgaggttaaaacaatcttagaccatctaagtgcgtaacataggactgcgtaatcctagcatcaaataatttttgatccttcatcgatctcatcacccaacaccaattcactccaaattaagagaatttggcaaactcattcgtaatcttacgatacaataggcccaccactaatagttcgtaattacatttgtaatcttgcttccaaaagtccgtaaatacgcagctcaaccttcataggtttcgactcatcggagctcatctacaacaaccatgtcaaaagccacctcttaagattgcaacttgacatagaaaagttcgaacaaggaggacacgacggtttcattaagaatattgcgataccactaagcccagcttctgaaaactggcgaatcctttttgtgatcttacttcagaggtcctcgaaatgcgcagcgtaacttgccaagaactgaccaaccgaagcacaaacataactgatatcctacaagtgaaacactcgagttcgcccagcctgaacaaagaaatacatgagatccaatcacctatctcacgtcacccaagtaatatttacgctatcacatcaaaccttgttttccgcacatcgagctcgctcactcactcgatggactaggggctattgttggagcaggaattcgcacctcgaattctcacgtgcgtaaacattaattaggctctaagatttaaatcaggcctgtcagcccactaagaagagatgcgcagctagcaacagatcaggaatcagccaagagggaatctcggaacgaaactaaaatataaaagaagtttggaacagacctgaaatgtaggagaagtttgcgctgacctcgaaccaaatgacctaggaagaagacctatataaacagagaggctaacttgaagaagacatggcctattttgcccacaaacgcttaatacatcacatacttgtattctcatactctaccttgtattcacttgattctcatcaataaaatccattcgttcttagcaatataattctcaaagttttattgaatatctagctctttttcacataaacctaaatataaatctccagtgtggatttctgaacccacaacttgtctacaaaaaccaaaaaggaaacaacactgaatattaaatgataactgaatattcagcatcaatatatttatttcgaatataaatcaaaatattttgtattttttaatttgttagagataaaacaaaaacaatcgacaaaaatcaaatgtcattaattcaaaatacaaaatattttattaataaaatataagtaataatttttatgttgttttgttttttgccattagattttatttagagctcataagaaccaattataaagaaacttgtttacatatttatgttataaatatattccaatatattctcatttaccaaatataacaaattaagtacatagccaaaacaaaatatgcgacatacattctatcaaatattttatttttgtcaaatgactcaaatcataatatgtttagagatacaagatcttatttgttttttcctttaagatattatgtacacataaaattattagcaactaaactaaaataataatagaaataatatgttataaataaaattaaatatttccgggtatctaaatactaaaattacaaatatttatcatgatattagaaaaattgttaagaatgcccttttaacactactcctttataattataccctttcgtgttggcctttttcatttacactcttttaatttttaatgaccattttatccttattatgataatattttaggttaacaaaataaaatattgttttttctcgcctaaaatatttcgaaaatagatttctcgccaaaattttcctgccaaatattatacagtatctcaacttaaaattattttgacaaaagcacaattatttattttgcagtcatcatttatttatccaaaataaaattgtatggaaaaagatttgtgttttgaattttgttacattaattgttaaatttttgacccatcatataagacttaatttaaggagcattggagcattggagcaagcaagaagtcaagaacatcaaaaaagatctacaaccaaactgggaaacaatatgaatatatatatatatatatatatatattataaaaaaagaagtttatatatatataagagaagaagttagatatctatggaaaatgaaaagcgagaaatctgcagatgcttatggaacataatttcttctgatatcaaccattttcttgcttttcattgcacgtaagtcattatttggttcataaatttcaaatacaaaaaccaatttttgtgatggtgggtgatctttgaatgtattggttgtgttttttgaatgtattggttgtgttttttgtcttatatatttggttcacaggacaagcaagtttgtatcaaatgctcatatgtttagatttaaatatatcatgtgccgactgcaaaaaaacagtgcgacgagacaagttatggaggaatgtgtttaaatggaggcagaacttgttgttgcaaaaaaagtcctccgccatcatattataattttaggcccccttcttcataatcatattgaatgtgttcctatttggcaatatcattttggatttgctcaaacatatcaaatttatactttgaaaagaaaagaatcagcaaaataaagttatttcatatttttttctttatttaccaatctcacaatcataacgtcaattatatagaaattttcttaacatgagtcaaactaagactaacgctaaattttacagtctaattataatttttagtaatgttttctaagccaaataatatgtattaagtttactaatagtttaacataataacatttaatcagcatatatgagtagcttatcgattagaatgtgatttctaacaaagtcacgtataaccaagatacacttaaacggatagtgtatgattaacaaaactaatgtaatcacaaacgatagtgcataattaaatttcatgagagccacatattagccaagatataaagacaatataccatgggtaagccacgaaggcacgaaaacacactttaagtgtgttattaatttaatcaaagaaaatataatgttagtgataatatttatatgaccaaagatttctacatcttgtcacggctccccatttcttgtcatatgtttgataagtaaaaccaaatcgaattgttggtataattaatggttccatgttggcaaaggaaaaactaaaatcacataaaacaaaatcgatcaaaaataatagtgtttttcatataatgaaattagttatagtttttttaaccagaatatggtgaaacagctccaattccagtggaacatctcttccatatttcattagttttggaaaaccttttagaagtaaaacgtttgagttgatagatttgaaaaattaatttcatatattccatgtgacattcctttccagctttcactatccccaaacaacaatcccttgaagcacttttgttctgaataatttcagccaacacttcttctatacatttgtctgggtctgggatgtccatctttatactacaattcagtagatattctttttgtttctttgaatatttacgaccaacattttcgttataatcttccgctgtcggtgaccttgcaatcatcgcatcaaactcgtcgtctaaaatgaggacttgcttgtcattatcgccttctttggccaaagttggatgagaaaacgatagcaaaatcatgatcgaagaaaatatcatgaacatggttttattctccatcttaaaatattttgagcttttattcttaattattattttttgtttctattataccagtgaagatttctgcatgtatttatagtatcaaatctttattaacgttattatttagtaattttatattagtaaaaataacttttctttatttaactctcacaaacaatatcttattagttatcaacataattgacatcttttgacgttttacaccgtttctaaatattgtatatttaatgcattttagtttatgacaatatgaattaagttgaatgaaaaatcctaagcgtttcatagatagaaaactgggttttaagtccttgtatgtgtgcattttaagtttcattgtagtaaatttactgtttgtagtcgaatgaaattagcaaagaaattgaaaaaaaaagtataaacataacgaaataagttatttcaaacaaaacctgcaccttagttaactatttgtttatatgaaaatatatgggtgtattaactatttaatactaactaaaacaaggggttaatttggcccaaaaaaaaataaaacaaaaacatctgaagtgtaccaaactgatacactaatactaaaataagatttacttatagagcaaatttatacttttatgaattaaaaaatcaaaaatcgaaactgaaccgaactgtaccaattttagtgtatctaaagtctaacctaaacaaaccaaaagttaataaaatattctaactttagtttttatatactgtatttatacaataaatatattcatgttgtataaatgtaatataaactatgaaataacgttacaagggtttttaaaagatttttaagggctttacaagagttttaacggatttacaagggtttttaaaagctttttgaaggatttacaagggttttaaaacccttttaaaactcttgtaaatctttttaaattcttttgtaaaggttcataagttttttaaaatggtttgaaagttattaaatggtttacaagggtttcaaaggatttataagggtttttaaaagattgaaaagggttttaaaaccctttaaaaactcttggaaatctttttaaaaccttctgtatgggttcacaagagtttcaaaattgttcaaaatttattaaaaggtttacatgagttttaaagaaatttacaagggtatttaaaagatttataaaggttttataagggttttaaaaacctttaaaaactcttgaaatctttttaaaacctttgtacggttcacaagagttttaaaatggttcaaaaagagttacaaattttttaaaatattcgcaaattgtaaatcattttaaaaccttttatggtggttataaaagatttataaaagtttttaaaggggttttaaagtatttacatatgtatttaaagactttataaagattttaataggttttaaaatgatttacaagactttttaacatctttacaaagcttttaagaaactttacaaggtttttaaagagtttttaaagggttcttaaaaactttacaaggatttttaattgcattattttggcaggaaaaaaaaaatttggtgagggaaaaacatttttggcgggaaaaaaaatgttttggcagaaaattttttttggcggaaaaatttcagtttctaattacatgttctcattatcaaaaggtaatttgatctttttgttcaagagaagaggtatgtttaaaaatggacaaaagaaaagggtattggtgcaaaaagatagtagaaaaagatatttttgcaaatcacccatgatattattaatttagcaacgaaaaatatttatcaacgacattaccgatctataaaagtttatgatattaatagtgtagataaactctataaaatatatacatatataaaaatatatatatatttatattatgagaaccatttgaatgtaaactttaaaattgactcaaattatatgtctttctaactcatggatgacctttaacataaacagttggaagacaagaaggaactccgtcggttaaagaatgagactggttgaacttggcaattcgtccggagagattgctaaccttctaactgattttaaccattcgcattgtgagaaggaaggactcaggcccccagggatacgcctcaaaagtctccaaatccttgacaatttcaacaacttgcatggaagctttaacgggttgggaactgcggatcaatatcccttccacgatgacgataacagcgagacaaagccttctccagttttccttcttctcttcttttgggttcatcttttctttcttcaaccattcaataatgtctttgatgagaacgatagggtgatccttaccgataagcatattccagtaaagatgtcttcgtttgatgggttgctccgactttaatatatttgccggtgggggtatggccgacaattcaaaccagtcagaatagttaactctcttaatgaaaatcggaatggctgatcggcaaaaataaaccaaagtttgtatttttttcctgtgtagagccctctacacaacatctgatggactaatttaccagaaaaagaacatttgcggacagaaagctgaaacagcggaccaaagcatgagacgctgagataatttaactctcttgtcccatctaggattttgacgagatcaagaagatactcaggctttgagtaggcattaatacgaccacatggcggatagcaatcaatggcgtagagccttttgggaagtctatccatgtttacttcaaggataaccagtcttcctagaggtcaaagagcgtctcggcggatgatctggcggagacgaaagtatcgtcatcatcttcgaacgataccgtccgcctgaaactgccaagaggggacttttgttttgatttactcgtggaggacctcatctgtagcggggagaaacaaagaagaaaccgaatttgttaatccaacaaatcaaaagaatcacacagaacgacaaaaaacctaataataattagggatgaaacgattaaatcaggacagatgagcactactaattaattatgttctacaaactgactttggatgaacaaaattgggggatagaatcgatagagcgttatgtgcagagaatcaaaaaatgtttacaagttataaaatccgatgaaaggagataacgaagaaagagaaagagaaagtgagagagagagacgaaaatctatgaggggagataacgatgtgttctttacccgcacgattcctagggaagagagataaaaagaaaatgaaatagttcaggtaggcgcaaaaactgctacaaaccgtgagggtaatatggaaaattcaagtaggcaatgtggtatgggttggaaggagttttgaaatgttgtagattttaaaagaaattggggaaatgtggtagattttgtagttttctcaaaaaaatattaatacaaacttttatcaaaaccaaatgaatatgataatacttacaactagcataatgtgcggttcacaacataactattgtgtcataaataacaatatacacattggtatgtagattataatttatactctacaatatctttcattaaaagtttattccaatacattttttaaaatataaaaccctgcacgtatgtgcgggtcataatctagtattatatgctaaatttgttaccgtgttttactactctccttaatatataatcaaaattccaaatacgtaacaccaatccatatggaatgtgaaatcatcttaactcttccccaaatgtacgtgtaacaaaaataaaaaaaattaactctcaataattatagggtttaaaaacaatacaagaccataaaattcataatgattgaataacggatcggattaatgtgatctttgccaattaaaaactctattttaatgtgattaaagtcatatttcccaaaactgtcaatttcgaattctatcaattccctcagtctcgcctcttcctttaaactcgcgtgtatcaattttaatgtgctcgaatcctattataaaccaattgtgttgtctacaatccaaatcatttccttctcttaaaaaccctagagtaggtaatgtccccaaatactttgaaaacaaacgagaatcccctctcatattccacacttgatgttgtagatggcaaaattgactctcaaacttttgttgttcgcttaacccaatcgtggaaagtacgtgatttcaaacgtaataatcttcttctcagcgttgattttcttctaatagatgaaaatgtgtagtaaactaaaaccctaccacaattatattttcattttctgtttacatctaaatttattatttccttaatatctattaatataggctaatgttatacaagaatctatccaaccatgtcttcttcataattttaagcctaaacttatagaggttaacattttctcaatccatgattacgatgtgaaaaaacaacttaactcctaccgtctaactaaccacgactacaagatatttgatataggtcaaattgccttaagatcactctctcaaataagagatcgattgtagcacttaagggtcgaattccacaaagctctctggatcacacaatagaccaagattttgaattaagctaagtaagataataatgaaaataaaaagaaacaaaaggaagcaatagcaaatttgaggtggtaagataagaaagtaaaaacgtcaggcttgcggtattctcaggaaactattggttagtagatctaataatagctaggttgttatcgaaccattcttaaactcaaactctaattatggaataaccggtggtgttccgcgaaactccctatgcctatagctaagaataaccggagaagccgagagatctttaacctaaacatgaattctaaacgagttcaattgttcaccttagtagaaaggccaattcttattacacacctataaaccaggctcatcaaataatagatccaactacagatacctatggtgggtatatctattgtctggattcaagttctaggtgatcaatctagatctagcattaagaacaattaaagatgaagaattttacagataacctagcaaaggggcgatctactaaaccatatgaatccctaatgagaaaccctaaacctaacaagttgattattcagacatgatcaaagaaacacaaatcataatctaaacaagaaatgaataacagcaagagaaagagtaaagaagatcttctccaacgggagtctccacatggttttgctcccaaagtacaaaagagatgaggagattagcctctccaagcttaggtctaaacaatgagctttaaaactatatatatgacctaaaaacgtgatggaccttctttagaaataagagaaagttttggaccgaatttggaaacttcaaaacatcaataagttgcgtcttcgatttgtcgtcaggtattggtgtcgctcgaaaagactctagaaataacaaaaggactctaaaacctatacctaaatcatagctaaaagcaataaaaatagggttatatcaatatttttcagtgatcatacttcaatgaatcatgttgacaatatccactacgaaataccacatgaatatttttgatagtttctccgattgttttatatttttggtttctttttgcaagatatcatgtattcgcagttccgataagttggatgtgtccacaattcctcctaagactacaaacaatgttattcttacgtgcatttttgaaaggtgatttattcttttgttttgcaaattttgtgactgctttagttagtctagatggtgaagactcataatttacattaataactacgtatatttttttgttccgttagtggtgagacaacttacatatctgtatgggacaaacttgcatgtaaattttgtaatgatctcgatcaactacaaggtgagcctcttatcgttattctcactggtgttaatccaaaaaccgtttgtggtcatttctaaacaaataaattatagttgtaacattctctttggttaaaccattatgtattatgctcattgatttttctgtttaagtttggattttgtgttttaaatttaccttctcaattgaaggcgaactatatctcaatactactgcatccacacggtttttctggaacatggaaaatgatgtcaccaaagatttttccgtaaaatgcaataagatcaacgtattagtctccaaatgtaatttgttatcatttattagaataattgtaattaaccaatctgaaatttaattgtagcaccaatttccagaaacttttggtgccttcatgttaagaccaaatcactgagttagtttccactaacattcatactatcgcccaaatactagcttatgtcaatgatcaaagtgggaaggtagtttgttaacaatgttttctactctttgcatattttgttgaatatatatatgtaattcatatcttgaaaggaaaaaaaactatgggcaaaaatcatagacgtaatattacgtagagatatttaccctttaccacactttttcaagttctgtttcattcacacatgcttaagttttcacatcttttttttatgtgtgttaagtcatttataccctctaaaaccaatcttcctcttttttctttcctaccatagcaaaataaatgagatatctctctctccctctctctctctccctctctttctctccctccctccctccctccctctctctctctctctctctctctctctctctctctctctctctctctctctctctctctctctccttccatgatttgtaccaaccttcctctctccatctctccatctctccatagcttattggatcaacaaactgatgggagaagcttcttaaaccattcgatctagattctctcaagaattcattttataagatcactcattttcagatgtgtaagctatttcaatggagctgttctcataaaatcttgattctctcatctctaaccaaagtctcgtttaaaacacaactctaattgaaacaaagcgtgtggctttgcatactatggatttgcataggaacatgtcgcacaaattatgttcactaataatcataccatccatggattcgaacaaatggatgacttaaagaaccaccagcttgaaaaaaacataaataaaagtaggttttgggtaattgtatgtgcttggtgaagatcatatgtattatcggctaattgaaaatcatcaagacttattgcaggcttacggaaccatcacaatcggctgcaccataatagaattaaggttctctaaaccctttcagatcatccacttagatttggccataaacagttgtccattttaccaaaagcacttgttcatcatagtacttacgaaagttaccaaaacacatgaaaaaattatgtctagaaacaacaagatcatgctacgtgtaacacccgtcccgccatatagactaagacggcatgttattcatctgatcttgccaaaacgttttctttaaacttcacacacgaacaaaatattgcacataactcctcacgcttactaacctgaggaaaaaaaaggaaaaaaaaagggtgagtaaagaaaactcagtgaggggaatcaactctgcccactgaaacatagaacactttctaaagctatacaaccatcttcataacatataaacttagacacacgcaatcaacctaacatgctttaacttctaataccacatttataataatcatcttatatatatatatatattatataaacatacacatcgttaggtccagtcatccccgtagaacctcataagtggaggctggccctcgtggcttaaacactcccatgcattccgggctcgttagccgttcttgaccagttgttaatccgtcggtccatcactgtccacatcactagggagaccacggcccatagctcgattctccccagtctttcatacaaacatacataatcatcatatatacatacttatacttaacattctcatacataatatatcatagtcagacatcatcaccataaatatcaatcaataatcatcaaatcatatcatcacataatcttatcctacgcaatcagatctaagcctacatatcatgcgtcaagaagcataacaaaagacaatgataatatgtttcgcaaatcccaccctcaccttagtctagttgaagatgaagaacatctctattctcctttctctccttttagaccaacttagtataagagctttaactgcatactcttgagctccaccttgcttctccatcaaccaaaaccttactccatgagtcctaaaggcttctgcaaagcttcagctccaaccgaacccgtttcccattcaaacaataaaaacttgtcatggtttactccatacaaaactgtctcagtaacatactcataagtcgagaaataaccgttagaaacgtaatcccaccgttaaatatgtagccaatagtatcatgaataagtacacgaagtttcatcccgatcggacctcacatgaatctcccacgttcttctgaagatgctgcatcagaactgatatctaaatttctgcaacttgagatgattctgggcaaacttctaaggtcaattccggatggagctccgatggacaatatgtcagctactatgagttccttgaatcaagatctttccatagaaatcttaatcgtgatctaattccttctggtccaccgggaaaacgcatcataaaaccagtagtcacacattgttcttgatttatacttaaaatagatttggacaacttctgcagttacttgcccagaaagaaatactcatatcttctcgaatataataccgattgaaactctgtcagttggtatggcttcatggcaacgtgatatgtttagagatgtcttatttaacaactgattctctatggtgcaacgggaatgatccttacaaaaccctatcttggaactgttcttcctccttcctcttttccttcttctttgatgctattgctctgtgcaaagctccaatctgctcatatcatcctcctctaagctttactcacaatcataatccaacttgtgctctcctaacacttgaccgtgatgatctcttctcctccgtgacgactccttggcctccatctccgtgatcttcttcttcctcttacctcctctttctttatcactctcgctctttttccatgattacgatatgatcttctcctctcttgtggctgtgcccaactcatcttctcctttacagatgatcgatcaccataacgtcaaacaacatgtcatctcaccaactctgcaacgatggctcacaaactcgtcaccaatgaccgacaaagcttttgttatgttattgttgctgcttttagggtttcagttcaggcttcactttgacggctcttccaagaaggagatatatacatatgtatatatatgctcacaacataaaaacacaacaacccttaacattttattcttgggttcaattaggctttaatgggctttatcattatttcgaaaacaattaggccctataatgtgggagtggggtgttacattacgcgtgggtttatttgatatattttggtgaaaattatatttgagtgattgttattaaatattatcttatcttacttttttaatttctattaaagaattttttcttttcaaatacgcaattttaaaattataaaaataatagtgcttgagaatcaaatttgattaaaagaatcacgaatcaatcttgttattaatcttatcgagaaccaatttttctttatactagtttttgtcatctaactcattatgtctgtaggaacgaagtgaaaaattcaggaaactgaggaagggtcaaattcctcacacaacaagtcgaaaaggaatgactcgattagctgatgagatgatatgtatttatatattgatttgtattaattttgatagttgtatttatatattgatttgtaaagtgttgaggtactttcttatgattaatcatcagttttacatgagtatttatacatccaccattactttagaaactagaaacttttatattttttattttaccgatttgtagaatttctctttcttgttgtagaaagtttcttgactttagttttatttttcctcatcttttaataggtttttccttatcgtttaaactaaagctaagattaacatattttcaggtttttgaatttttctataaaacatctttgaatgatttcaatatatgatttgacatttaattgttttaggaacttaacatatattcgattgtttaaaataagaaacctggtttttattttcctttttttttaattttaaaatataaagtaattactattttcaaaaatgttaattaattagatgttaattatgttaattattgatgtgccagctctcgattggtcgctctaaatcccacgtggacgcctttagaagtaaatagcttcaacttttatatagtatagatttagatagaataagcaaattaaacaatcattaccttatcttttataactctcaacctaattcccacccctaatttcaatgaataagatttcactaagaacacaaaaaaagagcgagcgcacggaaaaggcaaatacccctaatcatctaaattttacattgtttccaagtgatttttaacttgataaaaataaaatcaccaagaacatgtcacaagatatgcaattcaatgtataaaattcattaaagattaaaatgaactcaaacataaacgcatggtcaaaggatattacttgcatcaagttcactaaacacacttagtaacaatgagatagtcaacatacttctcatcatccatatataaaatctttgacggacaccttacgtatcatgttcttctcttttatttgaatcaaatcagatcagaattcttgaattaacacatctgcatttttggtttttcaagctttgcattcaccttctctcaccttgttcttcttcttcttaccctaatttcaaaatccataaatatccaccaaaattggcggatgtaaagtctcccgaaaaactttatcttttattcattcatgtggttagagtttagcggatatgtttggatgatcagtagttataaatattggaatagtatttttgttcaagtaccttttaatatccatttattgataaacaaatgttaaatcacaaatgaataatatgtaatataattatttacttcaaatatatcaacaatggatattaaaatgtaaaaaaaattatcttaatttattacatacaaatatagacaataaatgttattttaagtagcggaaaaaaatgagaatgagagaaagaaaaatgaggtggaaagagaaaaaaaaatgaaaaaaaagatgtgaatttgtttgtcaacgttttcctttaaacataatgatatgtctataatttgcatgttttgtgtgttcattcatcatcgttttgagtctagtttcatatctttcatcactattttatatcatttctcatcattcttgcatactttgcatgattaggatagctttgcatacatattgtatttttgagttgttttcaggtgatttgggctgttggcgaggaaattggaagaagcgagccagaaccagaagacatactcgacccccaggtcgagtacatccaacaccatactcgaccccctggtcgagtgacattggagccattcttccaatctactcgaccccgtggtcgagtaaccatagctcaggccactcgatgacaccactcgaccccatggtcgagtatcactacaccacaccacttgaccatcactcggccattcactctaccacatcactcaaccccctggtcgagtatcatcactcaacaccaacaccatcactcgaccaaacactcgatcacatcttcaaagtctactcaaattcgcacttaacaagacaagctgagcacaaggacgagaagaggagaagaagaagtgtttggaagcggtctggagcttcatccgatcacgaagcccatctcggcccattatcactctatgggccggtcgattaggttcccggcccatcaactatcattttattttgttttgtataaataggtgtctgagggttttgtcctaagacatccagtcgacattgagtttttgcttcagttttattttctgatttactctggctgcgccgctttgcttctgtaacctgtaattcgatatttttccaagttattcagattcagcatttgatttcatctgtcatcttgtttctctactctttatctctttacttatgcaatattatcatttacctgcgtttatgtctttgagcatgttgtttgagtagtgacatagagttcttaaggatgggatagaatggttgtggaatccttagtctgtagaatggttaagttttagaattgattgaaatcccttcaggactagttgtgtttactgcttatttctttctgatcaactggaattcgatccaaagcattcccgcacccagaaggtattcgatggaatgcttgatccactagttcttgagatatgcatctctatcccaagggattggccgtttagagcgtgtattgactttattagtcggttcttattgcctgtatagttagattccgttaatgggaattagtctaggcttgctttgcttgaagatttctatcacgggagtgaatagatctgttgttgaaccttttgtctagagatagcttgattgcgcttgttaaccatccgaataggctaggataccactccatttgattaccccatccttaggaatttctcgtctaactgatttctcagttttatcgctatcgcttaatcgttctcattgcatgttttttagtttttgcaattactcgaccaacttactcgaccacacctagtgtctggcaacagactgtgcagtcgagtacagttgtctcatttcctgtctgttactcgactagcatactcgaccacaccgaagggctggcaacagactgtgcagtcgagtatagctgtttcatttcctacctgttactcgatcacatcctgcttctgtcatcaaccagttgtggtcgagtgattttagtaattctgttaaaatttttgttttctgcatgtttgcttatgactgttagaaacctcaaaaccgttattgcttggcttgacttagtgacttctgatcacatctcatctgtttgcatcacaccttattggattgacacctaaaatactacaacgacaagatagtgttttaggataattgactaaaaacatactatcacaaaatatcttgttgaaggatattttgttattgatttgaattgaaccgttaaaaaaaattataaaaaaaaatataaaatgtgtctcttttgatatgaaactagaaaaaagtgtgccattatgtatctcaccctataaatagaggcaagttctttatatcttttgcttcctgctttagaaaaatgaaaaagctgcttaaacaataccttgtggaacttgtggatctgtatctattgggcgtctacggtatttaccttattacctaattccagttttaggtgtctctatcttgatgtttctcttaacgctttgtatttatcttctactacccataatattttacagatatcttattgaagttatcgtcgatgatggttgccaacttttcatatttattatttttgatgaagcacgaaaaatattgttgaaagccactgcatctaacttggcttctagaaatgtaagactattaaattaccataactatatcttatttttcatactccaaccttttgtttttaaatagaatgtaggtgaaaacgacccctatggagagattgtaccctaggagatccacaatataattagaagagatttcattttctacatcaaagtatcatgcactgctaaacaccaaagtttctccgtctctaaaatggtgacacattccccctggtcaccaaaagggtatgtcacaatccctatattcatatatatttatctacttctgaactttattttctaccacttacagtcataatatttttgtaaataccaaattgttaccgatcaattaccagttttccatgtgtactaacgacccaacaattccgttcagccgtttggccggaatttggtcggaaagtcaccaaaaaatattatgtcaaaaaagttccaacaatcttaactgttttcaagtatattatcaccaattgtggtttcaaagctctctccctaggttaattgaacaaaaaaaaacgtagaacaacgcaaaacaaaacttatatacgtcacaagtatgttatcagatgaaacactttccacgaatagatcttcttcacttaaggacacgaaatagatgggtattttaggtttcattccaaaaatgttgaagaagtatcggatagtgcaattacaagatacaaggacttctgtaaagaaaagtctgcgtggcaaccaaatgaaataagcaaggataccaagggaggaccaaccggacagaataatttacactgatctcaagaagagctcgatctcctcctaccaatattttagaatattcatgggatattaccgactcgatcgatgccgattcatctctatctcatttaagccgacctaaagattctaatataatgacttaatgagagcctcgcccaggccagaagttcaacacacctcttgcatctcccttttcttcttataaaagttaatctcacatacgagagagcaataagcctttagaattgcactaggtactttttatgctttttcatttggttcttctatacactcttcttaatcatgttaactcaattattcattcacttattcaattcttattcatcactatgacccatggttcgaaggagttctaatgaactgaattatgattactatgattttctatatttttttctctctttttttaaagattactaggatttggcttttcaataagcaaattactgcatgaactaaactgatcacttggtacatcaaaattggtaacaggtttcctaagtacaacgtatcccagtagggctcattacacaaaaaacatgtacttcccctttcacgtattgggcagcaagctccattaggtttaggcttaaaaactagagctttgggggaattttaacatgtgggcttaagcctaatgagatagggtttgggttcggtcgtctcaagatggaataatattgtcttgtctcacttgttgttttagtggaaaacttggtgttgtcatactataaagaagaaaaagacatccaagcagattgaaactccaatgacactcactacccttagatcaataattaatgatttttattagatgaagtgcttctatgccatttatcaatacgaacgaataaactaaacataatctgctaaaggttctatccaagaaactaagtatcgacccacaattggtatgcacttgcattgatttttttctgccaggaattttcactttgaatgatggttgttttccattaatatttactcttgagaccatttatatttaaaagtctataataccaaaacagggatgccaaatatggtatatatataatactttttcttgctacacaaataaggttttccaaaacttcgaaaataatcaagggtttcaacactgggaaaactctagtgttccaaaactgtaaattctgcgttaaatttttgaaacaatcatagattttaataagaagaatatataagattggtttcttaacttatacccgtagtcgttattcgatccagaggttgatgcattggtttatgttttatataaaccactgttagtttgccaatggtttcaatagtttctttttgttgtcgtcctaccccacttagatataataaccaaaagaggatgcaatttataattattgtgatggatgctcaaaaggaaaaaaagttgaaaaagggttgatggtgcaaattggagcatgcaagaatggtgcccaattatatgcatagcatcttccctaatcctcaactatgtatttttcaattgagtatacgaatattttatgctttaatgttttaattaatattatattgttttttttaaaaaatatatgttattaaagaagttctcaaatcacatttgtttgggaagtctgtcagttgggcttttgcctaattggtttacctgatagtcagaaatgcaggcggcctgactaccccctggcattagtcggaaagcatttcaaactccggacagacagtgtggtggtccttcagggagaagtccactctaaagtacttcggtgcgtttctaccgaaactgaccggatcagtcgataatgtttatcaaaagaaaaaaaaaaaaaagaagttttgcttttgtatgaaaaaatggaaaaaaaaaaaaggaaaaaagaagttctgtttctttgaacttttttttatccaatgatcttaaaatacaatagttaacccataataaattatgcaaatagctagctcgagtatatattttcgcacatatttggctagggtttacacaagttaatctatatatatatatatatatatatatttatatacatactgataattgttgctattggccaacattaatagagacggcagtgctaattattacttcaaatatatttgttggatc

SEQ ID NO: 75 - DNA, 64714 bp, Arabidopsis thaliana
aagttctagttaattgctctagaactagcattaaaaataaccaaagatgaagaatcctacatatatcctaataggtgggcgatctactaaatcatctataaccctattgagaaaccctaaccctaacaagcagactactcatacatgatgaataaagcaaacaacatgtatgaataagaaagcataaacaaaatcaataaggagaaaagagttagaaaagatctcttcactattattgaaatctctcatgaaactctgaaaatagggatccaatgtctgaatagcttggaaagtgctcaaaaacatcttaggcctaattaatgacatttaaactatataaatatattaatatatatatatatatatatatatatatattaataattttaaatagggaagtcttctagggaaatttttcatttgttcaaactctaaaccgtcttagactttactaggccgcaacttgtctcgatcgacaccaagagtgtgtcgatcgacacctagagtgtgttgattgacactctcgacttgatatgaaactgaattcctcctttggcttagtttcttcagtttttactctaaaatgtctccttatctccattcttgtcccaatccataaaatacctgaaaaagctctaaaaagactctacaaataacaaaaagactctaaaacttatatataaaccgtagctaaaaatagtagaaatagggttatatcacttagcaacgggtggtgggtgggtttcaatgtaagaagtgatatctcgagaagcaatgtgtgtagatccttgttcctctttgttaatgatggaagcctcaaccaatttttgcgcttagtatccgtgatctttgttgtaagactcgtgataatgttgttgattagtaccagtgctttgccgggggatcttgtcatgaagttgcaataacttgctgcgtctagtgacatatgatacgactcatctatccctcagaaaaatatgttgatgagcaggatttcctggaaaccatgttgtgggcagtccctctgataggatttgaatttgatccacgcatatttgaaagtttatgttggatcctgagtgaacaaagaaatcttcaatcgaagtgcttctgtcattgattcatcaaagaagtgattcatgaatgcgttcttcatattagtccaatttgtcaatgaaccagtttcgagctgtcgcaatcatgatattcctctgcccattagagagtgggggaagagtttgcaaagatgataatcagctggtacaccatctcgacgacactaagtcctcaaagatttccaaatgatcaagtggtgattcataaggagcacctataaacttccatcttgaaacaaaatcataataggcagggtgaataacaaagtcttctcttgcaaaaggggatagctggatcgctgatcgttttgagtagaatagatcaactctgttgcaatagattcgtgaatcaaattctctaggtacgtgaaacacaagagactaaaagaagaagaaacacgtgagtaggtgaagtaaaagaaatgttcaaacttaaatctacacctagtctgatggtgacttcggcaatggcgccaaatttgatatacctcaaattatccttaagcttactccctcaaataagagatcgtcgttagcacttaaggtcaaatttcactaaactctcgttgttcacataataaatctatgatgattatttacctagacaatgtagatgaaagtaaagacaagaaaacaataaatcaagttgtaaattcaggagattaaagcgtcaggtctaggaatagtcttagaaaattgataaattgtcgatctagctatgactaggattattattgacccgttctcaaacacaaaccacttttatcgaataacccagtgttggcttcccattactccccatgtctaacctaaggattcccagcgttcgcttgacaaatccctaatcctaaacatgcaatcaaaacgactttgataaattcacttaagtaaatggctcgattcttattagacacctataaactcggttcatctataatggttctgatgacaaatgcctttctaggttcacgtattatctaagatcaagttcaaggtgatcaatctaaaactagcattaagaacaattttatatgaagaactctaaaaataagcctaaggacttgatcaacatgatgtaagtgcaggaattagcacctccgacaatactagtctaaaccaaaggaattaagaattaaagtaagaattcagtcaaaccggggtactttggtttagtctgttaatgggcaagagtaaagagatcagttgccaacatcaagccaaaataaggagattgcctggctgatattcgttcctcaaagaaaacaaaaatagtttcacctagtcaaacgcaaacctttggggaataagccttgaagtaacctctcacgaagtaaacgttgatccgacctatcgcccactaaaataaaaacgtcataagctaggcaccgagagtgccaaagctgtgaacgatgaggtcgaccgactactaaaaattagatcaataagggaagtaaaatatcccgattggctcgctaaccccatcgtagtcaaaaagaaaaacaggaagtggagagcatgtcctaaggacagtttcccactcccacacatagaccgactggtcgaagccaccacaggtcattaactactatccttcatggatgcattctgtgggtataaccaaatactcatgcgtccagatgaccacaaaaaatggctttcatcaccgatcgaggcacttacttctacaaagtaatgcctttcggtttgaaaaatgatggtgctacctaccaacgcttagtgaacagaatgttcgccgaccaactcggaaaaataatggaagtttacatcgacgatatgctggttaagtctgcccatgaaaagaaccatgtctcgcaactaagagaatgtttcaaaatcctaaacaaatttgaaatgaaactaaatcccgagaaatgatctttcttggtcccgtcaggagaattccttggctacctggtaaccaaaagaggtatcgaagccaaattaaagcagattgccgccttcattgaaatgccatcacccaatacaacaatagaggtccaacgacttattggtcgtatcgccgccctcaacaggttcatatctagatccaccgataaatgcctcccgtactatcaactcctctgaaaggacaaaaaggtcgtttggaacgaggaatgccagtaggccttcaagcaattgaatgtatacctagccgaaccacccatacttgcaaaacccgaagaaggagaaccaatgtacctgtacacaacggtttcttgaaccgcaataaatggtgtcctggtacgagaggactacgaaggacaaaaaccaatctattatgtgagtaaaacactagtaaacgtcgaaacccgttatccaacaatagaaaattggcactagctgtcattatgtcagctcgtaaacaaagattgtacttccaattgcaccccatagtggtgatgacatcccaaccaatccaaaccattttgcaccatcccactcaatcaggaggtctcgctaaatgggccatagaactgagcgaatacgatatagagtatcgtaccaggactagcttgaaagcgcatgtcctggccgacttcgtaatcaagctcctgttagtggacctggaccgaaccaacatcaataagaaatggctcctcctcgtcgacggctcctcaaatcgacaaggatccggagtcagaatacaactcacctccatcactggagaggtcattgaacaatcattccgacttggatttaatgcattgaacaacgaatcagaatatgaagccctcctctctggcataaagctagctcaaggaatggggatccgtgaatacgaggctaaagacgaatgcatggaagcgtacctcgaacttgtcaaaacgttgtccaaacaattcgaatcgttcgagctgactaggatccctaggggagagatctcacttccacttcagatccttttgtcaaacaaataatcacagtcgaaagaatagaacacccgagcgttaacttaacggttaaacacgctgggacagaacctcggcaacgtgcaattttacacagcgtttccggcccttacatggtatgcacctagatgcagaagataaagacctcatgaagagcatgcacgagggacagtttagtagccactgcagtggacgaaccctcgccctcagaatcaagaagcaaggttacttatagccgacaatgctagccgattgcataactcactcactcaaatgcgataagtgccaatgccacgcacctaccctacaccaagaacccaaggaaatgtcgtcaatcttgtctccctacccattcatgaagtggtccaaggatgtcgtaggacccatggaagcttccgggggaaaaaagagactaaaattcctactggtcttcactgactactctaccaaatggattgaggccaaagcctaccaacaagtaaccgagaaacatgtcaaggtttttttgaaggaaaatatcgtatgccggcacagtatattgtacaaaatcgtcaccgacaatgggactaacctcacctcgggaaaatcaaagcattttgcaaaaaatggaagatccgtcttaccacgtctactcccagtatccgcagggaaacggaaaagtagaagccaccaacaaagttatatttagcaacataaagaaaagactcgactccaaaaagttactgtggttcgaaatactccctggagttttctgggcatactggactacgccttgcaaaccaacccgagaaaccctttctctctcgcttacggcttagaagtagtaattcctttcgagaccatagtaccaagcgtgagaagagtcgcaagtcctgcaaactcggactgaacacccaaatgttgcaggaaaacatggacttcatcgacgaacgcagagatcatgcaatgatccgagttcaaaattatcagcaagctgttgaccgctattacaactccaatatcaaaatttggagattcgtcatggaagagctcgttttacaaaagtgttcagcaacacgagagagctaaacgccagaaaattgggcaccaactgggaaggtccctaccgaatcaccgaggtggtagtgacggcgtctctacgctcgaaaaagtaatcaacggagtacctgaattttacggcgttggaatgctatgcatctcaagaaatatcattaataagtaccctaaaacaattgaactacgataaggcttgataccctaaccggctacataggcagttcccccgggtacgtaggccaccatcttaactccttctattttaaaaggtcctttgacaaggaaagcaggcatcacgctctcaatataaccaagacacgatcggacgtgcccctctgtcgaagaacgcaggtggctcacctaaacatccagccattttccaacctcaaacaggtcgctttcctgtgactagagattagatcgtcatatgctttattttatttgtactcgaccatctcaaaattagaataaaggcaatttcgatatacaatgtcaccctttgcaaatcaatcgctgctgaatgttggcggatccattttgtgatctcatttccaaaaagtcaacaacacctctaagccataaaagcataccatttcgacttcatcggtgctcacctacaacaaccatatctatctccttccttcgctataaaaacataaccaactaaacaaggaagaaacgaaggttccattccattcacaatcttgcgataccttaagcccagcatccaaaaactggcaggtcccttgtgtgacctcacttcaataggtccccgagataagcaacacaaacctgcctagattcgaacctacgaaggacatactatttcacatctgcaatacttaggcttaaaacaagacctaatataattatttttaaaaggggaggggggggggataacgcatacaaaagatattcgatagaacaaaagtaatttcaaatggataaaagccttcccaggcaccgaatattcgatagaacaaaagataaaagccttccctggcaccaagttcaaaagtaaacaaaaggatgaaaccatagccaggtcaacatagctcttctcgaggtccttcgaggtagacaactccattttcagtctgcagatctttgcctaaaaccatagtctggtcagcatcattacaccatcaaaccaacacaaagcacaaaaacgaaaaaatgataggagtgtacctggtacgaagcctcgcgctcctgacctgacttcacagtctccgttatctccttgataagcgtcaggggagacgttgcttaagtgttgataataaagagcaatcagcttgttcgtaatagcaatctcctgccgaaaacgaaacaggaatgaaaacaagcacaaaatttggaattaaagggaaacgataatcgattgttacccggccctccttcaccaccatatcagcataggtcgccgcctcgaccatgttcttcacacctgggacctggtaattctgtcctttgatgtggcaaagcagattcgctagcccagcctcgtcctccactttcgttggaagtctgtctaacctcttgagatcggctcggaactcgagaagaggacctacccccacctctcgaggactgacctccactctgggatcgtcccgaggatcgcctgtccacacacacaggtgcttccggattagaagccacgggttctgcccccccccttctagaaggacgacatcctggtcagctatgaccaatccagctgctgggtgcaccaccggcaagatccgagctctttttggagaagatgttgcaccgtccgccatggtaacctcagacggtccagagacctgggtgacctggttactagcacctacctggcctgctgtagaggtcccaacaatagcttcaaggagcagaagatgagacgtcgggcctctgcagccgacatatgacctgtacgacaacagatcctggcagtagctcgctgagcacgaagacttggtcgccacattcttctggggataagcggactttctgaagtagaactggaatttgggggaactagaaaaacaaatatatattgtttgtcaactggtaattcgtttgtatattaaacgaagttaaaataaaaacaagaaaaattgtacctataggcagatcggccacatggtctagttggacctgcgggacctcttcgattgggtcccgctgaactgttggaagagcaattactggacctgttgtagctacggcgagagcagtttttatgcgatccctgttgaaggttgcccaatcaatttgaccacgcaggaggagggtcagcaattcaagttctgtcttcgaaagggtaacttctttgatttttgctgcaaaccaccaagagaagatcgatgttagtaacaataccaatatttcaaaagcaagaaatctatacacgactaaaacaataaattcaaagcggcagatctccatctgacccaggttagaagaccatgtcctcgttatcctcgcagggtcaaaatcgctgacggaatgatgatccacccaaaagaagcctacttaactcgccaattcgtgtcccggaaggcctttaaaccacctaagattagagattcaggacaagcactgatatagtatgtcccctggtggctcctggcattagtcttcacttggcagagctgtaacaattcgtggtagccgaactctatgttcacttctcgggctcgagtgtacaacgccagcacatgacagacaaaatttgggcacatttgaggaaaggcgaaggcaagacagtagagcatctcgaggatgcacgccagaatctggaagaacagcctgtacttcccaaagaagttggcgtaggcgcaacaccatccttccaggacattctcgggtgagagcagcgaactcgggagtatcatagttacccccgccggaactcggtacctcctccgaaggtcgaccaagtcgttggctgtcatcggcaagctttgcttcttcttgggagctttcttctttttaggtcgatcgaccttagacgatggcctttggattcggcctgctccgcctagggttcctgtcgtgaaggaaagaagagaaaagcagatcgagaaaagagaagctgtagaggaaatacgaaggagatgggggaagaaagataaaatttatatctctacaataaaaatagtgggggagagaaaagttaccttgggagtcgaatgagtttatgtgaaaaggagttgggacgtggagagttatttaaagagccagcatcaccacgattttcgagatcgtagagatctcttcccacctcaaatctgaaccgtcggatgaggcataatcaagaggcgcgtcatcttgactgtacacgttagcaacaattttcctcgagtatctgctcgaaatcatttggtttaggaaatccaaatcctaacctttttattgagcttatcctcaaaaccgatgaatcctattgtgtttatcacattaccaataacattttcgcaatcttacctgacacagatctctgctcattgagctcacctactcactcggtgggctagggggcaaatgttggagctggatttccctccaggaatccacctgcgaaaatgccaggctggcctaataggcccaacaagccgatcagaaagaggacctacggagctccggagcccatgtggtaattcagtattttggccttaggaccccgttggtctgacgaggagagatatgtgtgtaacgacttgagaacaaataaggaagcaaggacgacttggaaaagacattcattcaagcttaacattaatattcatactttacacttgtaatctcattctacattgtaaaagttctactattatcaatacaaaattccagtcgttcttagcaatataaatctcaaagttcttgtgaagatctagccctcctttctcataaacttccttataaatttctagtgtggatttcagtacccacactagctctagagtaattaactagaacttgattccagaaaatacaggtacccaccataggtatctattaccagaactactatagatgagtttggtttataagaatcggtctatctactaaggtgaacttatcaaactcgtttagcatgcatctttaagtataggattcgacggcacatcaccgagaatcataactctaggcatagtgagttttacggaacatcaccggttattctgatattagagtttaagtttaagaacggttcggtaacaacctaggtatatctggatctactaataattatttcctgagattattctagacctgacgttttaatatcttgtttctcaaccaaccaacctgctttttgcttactttacattcttttcatttttcttacacacttctaccttaatcttgacacttagctcattgtgtgaacaaaggaactttgtggactccgacccttaaatattacaatcgatatcttatttcagagagagagtttaaggcaagttgaaccatatcaattatgttgtgttcttggttttgagtttctcataggtggctccaaagaagaaagggaggatttatgggcccggttcaatgcagctagaagcctccttagctaacactactctagatattcctcgagaagatccagttgtactctctcaaaagctcttattgcaaaccaagctaagaagatcactagctttgatgtgtactttgactatcttgccgagaaggatccagagtttgatgccctctttcgagccggatcgttttcaaggactgcactagtcatctccaacccgacacctgaggtgcccaatgccatagctgctacatctgctagaataggagctgacgcagtccgagctcaaggcaaccacttgatcctctccatctcaagctttctaagtctataataaagtttactttgggttttgggtttataaggtcacaaacatagacaatttaatgtttgtgaatgtataactattggattcttagattattatatgaatatgcttctaatttcaattttcaatttcagtttaaggattcaaatcaattttcaaatagaaatttaagtttaagatcaaattaagaaagtaattatagataaactaaccttactaacgcaaatgaaaacacacagtgacgtaaataaatcgcacatccatctcaaaatttgctagagatttgccactacaagaaaagagcacgcaaatccattgcaaaatttcctaggtaattgcagtaaacaaagagctacgcaagtccatcgaaaactttgaaagaaacaagcgagacctaccagttgcaactaattgacctaccagttataactaaattagttgcgactggtaggtatcgcttgatggctagtgatatacctcaatttttactgattttagagatgatttagacattggttttgagtctttttgttatttctagagtcgtttctagtccttttcaagtttttatatgtttgggatgcatttggtgatcatggaaaattctggaagaaaacatagaacttatgttgcagaagaaatctcgagaccaaaattcgcataggtgtcgatcaacaccaggggtggtgttgcctgatgatatatcccgatttttaccgtttttaactatgttttaggtataggttttagagtttaattgttatttctagagtcttttctagtcgttttcaggtctttacatgtttgggattcatttggagataatggagcattctagagcaaaacaaagaatttatgctgctgaagcaaagccggaaactaaaatgcgtgtaggtgtcgaacgacaccacccctggtgtcgagcgacaccaatacctgacggcaattcgaagacgcaacttatcgaatacccagaactttctcctttggttaatgaaggccaatcacgtgttttagacttgtatatatagtttttaggtcattgtttagacctaagctttgggaggctattccatatctcttttgtacttttgggagcaaaaccgtgtgaagattccctttagagaagattcttcttaactctattcttctcttgttttattcattgatttcttattcaatcatgttttgttcttctatgatcatgcttgagtagttttcttgttaggtttacggtttctcattaggaatttagattatttagtagattgccctgttgctaggttatctgttaggattcttcatctttaattgttcttaatgctaattcttgagtagctaactagaatttgtatcctgacaataggtatgcccaccataggtatctctagttggatctattatttgatgagcctagtttataggtgtgtaataagaaacgacctatctactaaggtgaacaattgaactcgattagaatacatgtttaggttaaagatctctcggcttctccggttattcttagctataagcatagggagttttgcagaacaccaccggttattccataattagagtttgagtttaaaaacggttcgataacaacctagctttttctagatctactatcatctatctcttgagaataccctaaacttgactcttttcccatctgatttacattttgatattattgcttttctttatttcttattttataatctattggtctagcttaattgaaaacatcataagtctattgtgtgaacatcgagagctcagtggaatttgactcttaagtgctaacgacgatctcttatttgagggagtaagcttaaggcaatttgagctatatcacccgacaccactatctgacggcaattcgatttcgagtctttttgaagttttgaagatttgttgatttgccccagaacttctccctatttgcaaagaagtccttgcacatttatagaatttatatatagattttgaaggtcatttttagacataagcttggagaggctaatctcctttttacttttgttcttgagagcaaaaccatgtgaaaattccctttagggaagttctctctaaactctattctcattgttattttcttttaagatttcttattcaatcatttttttttgcttcaatttccatgcttgagtagttctcttgttagggtttatcattagggatttagatgatatagaagatcgccaacctgttaggattatctttagagttcttcatcttgattattcttaatgctagttctagagtacctaattagaactttatcttaagtaataggtaagcttcgaaagggcgcttattgctagaactatcatatgtgggcctaagtatttatatgtggatagatctgggttcgatacctaggtgaactgatcaaacctaatattaatgcatgtttaacaattagggatccgcgaatagcattgggatctttagttattaggcataactaattaatgtgactagcgttggttaagtttacattagtgatttgagttccaaaacggttcgataacaatcttcatcatagctagatctattaatcttctattagtctactctgtgatctgagagctttgtggaattcgaacttaaattattgcaattgatctctttatttgagagagtgttcttaagattaatttaacttacatcaaatttcttggacgtggatgcaagtgatatgagacggaaaagacttgtctaccgtagggtcccaccttcggaggataaccatcgatttggagaaatggaagagttggttctccaaagctttgagtagattaggttccttggcgaactgaaactggaagaggctgtttccgaggtccgcacccaccgggctggaaaaggggtgatgaaaaagaccttatggattgcaggattgatgagttttcatatgattgtgagttcatgtcttcaaagaagctcagggttgtcgaaagcagggacttaaactctaggaggttgagggttctgtgaggaaatgattgagcttttcccttttccgcataggggagacgactcaccattttcttagatgctgaagaaaaatctttacttgatgtaagaaggtttagagggagatttaaatcggagaaggagagaaaaacggcgacaccaagggaaccagaggagatctagaaacaagatctaggttaacccggagagaaatgtgaattctcgggagtcaggtttggtaccgttttctctctcgtccaaaaaagcatctttttctagagtttgaatcctttagtttttggtttatgatctattaaaactaaggatgcatttcttgtaatacacgtttttttggtgaatacattttttcattcatacaaaaaaaaaaagaaatcacagttgcttagaaactaatatgactgaaattctttacaccgaaattaaacagtaaatacaaagatttaatataatattacatttgattttttttaatataaattttaaatagaaaaggattattttagaactccctcttacaaaaattcttaactagaaaaagtatatagtttgaataacattacttttattatagatttaccaataatgaaatgtataacacacaaaattttagattttatatagaaatgatagactcaacacaacacaaataatgttattgtcattttacactctcattgaatattaaaattttaatttttcttacatttaaatagcctgttaacgtttttaattatccaatcatatactttgtgtataaaaagcggtctatcaacatgtctctcagcttttatctttagatagatcccattttttattgctctccaatcccatacgcctccatgatctgaagcactataaagtttaaatgctgtaaagttttgattgtgaatttataattaggcccttgtctcaaggtacacatgaaacgagtcgtagccaaaacatgggtaagaaattgattgaacctatgcccaattggtattattaatggacctataatgtcatctttggattaacatttcatccataaaaaaaggatttgaatttgtggtcaacctaaaaaaggatttgaatttataagtgccaccctagcttggtcttttaggcttttgactggacctcgacatcaaactggagggatctgaaaagccaggttgggatcgattctgttgttgggtggttgtgagttccagttgaacatctgataaataaataaagattctgtcatgatgtctcatccctagaattagtcagataacttaagtttgttgtggttagaccaagttctagctaatcctagacccttaattcgatgttgacctgaatctcccataattatcaaaaatggcaaataaaaagatccaaattaatagatattgactaaaaaccatgtagagcctaaaaagctcatatgttggtatctcatgtctataccacaccaatagaagtagttttttttttttttttgtatttgccaacagactgatgtctatagtagaataatcaaatcaatttatgttaatccaaattaatcaatttagttgaggtatcaaaccatttgtggtggaccaaagtaagtaaaccaatttatgagttatctcatttggagattgtatacaatatttgaactctataatttgcagcacacaatatgtccactaaaatgaaatcgcagataagttgctaatatgatattatcttcataatctatatatacttgctaattatgtccatcgtttttgcatatatatataaaaaagcgcacatgccgaatctatctgttcactatatatcctgtggcaacagtctttgacgaagattaactaggcgtaggcaaccaatccgagctgcaaattcgaagaagggtctatgcatgcatgattattgattgtgggttacagtagtcaatagatataattctttagcttaaggtactacttttgattttacgttagtagttacacacgaagttggtggttgttagatttgagtttaaaggcaagttaattatagataaattattatgaacatgaatggagttatattattttattagaaaccattactcatatttttctagcggcacatcacgaagttccggcacctgacacatagtttaaaggaaatgtaactggaaaacaatacacataaattagtgttaatagttttacagtttatttaaaatgaatttccaagaacactaaatacaaattaaaataaaactttatttttatatagataattggtcttatgaagaatattgaatcttacatataaattaggtagcttgtaactatttactatatccaactttgctctttatgcagattgtctgcaccgtcatcaaatttggccttatagattcttcttaaatagatcccatcttctctagctctccaatcccataagccagaatttttaaatgctctaaagctctgactgtgactaaatccaggcccttgttttaaggtacacataaaacgtgtcgtaccaaataaattatgaaagaaataatctgtaaattgtcctccatttggtattactgttggaccaagtacgtcatttttggaatagcacctcatccaaagagttttcttatttttgagttcgttcacgattctaattccggcgccggatacatggccaagcatgcaaagactaaaaacaaatacgaaaattgtgaaatatttcattttttctgtagagatattttgatcttcttttgtcgtgttgacttgtttttttcgtctgtatttataacaacatatatgttgctatttttgaatgtacagtttcttgtttctctgttaacataaatgttctattaaattttgtccaaaaaaaaaccttttctattaatagttaataaaacaaatcattggagactttcaatatatgtggacaaaaataagtatatgaacatttaactaccagcctagcacaggttatctcatccatttgtattatatcttttgtggcgaacaatatgttcaccaaaatgaaatctcagataagttgctgatattaacctttattatctatgtacttataatgtccattattttggtataaacaaaaagtgcaaatgccgaattaatcgatcaactatatcttaataaaatatttcttttacaagtacttcagagtaatcctatagaatccagagttcattttatggatgcgatgcaacatttaagtgggtcccaaattgttatagggaaaaattaaaaatgtttaaaagttctaggatttcacactcttaatttggccttccttttatagtttcatctccactcttcttattcctcttcgagaaagatataaagatcagcagtgaggcatcaattgcttttttaaattacactccttttgtttctatatgagtctcgcttcggctaaacatcgtatgcatcaacgtgttttataataactgattctcgattttgggttctaatggattaattttttgataagtaggttttttttaggcctacttatatgctgaatgtgaggttcagtttaattcccctacaaacactaacatgtcgatgtagctataggggtgtcaatccagtccactgttattgctagcaatcaagacgtgtacataagcaactaagtccagccagattataataatggtgggtttctagtaacaatcctaggtcaggattcaaacaagaaaaacaagaacttaagagccctactcgatcattgggtcgagtagaaccaacaagtgacaaatttaagtaactaaaatgtaatcaaaaggggatacaaataacaggtaaataaaagtgcaatcaacaggggatacaaataaatctaatagaagtcctaaggatggattcattgataagggcaactctagggttcatcatgtggctaacaggtgaaaggtagatacccttgacgatagattcaaaaactgagtcaatcaactatcgtgacagagacccccataactctaccacttcctaatctcaactgtcgttgatgaaacatagcagaccagggtttacgcaacaatctaccaaagccaataagcagacaaaccaatgtcttggtctagtctataaatctctggaattcgtagatcagacatccatttgaacgtcttttggacgctggacgtctatgatcgaatctccacattagccagcgaaaaccgcataggggccaagtgaatccagaagggttctaacctaatcttaaccacctgactaacctagatattaattaccctaatctaatccatcctcaagaaccctaatcgctactcaagcaacattctcaagaacacaaacccagaaattactgaaatcataccaaaatgtagatctaaacaagctaaacaactttacttaaagaactaaatgcaaaaacgaaatagtttaagagtaattaagttttgaagattcataaacacaaagaaaaactaaaggataaaagctagatcctttggacaaatcccaaagtgatctatttatagtaaaatgttaaaaccttatattcactagaagaaaagagagttgaggcggtttgggcgaatgctcgatcttggggatcgagtaatgagggtgctgcaaagtctgctcctttgtgtctatgttccgagtgatcaattggtcgagtagatgcttcttcctctcctatctatatgctaagatgtctggttgagtggggaatgaggaggatcaaaaagctgccttgatcgagtaagagggtcgagtgaattgctgcctcctctgtggctgcctagatcgagtgaatggatcgagtagaatgctttgcttcttccctcctggttggatagagtaaagggtcgagtagagtccttttaacctccttctgcacctgaaaacacaccaaaacatgcaatgtgtatgcaagatgatcctaaatgcctaagtatgcaaaataagctaaaatggtgcaaaatgatattatacattgagcaaatgcaaatctaaatgatgataaatgcacacctaaaatgagtaaaatacagtgttatcaactcccccaaacttatctcttgcttggcctcaagcaaacaaaaaaacttaagttgaaggagaggtttgaaggtggggattcaaaaaccgaagcatgcatatagaacgggtaagctcaatgtccaggtagctaattctaggttgcaagatgatagacccttacttcaaaactttagccatattcgtcacaatgcaacctaacaacttgccttaatctattcaagcattcacatcaaccaataccctttaacattcattaagcacgaacagtggatcaagcaatgcaatggttttgtactcacttggtttcgggcttaggctaagagacaaaaatggtccctctcatcattggtcgagtaacaaagactctcagagaaaagattgagcttgagcagaatgctaaaggtaaaagccaatggacacatacaagaacagactcccatctacccaatgatatagtatgatagctcaaaagatgatccctgtcccatagatgtcctaactttaccatttttcccattctttctctcttttggttcaagttctaaagggttcttttttgaaacgatttaaaagtctagcgggtttggttttttaaactttgacaaacttaaggcttttcttctaatcttagcatagagggtgttttacccttttctttgaatcacaatgcctaacttctttgaattccaaaccctttactagaccaacacttttgtatccccctttagaactctaaactcttactctcttttttttcttttcttttcattctcattctcatttccattcaatccataaacaatcccaatcccaaatacaagtctccacctagtcctagctaacccaaaaagcgtgagctaggtctacatggaagactgctcttgtcggctcatacctaacacgttataccaagctcaatcaaaaaagaccccacaatcacacacaaatgatatttggcttaaaataagactaggctaagggtatgggaaactgctctaaaaatgagagtcaggtatttggattaacagagggtggtgaagtgaataagataatccaagtatgtatatggtagccatgagttcacaaaccatgcatagacatgataattacaaattcaatttaggttctagtagatagggaatggcatcagataagcgagtttcgaatcaaagtagtatagtcaagttacaaattcaaagcaggatgcagtcatacttcagagatacaatcggttatgcagcagagaactaacaacttgggcattgaacttacttcattgaatcaaaacatgcttatcggtttgaaatcatcattatcccctatacaaatgaggaatcctaaatgcaaatacactatatacaatcctaaagtgatatgcaatctacatgacactctatttttgtgaaatcattttctgattttttttcaaatttttatggttttttctatgccttagatgattcaaaatttgaaataagaaaagagaacacaatgttaaacgtgtcttgaaacctccccccaaacttaaattacacaatcccttgtgtaataaaaatctgagaaaaaattcaagaccaaaacacaaaacacacaaagaaaaataaaaagaagctatggtatataaaatggttgaggtgctgttaccttagtgatcaggtgaagtaggaggagaaaaaatcgtccatactctcctttgtgtaacttcaaggaacgggttgtgctgaacttggattagctggatgttcgaccctttgctcgggttgttgattgagtggctcctcaagtggtgcggtagagtggcttgctccagcatctgatttccttgttcttcttcgctttttcaacttgctcctcttttcattttctctaggttcgaaggatgattgtcttggtggtgaaggtgcagcatggtgttccctctgctcatatgaagactgtcttggtggtgaaggcggatcgaaatgcataggttcgtgacgagtggatccgcttctcccaaaaggcatgttctgtggcattgccgtagtttaagaagaacagttgatgttgagttggaggttgttaaacttcttgttgagtgccgcgagagccttgtcgtggaacttacaccagctttggaggaaaccaaggcgcttgtgaatttactttgagtctttactttgcctcggtgcggagtactcctcaaagtaaaactgttgtgttatgtaagacacgtccataggttctgcctcattatctgaataatggattggggtctcatcatcattcactccttctatcggcacaacttcatcacctgaagtatagaggttctccactggtgggcaaaactcaatgtttccaccatctctgatcgaagtggaagcgggatttgggaggagtaaaatagattgtcatgctgtggggtgatcgaacctatatttatataggtcattcttctgctacgaccaaaaactcttggaattgataaggtgttgcatatcaatccatctcgggggaatcggctttgaatgtagaggtacattgcatgctctcagaattggtgtcacaactcctctcacaaccattcttcatggtttcttaagtccctttagcccatcctctgtaacccagcaggtgctcgattaggtagaatgagaccaaagcgtttgtctgatctccagctagaactgtaccatctgatgttaaaccaagcaacttttgcagcgctgtctccatcaactctagttctccattaacgaaggttccattcctctctcttgcaaatagcgcactagccaaggacctatgaaagtttctaaccacccgactccttatttcgttgctcttggccctagaggatgaaaatccatgcttagacccaagtgtggcccagaatgactgaagctctctcttgtcaaaacgatgactcgtgtgttttgtacttggaaatccatacatcagctcaagatgctcgattggaagccgatactctacgtcatacacacagaactccaagtatcccaaacttccgtctggcctgatttcatcgtcctcttactctccatataagaacaattccacggataaaagaaacttgatggtctcttcctcatacccctccattggccgaaacatgtgaatattcaagctgcactgcttaaacatatagtctacatcatcatagatgccgagtctctccacggtctcgggatgacggtatcgagttcctaaaaactcattgcgtttcagcagcttgtagtactcgtttcgagttgcacacttctcagattgatcatctatttgatcatcaccacctcctttgtttgatcatctttctcagattcttcatctaccagttccaacctcctccccatgggcttcattcctcgagtgatgtctgccttgttcctcgaaaattcccttgcagaggacttactcgaccttcgggatcgagtatttctagcgggagagctgaaagtttcttcttcttgcatcacttcctcctcttggcttgattcactgtggtcaatctcgaaacttgcttgttcgctcctgctcgaccccatgggtgatggttttgtaagtcctcgagctgctgcatgtgaagaaggtgttgggtacctcttcgatggggagagagctttgttccaaatccttgacaaaagcgagcgcatgtttgtcattgagaacaaaagtgggagaaacttaaaaccaaaattcagtaggttaggagattagacaatggaggaaacaaatgaatcgcgaaaagtttttgataagaaagggaagtgaaggaggtaaagagtgagaattataaggatttgagaatgctttggtatgggaggtggagagatgaggttgttgagttcgggaattgcaatggggggaccaaagtgattattgggggggggggggggacaagaagacaaagggacaacagcgtttcaatggaggcgggtcacaaggcatcggtgtctacgaagagggtgtctttggtttcttcacttgatcagacggtgagaaatgcttcatctttaagcactcgatcaaacggaccaaaatgaatcgcaagaaatcactcgatcaaacggtgatgatgcttctctcatttgatcattcaaatcaacggctcaaaacaatcctcctcattctactcgatcaacggttgagatctttcttgacttggtttgaatttactcgaccgttgacttcataatgatcaatgaaataaacctgaaacacttaaacaaaaacatcaaaaataacaaggaaaatagatagttatatacatggatagacatgggatttcctcccaagcgagcttgttttaagtcactaagcttgactctttcagagcttagttagaaaagaggttgaagagaggaacagaaaagtcttcatcttcagtggttgaattttgagtgcttgaatcatactctacatcctctctaaagatatggtaggatgaatactcatttgatttttcttcaaagtaagcttctttctgatcagcagagtagtcttcttcttctgaaccaggctcctttaaccaatcctcaaattcaaaactggggtagcctttaaccatttcttgaagttccaagattgtatggttcagtccttccatcttgtaagttagctccccaatggtatcctcttgagctttgtattctatcctgagttccagaagttcttcagcaacagaatcatgaatcaaatgttcttcttcagcataggggttggtgggttgtttaggcacccctggagaataagttggaatagggatttcctcctcactcaacaacttgctctgtaggcttctttcctctaagtgaactcctttctggtcttttcgtgcaaaccattctgttgtgaaatcttcgtcctccttgatagtagagtccttttaagctccttctgcacctgaaaacacaccaaaacatgcaatgtgtatgcaagatgatcctaaatgccgaagtatgcaaaataagttaaaatggtgcaaaatgatatgatacaatgagcaaatgcaaagcttaatgatgataaatgcacacctaaaatgagtaaaatacagtgttatcatttttaaatacaagatcttagtttttaaatacaagatctttgcaagaaacaagcgagaccaaccagatgcaactaatttgctaccgctattactcctcgcaaattgcgactgttttgcaagggatttagttcgttgcaaaatttgcaagggacttactaccgatattaatttgttagacgctatttgcgagaaactgctattcctcgcaaatctctcggtaatcatgatttgcgagggattacctacgaaatgttccgtcgcaaattagctgttttcttgtagtatatatccctaatcactaaacatgcactaagatcaggtttgatatgttcacctaggtattaaaaccagagctatctgtgtttaaatactcaagcccatcattgatagttcagataatatattccctctcgaatgctacctattacatatgatcaagttctagttagctactctagaactagcattaagaataattaagatgaagaactctaaagataatcctaatatgttatcaatctactaaatcatctaaattcgtaatgagaaaccccaaacccaacaaagagattactcaaacatggagattgaagcaaagaacatgatagaataagaaatcttagaagaacttaaaaagagaatagagtttcgaatgatcttctataaagggatttttacagtgttttgctcccaagaagaaaatagaaaaggaaattagcctctcaagcttttaaagaaaaattataaaagttaggtttaaacattgaccttaaaaatctaaatattttttttttgagaaaaataaaaataaaagttcctaaaaacgtgtagggaaaatagggagaaattctgaggcgaatctgcaaatcttcaaaatttcatagagacgcgaaacaattgttgttagatattggtgtcgattgtcgtcatgggtggtgtcgatcgacacctacgctaattttgatctgtagatggcttttgcagcataagttctcagtttttctcgagaatgctccataatttccaaatacattcgaaacctgtaaaaatctgaaaaatactaggaaagactagaaataacaaaaagactctaataactataccaagatcatacctaaaatcagaaaaatttgaggtatataaaaagggatctggaatatgttgaataactaggatgggtacgtgaaacttaatgctaaacctagctttaaaggattcagttcgcctcttgaggtaagtgtttttatatttggtatgagtataaaaaggaaagaagattttatgatattaaatgtatgtttttttttgtaatttgtagattctcgcctatgagtcttttccacttcttggattgaaatttagagtatttgtacgagcagagaaggactgtccaaggatgtgcatgcacaagtttaaaggaactggcttgaaaggtttttcgtttcaagaaatatgtaaagagcttgggaatagtacgataagtttctgtgaatctgcttagtaatttgaggatatgtaatgagattgtgccgaagttaaatgtatatttttcacaagatattgatagcatctcggaaccaaactctgatgagaagtctctgcttacgcggatcgtagaagatcatgatgatgatggcctaggttatattgatataattgttgacagttggacagaccgtctactagtacggaagaagaatattttttggaatgatttgtaccagatggacttagattctcgacgtgtcattgaatctgaagtccgtagaaatgaattccctggaaaagaagtctctcggaatgaattccctacatatgtaggccctgatctagctacaattcttgcgtctattaagtcactcactgaggcaatgaccagaggctttgagaacatgacacagaagcttgctgacatgtatgtaagagtgtaagctcttgaattgtatttggcagagcaaagagagcaggaaaagcaatatgggacacagacatattattatcagaatgaggttggttatgggacagttaaggaagcagtgcaaccacatgatttagttgtttatagtgaagtttcatgtctccacaacctagtgcccaaacaaatttccccaattgcgaacaagaatggaaaaatgaagaaaaacctggagtgtggacctgtaatagcaactggttagaagcaaacaaaggaagcatcccaacatattaagccacctattatggaactaaaagtgaagcgaaagagaaataagtaaggttgagagtgttgtagattgtgtggatgtttattctagataattctgggcacatgttgtttttatgttattttggacacatgtatttttaggtttgattgggaacaaaagtaagttaattatgtttacttagtgattgcttcaagtgttggactgggttcaacaagtatgtagagtacaactgagtgggttccactagtatttaaagtacaaattagttggttcaactggtattgagagtgcaactgatattgagagcacaccatacataacaaagagtacataaattaaacaattaaacatagcatacataatatcttaacacaacaaagaggtatccctaactacctcctacgtagatggtccttcagcctaccattctcggtttctttttgagctattcgatcctcaagatcaatgatttgagcacgcagttctcgcattgactgccgaattgattccaagataggactttggtaaacatgttgaattgcttatatctcgctttcaattttgctctgtaattgttttacctcctcatcaaccgcttgatcccaccacttattcaagtgttccccatcaagctagatttatattttacaataactttaattaacaccaggttcaacaagttgaaaaacataaccttagttgaactagttgattactaactgaaaaatcaagacataccccagtcacattcattgaaaatttgtatcgttttcttccttgataagtgccacttctacgcaatgtcagtgtcacaattcttccacaataacaccttctaggaacaccccaattaccgcccgctctaacccaactgaaatccacatttgcttttgagtcttagctttgtgtatacttgtttggcatgaatacaaacacagatcttacttcacagataacataaacaaaactaagatcttgtatttaaaaattaaaccattagaaccctaaatcgagagtcggctattacaaaacacgttgatgcataccaagtttagccgaatcgagactcatagaaacaaattgcaggtaatttaagaaagaaatctatgcctcgctgccgatctatatatcttgctcgaagaggaatatgaagagtgaagatgaaactataaaagaaaggccaaataaatagtgtgaaaccctagaatttttaaacatttttaaatttttcctatatcaatttgggacccacttaaatgtattttgttgcatcgcatccataaaatgtgggacctaaataatattcatttgtatttattaaatggaattatacacatagttgaccacttgtagtatcatacacatagttggacttttccatgttgtccttattttcagttagactagtatgtttataacttattaaaagttgaacacatgaattctctttactattttgtattttcaagattttcataaaatcatattcgttaaaatattatttcacttattattcttcatattagctcatctcatactatttattctagagagttgaagcggttgtttgagtttaaatatcattatccaaatttttaatttaatttaaatagtaataatataatatgcgtgaatataataaaccagttggtaaatattctataatcatacaaggtcaaatataatgaattttatgtccttcgtagatgatctagttgaactagttgcacgtcatatgccacattcaacattgcagtttaatggcaatttaatcgggttatctgaagatgtgttcaagcagatttaccgttttaactagttgaacttagcccgggccaaaaaattgtgttgtgtactaatgagacatgtattggactataattaagttttggcccaaaattttgcaactcttacttgacaatgcaagtggaatattgataataggttttttagtcaattatcctaaaacaccaatcatgtcgttgtagtattttaggttgtcaatccaaatggatgtgatgctaacaatcaagatgtgatcagaagtcactaagtcaagccaagcaataacaaattttggtgtgttctagcagtcctaaatgaacatgcataaaacagaaaatcaagcagaaacaataaaacactcgaccaacacaactcgtagcagagcactgggtgtggtcgagtgacatgtcgagtaacagacagaaaatgtaacaggatactcgactacatagtctgttaccagacaactgggtggtcgagtatcaggtcgagtaacagtaaagaattgcagaaactaagcaacagatgacaagatgcagtaaacagcagtagagtaaccaataaaatcaatcggataaagaattttcgaggatggggtaattgagtagtttcgtttcctcagtttacaggtgattgacatgctcaataaattatccctagacaacaagttcattaaccaaatctaagtgccaccgcaacagagaccctcaagttaacctagtcccagactcaatcaccattgacgagagctaacataacaggcattacgaatcaacaagttaaagccaaaacgctccctgcaaccaataccttggtacagggccacgaatctctggaattagtggttcagacatttcatcgaacaccttttgggcgcggaaatgtctgggctcaaattccagttgatcataaagcaataggcattaagaacaactaatccagaagggatctatcaatcaatactcaaccacctagcatactgagaattctacactactctaacccatcctcagaaacctattcactactcagacatcatagcagaaagcataaacgttgaatggaatgaagacatgataacaacagtgtaatagcagaatgataacaggatgaacaacagtaaacgaaatcaagaacaaatactgaatactgaatagataaagagaaatccggattataaaaggtctagaacacagtgtctgcggaataaaactagataaaaacttgttctcgaaaatgttaaaacatgctacttatagcaaaatattctgaaaccctaatactcaaaacgacgcagtattgggacggattaagaactgtactcgaccccggtggtcgagtgagaggtcgagtgaatagctggagtcttcttttcttccttgtgctcgagtgtctggttgagtgcggaaaggagaagactctgaagcccgccatcgagtaggtagtcgagtggtggtgatggagatactcgacttcttggtagagtgacttgatcgagtggtgatctggtaatggaggtgaagatactcgacctcggggtcgagtggagtgatcgagtgatggtcaggtggtggaggtgaagacactcgaccagggggtcgagtgatatgatgaaatcgtgaaattccctacttgacatgggggtcgagtggtctcttgaggtcttgaagcttctactctacctcatggtcgagtggtttgacatgatcaggtccgcttcttccagttagctcgtcaacagctccaaatcacctgaaatcaacacaaatatgcagcatgcatgcaatcctatcctaaacatgcaaagtgatgacaaatgatgaaaaatggtataaaacagtgatgatatggtgctaaagtgatgacaaatggatgctcaaaacatgcaaaatacacacttatcaaatatttttttaattttcacacctaacaattcgagacccattaaaatgtattttgttgcgtagcatccacaaaatgtgggatccaattaatattcatttgtatttacgagatggaattatacacacacttgtccacttatactatcaaacacatagtaggacttttcaatgttttctttatatcagttggcctaatatgttaataacttattagacgttgaaaaaatgatttctcttcattgttttatattttcaaggttttcatagaatattattcgttaaaatattgttttcacttattattctttatattggctcatctcatactatcgatttcttatagtagaaggggttgtttatgtgaaaacatgttaatccgatttattttcattaaattaaaatagtaatagtataatatggattaatataagggaactttactcaaatagaaaagaaattaggtgtattcaccagaaccataaggaacttttttttattactgtcatatttcggccttttttgtatatccattgtgcccctactaaacgttacaggaaaaaatgtaaatacaaggaatgccactgccacgtcagaaatagctgatgtggattaatgaactcatccataaggcgatacattggcagatacggctgagttacggtatgttgcggctgacttacgacaaaaatatatgagttatgacttatgagaaaacggtagaattatgagtataactcagcctacgttatgactgatttatataagggatctgatttataaaatttgtttgagttatgaaataacctagcctacattacgactaagttaatgaaatttctctaatttatgagaatttcgagcataaccctgacaacgttaggctaagttatttcctcgacacgactgagttatctttttccggctggctgggttatcaaagacggcttagttatgggatgtcgttacggctggattaaccaataactcacgcttgttacggctgacttagttggaaaagattaattactaaaatagcatacagttacgaccgagttaataaacgatatggctgagttattgattgtcggttgagttacgattctatacggctgtattaattaacttggcgtttttttcgtttttcaattattgtaatagtattcatgttgcgactgacttatagatttgtttgatggcttatttatttaggcaaatttacatctttgtttggtggcttacttgccacttcatcaattaaaaaatgacgtcggatccaacattcaatgtcatcatcatcaaaggacaaaaaagagggccaaatttttcaactcgtcttcttcacctgagtttttcacatcaccgaaactttttaattcctcatcgtctttctcattattcttcaatttctttcatccatctccagatatggttgattcggttccggtaattgttgtttccggtaattgggtgtagaaacacaaatacatatttaacaccgatgaaagagggtgtagagttgtggtagatgcggaaacaacgcacgacaaacttgtgaagttggtgttcgatgataaagttagacgaaatgttgcgtctcttactgttttgcgcaaatttacatgtaacggccgagttatatgtttaaggaaagacgaaaggttcggtaaatttacatgtcacggctgagttatatgttccaggaaagacgaaaggtttggtaaaattacattgcggctgacttatatgcttaaggaaagaagaaaggttcggtcaatttacatgtcatggctgagctatatgttccagggaagacgaaaggtttggtaaaattacattacggctgagttatatgcttaagggaaaacaaactgtttggtatatttacatgtcacagctgagttatatgctcaagtaaagacaaaagataggtgtaaattatatgttatggctgagttatatgtttcagtgaagagaacgttcggtaaattacatgtcacatctgagttatcattcagggaagacgaaaggttgtctaaattatatgtttcggctgagttacatcacgttacggctgagttacattactttacggctgatttataatacagatcggaaaacaacatatttttgggaaagacaatatgatatttattggtcaaataacaacagtcaaattaaaaacgtaaaaatatgtttgagggatacataggaggaagactaaaccgtatgaatcaaaacatagatagaagtacaaatgtctccaaatagatcgattgagaggaagactaaactaaagacatgtaaaataaaagtaaaagagtagctattcttgatttcaactcaaacctgtaacgaatcgttttaaattccatagatctgtttgatttgggttttgatttttgatgacttttgatttgacgaagcttttgatttgggaccctatggcaaatgttgtggctgtgagatctaggaagatccagcgcaatccagcaatttgaagatctatgttcatgttgtacccaagttagttaaagattattagttctaaaagttttttggatttggagacaaaaaagagaagaggggaaataaagtgagtttgaggagtgtgagattggtgatgtgtgttaatgacatggataatcaaaattttatttattatttttaactaaaaatgaattaaaaattattaattaaaaaaactaatcaaggattttaaattgtaattacacaaatgctcaaaacatttgagtaattaaaaaaagatgtatgatattttaggaataaatatacttttctatgctatatgagtaattaattcttaatataataaataaatctttgtttgtaaatattctattatcatgaaacgacaaatataatgaagcttatttcgagaaaagatgaactagttgaattagttgcacttcatatgctagattcaacatttcggtttagttgcaatttaatcagattatctaaagttgtgttcaaaccgatttgccttttttgctagttgtaatcagccgggcaaaaaaactgtgttgtgtactaatgggccagatattgggctataattaaggtcatgcccataattgtgcaactctcacttcacaatgcaagtggaagatttattaatttttgggaaacatccagaaaaaacctccatttatttataatatgcctgtttaatacatgcattatgtaactttgcccgtttaatacttaagttaatttttatgtcttttaaaaaccttcatatttttaaattttggcaaaatcagacatccgagttaacggccgttagcactgctaaccacagttaaaatttaaccctatgatgtttactatgtatatacaattgtttttctaattaatatgagcatattatcttagtttggtggttatgtgagagattaccatcctcatcaacccgagatcgaatctcatatccaacaaatattttggattttgtattgtattttttactttcaaaaattccttttttcacttacaaatcaaaatcatttattttgcttactaattgaatttttagaattcaacatatgcaatgaaaatgttctcgaaagctcaggcggatgtttgatgggatgattgagccagaaacttcggcggatgaggctgcattgtcatcgttggtttccggtggaattggattaggggttccatgattgggtgattttggttgatttgggggatgagtatcagatgatggttgagaaggtaaatgttcgcccacgtgaaattgaagatttcaaattgatagaattagggttttggtagcttcaaagacgaagagaaagagaatcgaaaacctaatcaaatatgggccgccgtcagattaaaaaaaacgtccaaaaaacggttcggatgtgggaatcgaactcatgttcacgaggaataaactctcacataaccacctaacttagacaatatattcgtaacacttagaaaaacaattgtatataaatagtaaacatcatagggttaagttttaactgcggttagcgatttcgttaccgctgttaacggccgttaactgggatgtctcattttgccaaaaattttaaaaataaaggtttttaaaagacaaaaaaattaacttaagtattaaacgggcaaattaaataatataagtattaaacgggcaaattaaaaataaatcaatattttgtcgggattttttcctttaattttgtcaccttacaatttgagacacacttaaatgtattttgttgcatcacatccacaaaatgtgggatccaattaatattcatttgtatttacgagatggaattatatacacagttgtccacttgtagtataaaacacatagtaggacttttcaaatgttttctttattttcagttggattaatatgttaataacatattagaagttgaacccatgatttctctttattattttatattttcaaggtttttatagaatcatattcgttaaaaaattttttcacttattcttcttcatattaactcatctcatactctctattccttaatagtataaggggttgtttatgtgaaaagatctttatccaacttttttttattgaattcaagtagtaatagtataatatgagtgactataatatataattctttgtttgtaaaaattctataatcataaaacggtaaatataatgaagtttattttgcaaaaagatgaactagttgcacgtcatatgcttgattcaacattcgagtttagtagtaattactcgggttatctgatgatgtctgttcaaaccgatttaccgttttctttatttgttcacagccgggtcaaaaaactgtgttgtgtactgataaatgttcaaattaacccaacactactctctcaaataagagatcagttgtaatacttagggatcgattttcaaaaagttttcttgttcacacaatggttatcttgtctaggttaagctaaacaataagtatggtttaagagaataaaacattaggtttagggaagttcttaggaaacagatgattagtagatctaataatgactaggatgttaacaaatcgttctcgaactcaaatcactaatacagagtaaccgacgttagcccgcattactcaatattatcaagtttgataagttcacctaagtagatagaccgatcttagtacacatctaaatactcgacacatctttgatagttctcgtaataaacacctttgtaagaagagttagcataggtccttgtgaaactattgtaaggttaagtcttctcaaaagcaagctttggagtgatacctgaagattttggttgcctccaaaacgattaccactatagttttcctatggcggaccaaacttcttgtatccctaaccatcaatgtagaacacgccttcctctgagtctgccgtaggctcgatagtctctacttctacaacaaagtgaacttgcttcttccctgtaagtaggctatgctctgaatcatgcttagcatttacctcaaccatctggtttcttgaaacaactactgctatcttcttcctctcgaagtctgcattctacatattgttgctacatgcaagattctctatcaaagttgtagcattatatagctcaaattgccttaagcttacttccacaaataagtgatcgtcgttagcacttaagggtcgaattccacaaaactctcagatcacacaatagactaaggttatcgaattaagctaaacaaaatataagaaaataaaaagaaagcaaaagcaagcaatagcagattatgagatggatgtaaactaagataattaaagcgttaggcttaggtattctcagaaaatagatgacagtagatctagaaatagctaggttgttatcgaactgttcttaaactgaaactctaaaatttgaataaccggtggcgtttcgtgaaattcactatgcctagagctaagatttctggtggcttgtcgtgaaaccttatacctaaacatgcatgctaaacgagtttgataagttcaccttagtagatagatcgattcttattacacacctataaatcaggctcatcaaatcgtaatcctggtaacagataccaatggcgggtatatctattatcgggaatcaagttctaggtgatcaatctaaaactagcattaggaacaaccaaagatgaagaatcctacagataacctagcaagggggcaatcaactaaatcatttataaccctaatgagaaaccctaaacctagcaagaagactactcaaacatgatcatagaagaataaatcatgtttgaataacaaatcaataatgaatataagtagagaatagagtaagaaagatcttctttaaagggagtctccatagtgttttgctcccaagtacaaaagagaaaaggagattagcctctccaagcttaggtctaaacaatgacttttaaaatgcgattttagtcttcgtatttcttctgcagcataagttctttgttttcctccgggatactccattatctccaaatgcatcccaaacttgtaaagacctgaaaaagactagaaaagactcaagaaataataaatagattctaaaacctaaatctaaaacataattaacaccactaaaaatagggatatatcgaatgcttttgcaggtccttgagtgaatgtagaaagcttgttgcgcaacttttcagacttagcatcgttataggtccttgtgaaactactctacggataagtcttctgaaaagcagtctttggagtcacctaaagatttggttgcctccaaattagttaccactgtagtttcctagtggcggactaaaattcttatatccctgacaatcaatatagaacatgccttcctcttaatatgccttaggctcgatagtctctgcttctgcaacgaagtgaacttgcttcttccctgtaagtaggctatgctctgaatcaagcttagcatttacctcaacaatttggtttctcgaaatagctccttctatcttcttcctcttgaagtttggattctacgtattgttgctacatgcaagattctctatcaaagttatagcatctacaagatacgtggtgttgaagttaccattgttcaatgagtctagagccatctgatatctccaatcgactcttctgaataaggtactgatatatccctattttcactgattttatctatgttttatgtataggattttaagtctttatgttatttctcgagtctttttagtgtattttcaggtattctatgcaatgggacaacaatagagatggggagacattttggagcaaaagataaggtcaattttcagttccagattcagaggagtgtcgatcgacacactacttgggccgatcgacaccagttttggcccatcaaagtccatgacaccttcaagtttaaagaagagaaactttgccccagaagacttccctatttgcattattagtccctaaatgttttatagggtttttatattgtttttagacctaaggttctctttatcaagttcttttcaaatccctattttgagagacataagctattcatccattgttcgtgagagattcattaagttttcaatacaatgaagagatcctttctttacttatctttattgctgtgtttatgctttttatctcaattatgttatttgtttcattcaatatgtttgagtagtttgcttgttaggaatagggtttctcattagggattcatatggtttagtagatcgcccccctgttaggttatctgtagaattcttcatctttgattattcttaatgctagatctagagtaattaactagatcttgaatccaaacaatagatatgtccaccatatctttagttggacctattatttgatgagcctggtttataggtgtgtaataagaatcggcctatctaataaggtgaacaattgaactcgtttagaatgcatgtttaggttaaagatctctcggcttctccggttattcttagctataaacatagagagtttcgcggaacaccaccggttcttccataattagaatttgagtttaagaatggttcaataacaacctcactttcattagatctactaaccaatagtttcctaagaataccatgttcctagctctttaattaatcgtttacaaccaatcaatctgctgttttcttacgttgttttcttattttttcaatcatatcctgctagcttaatcttgacattgaattcattgagtgaacaaaagaactttgtggaaatcaatccttaaatactgcaattgatctcttatttgagaaagtagctcttagggtaatttgaaacgtatcatatttagttgatatatccatattttcattgattttatctatgttttaggtataggattttgagtctttatgttatttctcgagtctttttagtgtcttttcaggtattctatgcagtgggacaacaatggagatgaggagacattttggagcaaaagttaaggaaaaggaagctaaggacgattttcagttccacattcagaggagtgtcgatcgacacactcttgttctcgatcgacctagtttcagcccagcaaagtccatgacgctttcatgtttacagaaaaggaaatttgccccagaagacttccctatttgcattattagtccatggacgttttataagttttttatattgtttttagacctaagttctcttttatcaagttttttgcaaaaccctattttgagagacataagccattcatccatttttcttcagagattcattgagttttcaatacagtgaagagatcctttctttcccttatcttatttgctgtgtttatgctttctatatcaaatatattgtttgcttcaatcaatatgtctaagtagtttgcttgttaggaatagggtttctcattagagattcatatggtttagtagattgccacctttgctaggttatctgtagaattcttcatctttgattatgcttaatgctagatctagagtaattaactagatcttgaatctagacaatagatatgcccccataggtatctgtagttgaatctattatttgatgagcctggtttataggtgtgtaataagaatcggcctatatattaaggtgaacaatcgaactcgtttagaatgcatgtttaggttaataatctctcggcttctccggttaataatcgcagaagggtttggtgtcgaatgacaccaacacggtgtcgagcgacaccaacacggtgttgatcgacaccttcgggagtagaacgcagatgcaatcagtgtaggccaacatcctttccatagcatcctttccatggcttctctcatgaactgccaatggaccaaagcaaagtagccaggcctactaaagcaaagtagccaagcttaagctcataggcgttcctttggtatggtgggggtacaatcgctgaacgattagcatagaacaggtcaggcgagttcgattgttcaccttagtagataggccaattcttattacacacatataaaccaggctcatcaaataatagatccaactacagatacctatggtgggcatatctattgtctggatttaagatctagttaattactctagatctagcattcagaataatcaaggatgaagaaatctacagataacataaaaggggggcgatctactaacctatatgaatccctaatgagaaaccctattcctatcaagcagactactcagacatattgattaaagcaaacaacatatttgatatagaaagcataaacacagcaaataagataagggaaagaagagatctcttcattgtattgaaaacttgatgaatctctgaacaacaatggatgaatggcttatgtctcttaaaatagggttttgcaaaatgcttgataaaagagaactgaggtctaaaaacaatataaaacccctataaaacgtccagagactaataatgcaaataggaaactctttttggggcaaatttcctcttttgtaaacttgaaagcgtgatggactttgctgggccgaaactagtgtcgatcgtcacaaggagtgtgttgatcgactctcctctgaatctagaactgaaaatcatttttagcttccttttccttagcttttgctctaaaatgtctcctcatctccattgttgtcccactgcatagaatacctgaaaagacactaatagagaaataacataaagactcaaaatcctatacctaaacccatgttatttttctagtttcattgagactccctaaacccaacaagatgattactcagacatgataacagaaacacaaatcataatctgaatagtttgaattgatgaattagaaatagagtaaaaggagttcatgatcctctctgcagggattgggttcttctctccaaaagtgtatcttaatatccaaacaaaacttaggtctcacaatgaccaaataattagatatattagtgactaaaaacgtgcatggactactttgcaaataaggaacacttcggggcttctcaaagacttggcagaaaacagaaattccctcagccgaaataagggtgtcgatcgacatagtctcagattattatatgtgagtttaagataggaagtttgtgaaatcaaatcaggtacctaggagttgcaccttgttgaaacagtgatgcgatagtctctgcttctacaacaaagtgaacttgcttcttccctataagtaggctatgttctggatcaagcttagcatttacctcaaccatctggtttcttggaacaactcctgctatcttcttcatcttgaagtctgcattctacgtactattgttacatgcaagattctctgtcaaagtggtagcatctgcatgatacgtggtgttgaagttaccattgctcaatgagtctagaaccatctgatatctccaatcgcctactcttcagaaggtacctaggagttgcaccttgttgaaaccatgatgcgggaattctctttggtactccttgaagcgaaactaggtagccatgaatgcctttgtatgtccttgagtggatgtagaaagcttgttgcgtagctctttagacttgtatcatcataggtccttgtgaaactactctacggataagtcttatgaaaagtaggctttggagtgaaaggtgaagattttggttaccataaatcgaataccactatatttttcccccatggcgaaccaacttcttttatctctgaccatcaatgtagaacacgccttcgtcgatagtctctgcttctaatcaagcttagcatttacctcaactatctgatttcttgaaacagctcatgctgtcttcttcctctcgaagtctgcattctatgtactatttttacatgcaagattctctatcgaagctatagcatctgcaggatacgtggtgtggaagttacaattgctcgatgagtctaaagccatatgatatctttaatggactcctttgaagaaagtacctaggagttgcacctcgctgaaaccgtgatgcagccagccttgagtgcttttgcaggtccttgagtgaatgtggaaagcttgttgcacaggtcttcagacttagcatcatcatagaagtttttcaaaaacgcaaccttgatggttctccaagtggttagcgtaccggctttcagctgcttaagccaagaagtggattccccaacaagtgagtatgggaaaagcttgcatagtaggtagtcttcagagactccattacctttgatggtcagaactagatcttcaaagcgcttgatatggtcaatatacttttcatgagataagccatggaaagggtgcttgccaactaaagcgaagtagcctttcttgatctaatagtcgttcttaaagggggcggtacaatcgctgattgattaacatataacaaatttggcgtgtttaaatccccaagagttcgacgaggttttgtagctggctaattacttgcgtctggaattcgtgggtgtcgatagacacctagctggtgtcgttcgatacccagctggtttcactcgacaccaagccctgcttcgttgcgagcagcaagctgcgcgttgagtcgcgcctattcatctatctgattctcagctttgatgattcaatgatcatccaatctttgtccagtctcatttaggcatgcccatcgtcatctcttaaaactccttatccattagctctaacttatctgataaccattggtactaatctctgagtttttcggttggtgcgttcttgtgtacgcaaatcaagtattgacagattgacgaggtccttatcttttgtgattcttgtgagcctatacatacacatgaaacacagaaaagaaaaaaaaaaacaagaaaggagtaggcaacaaaaggaaaataaaaatttagacaaaatctcgaaagcaaaacctaatggtcattcccaagaactttggcaacgacgccaaatttgataagtgttcaaattaaccctagactactctttctctaataaaaggtcaattctaatacttagggacttatttccacaaagttcttttgtgcacacaataggttatagtgtcgagattaagctaaacaataagtaagaaaataaaataaaacaaaagctagcaatagcagattatgaggatgtaaattcaagatattaaaacgttaggtttagggaagttctcagaaaatagatgattagtaaatctaataatgactaggtgataacactgtattttactcattttagacaagtatttatcatcatttagcttagtgatcactcattgtttcatatcattttgcatcacatttagcttattttgcacacttaggcatttaggatcatcttgcatacatattgcatgttttggtgtgttttcaggtgcagaataagcttaaaaggattctactcgaccctctactctatccaactaggagggaagcagcagagcaatctactcgaccagtttactcgatctagacagctacagaggaggcaacaattcacttgatccctttactagatccacgcagccatagaggaagcagcagatcggtctactcgcccctcttactcgatcctctactcaaccccttaactcgatcaagggcgaccaactctacaagatttgttgatctattaaagcgtcttcagatcctcctcattccccactcaaccagacatctgagcatacggataggagaggaagaagcatctactcggagcatggaggcaaaggcgcagactttgtagcaccctgtttactcgatccccaagatcgaggaatcgtccaaaccgcctcaagtctcttgtcttctagtgaatctagggttttcaacatttagtataaatagatcactttggggtttgtccaaaggatttagcttaaatcctttagtttttctttgcgttcttgaatctttaaaacttatttaatcttaatctatttcgtttttgcatttagttctttgagtaaagttgtttagcttgtttagatctacattttagtatgctttcagtaatttctgggtttgtgttcttagttatgttgcttgagtagtgattagggttcttgaggatggattagataagggtaatctctaggttagtcaggtggttaagattaggttagatcccttctggattcgttggcccatatgcggttttcgttggctaatgtggaaattcgaccataggtatccagcgtccaaaagactatcaatggttgcatgatctacgaattccagatatttgtagactatagaccaagagattagctagactacttattggctttggtagattgttgcttaaaccctgctctgctatgtttcatcaacgagagttgagattaggaagtggtagagttatgggggtctctgtcacgagagtggattgacccggtttttgaatctatcgtctagggtatctgcctttcacctgctagccacctgatgaaacctagagttgcccttatcaatgaatccatccttaggacttctattcttcttagatttatttgtattcaccccctgattgcacttttatttacctgttatttgtgtcacctgttgattgcattttagttcttaatttgtcacctgttggttttactcgacccaatgatcgagtagggctcttaaagttctcatttttgttgtttgaatcctgacctaggattgtttctagaaaccaaccatctctataatctggcttgacttagttgcttttgtacacatcttgattgctagcaataacagtggactggactgacaccccctatacgtgcatcgacatgttagtgtttgtaggggagttgaactgaacctcacattcagcatatataagtaggcctaaaaaaaaactacttatcaatttggcgccgttgccaattcattgttgcattgttacattcaagatatcagaaaaagttaagatcaagttcttttacatttatcaagttactaactcatcatttcgtctgcttgtttttgtggtataggtactaatctttgtgcatgcaaactcgatccaaaggttctgcacacctactaccattcagagacagaattgatagaatagctcatgagttacaagaaaccaaagcaaaggcagcctgtgatcagcaaagactagctgctatggaacaacagaacagactagttgatgttcaagacccaccaaatattgatcaaccaagaaacatttgtgttggtgatgccccaaggaatcatcaccaaagacaagggatagtgcccccaccagttcagaacaacaactttgtgatgaagagtggtctcatctcaatgatccaaggaaacaagtttcatggcttacctatggaagaccccctggaccatcttgacagctttgataggctctgtggccttatcaagatcaatggtgtcactgaagatatgtttaagcttagactatttcccttctctttgggacacaaggcacaccactgggagaagactctgcccccagactccgtcaactcatgggacgattgtaagaaagcttttcttgccaagttcttctctaaaagctacactactcagtgcccccatcacggtttcaagaaagcttcattaaacagaggagctttaccaaagatcagaatgctactcgacaccgcctctaatggaaacttcctggccaaggaagtagcagaaggatgagagctggtcgaaaatctagcacaatatgatgggtgctacaatgaagactatgatcgcccagtgagaggaacaggaggaactgaggataaactgagcaaagatatcaaggctctgaatgaaaaactagacaagctgttgcaggctcagcagaagcagatacactacatcactgatgaagagcacttccaaatgcaagaaggtgggaatgatcaaactgaagagctgtgctacattcagaaccaaggatggttcaacaaggggtacaacaactataaacccaacccgaacctctcctacaaaagcactaatgtagctaacccccaagatcaagtgtatccaccacaacaaaatcagtctaagccatttgttcagtataaccaaggttatgtcccaaagcagcaattcaatggaggataccaacagcaaaatccatcaccagggttcactcaaaacccacaaaaagcaccagcagctcaagatcctgaaattaagcaacttattcaacagatcattcaaggacaagctactggagctatggcttttgacaagaagatagctgaattacacaacaagatcgattttttcttacaaagatctaaatgtcaagtccgaagctcagaattccaaagtcaagtatgtggagagtcaatttgcatcaacctctactccgaagcatcctcagcaacttccagggaaagcagttcagaatcataaggattatgctactccaaatgctatcactatccaccaagaagatgagtctccactaagtcaccagactcccaatactggggacagtatgtttcaagaagggggggattcaactcaaattgctgcacccgccacccagcaaatcatctggactgtagagcacacacatttgctgaatactcaccattttggaaaaaatctcaaaattgaaaaattcaagaaggatcagaatcaagagatgattagtagtgcctccacccaagaaacatacaagaagaaagtcatccaagaaaagcttgatgatcccggttcgttcactctatcatgctctctaggaccattgacattcaataggtgcctttgtgattttggagcatatgttagccttatgcctctctctacagctaaaaggctagggatcatggaatacaagttctgcaacttagctttactcttagctgatggttctgttgcacatcctcatgatctaatagaaaatcagcctgtcaagattggaaatgttgagatacctactgattgtggtaatggacatagatgaagaaggaaaggatcgcctgatcctaggcagaccattcttagcttcagctagagcagtcatagatgtcatgaatggaaaaattgatgtaaaccttgaaaaaggtatcaagatgagatttgacatcaacaaggcttcagggaaatcaacaacaggaggtcagagttttgggattcaggacatggatgttaatgaagaaacagaagctggaaccccaccaagagttaactatacttctaaactcagcaagctaaagagaacttttgaccacaagaagagagcaatagaagggttagctcagactgaagatcctaaaaaagataactggtatgagttgagaaaaaatgtaaatggcaaagcagagtcatagagggattatcttcaagggtgatgaagctgaaagatcaactatggatgtttgaaaaaagagaaaataagttttttatgagtattgatccagagaagatagaaactgcactagctatcaaggaggacgaagatttcacaacagaatggtttgcacaagaagatgagaaaggagttcacttagtggaaagaagcctagaggacaagttgttgagtgaggaggaaatccctattccgacttattctccaggagagcctaaacagcccaccaacccctctgatgaagaagaacacttgattcttgattctgttgctgaagaacttctggagctctagattggatataaagctcaggaggatacaattggaaagttaactcacaagatggaagagttaaaaagcaccattctggaactttaagaaatggttaaaggctactccagttttgaatttgaggattggtcaaaaggagcctggttcagaagaagaagactactctgctgatcagaaagaagtttattttgacttaatcatgagcaaattcgtcattcaccttagtttccttggtttttgctccaaaatgctaccttatctccattctcgtctcaatccttgaggcacctgaaaagactctaaaaagattaaaaataacaaaaagactctaaactttatacctaaattatagctaaaaatagtgaaaatagaggtatatcatgtactaatggctcagatttacaatggctataattagggtccaacctgaaatttttcaattgtgagtttacaatgcaagtggagatttagataacccaaaagtgtttttagttgcgactgtttatatattcaaaatatttcctgaaaccatagagaccttctgcattcacccaccagaaaaaagagcccatgtaccgcaaggttcaccttggtcgtcgcaaaggaccccatgtagaaactctaactatgaaaatgatttggaaaaggagcctaactcatcgctaccctcatcctcccaaagcaaatcttggatatcgtcttcgtcaaaatccggatcatcatctttgccaaatcctgatcatcatctttgtccaaatccggatcatattcttcggagaaatattgttcttccaccagtcgttcctctgaaaatttttctcctgtattggagattatgcctcctaaagaggcggagtctattcggcgtgtcaagccactagcagcatggcttacgcctctctcatctgaggtaagagttatgatcaaacctctcactcatgcaagcaatagatccttatcttagttctagggccaaccctagagtttgacccggaagagagagacttgattcccggagaagttatatacctagaggctttccttttagaatgtgatagcattgcattcgtaaagaatcaacaatggtttttttgggtgagtgagtatgaactgatttctagggtttaaaagtttctagggttgtaccactttataggattttaagtctggaagtcaaaacttacacaattgaaattgtatttagggttcgtctgagggattatactttgcgagaatctcaaagaacaacataagctattatataccactgatggtattgttgatattattgatataaagatgtgcttgatcgtacaagtgtttagactactagaagaaaagtgttttgccttcaaagtgatataaccctattttcactgcttttagctacgatttatgtatactttttagagtccttttgttatttctagagttaggtcattacatatttgggatgcatttggagattatggagcattctagagtaaaacagagaatttatgctgcagaagcaatctggagacgaaacttgacgtaggtgtcgatcgacaccatccctggtggcgagcgacaccaatacctgacgccaattcaaagacgaaacttattgaagttttgaagatttccaagttcgacccagaactttctcctattattaaagaaggcccaacacgtttttaagacctatatatctatttttaaggtcattgtttagacaaaaacacttattatctattctgtacttgggagcaaaaccctgtggagactccttttagagaagatctttctaaactctattctcttcttgttttctacattgatttctactttaatcatgttttgttctttgataatcatgtctgagtagttctcttgttgggtttagggattctcattagggatttggatgaattagtagatcgaaaaccctgctaggataatatatttagaattcttcatctttgatcgttcttaatgctagttctagagtaattaactaaaacttgattttaggataatagataaacccgctataggtatctattactagaactatcttacatgagcctagtatttagatacggactagcgtcgatttagatacttaggtgaccttatcaaacctgattataatgcttgcttagttctagggatttacaagagagttgggatcaatactattaagcatagtgagtaatacggcacatcaccggttactctataatagtgatttgagttctagaatggtttgataataatcataatttactgctagatctactattctgatatttcctgagaatttccctaaactcgacgtcttaatcatctgaatctacaaccaattttaattgctttcttgtcttttattttcacaatattttctgtttagcttaattcgaaactgttagtttattgtgtgatttgagaactttgtggaatttgatccctaagtgctatgacaacctctttatttgagagagtagttattagaatttagtctaaatttttcttttactttgttactcacacgttctttttcttatttttcttgtgacatgagctaataggaattcgaacgcaacaactggaaagctaggaatcagtggatatgttgacacaaattatcagacctgatgctgctggagtcttacaagacaaatatggtcaggcatacaacgatgagggtcataaaatagatgaacagggcaacttgataccagaaatcgccgagggtgtcgatcaacaccaactgagaatgaagatctctaccttctctcaagaaaccgttgaataatttaaagccacttggatcaaattcaaaggatataagagagattgcccgcatcttggttttagtgatgttcagctgttaggtatcttctttagaggagttgttttgcataattagatggctttggatgcagctagtaacgggaatttcatgtctagatatccaggggatgcaacaatgttgattgaaagcttatctttgagcattcgtacaaaaatcgctgacattgtaaggaaaacgcaagttcagtatgctgcacatgttgatagttcagagaatatgtatcatacatgagctataataaaaaatctacatctccaacaccggttcagcaaactacaagcttcattcagaattatgcatcttcaatccaagcccaccctccacccgagaccagacctgcgaattctccaaaacccgatttcagctgcagaaagggcaaccaaacccaagattccttttcccaagagtcctaggaagtcaaaacaggagctagacgatgctagatgcaaagcgatgatggataaattgattgtagagatgccacttattgatgctgtgaagtcttcttctatgatcagacattatgtgaagaggatgattactaaggatttgcttactgagtaagctttgatgatgatttctacacaggttagcaacattattaagaacaagatgccacaaaaacttccagatcaaggtagctttgttctcaattgtggtatccttaacaagtgttgtgagcaatgcttgtgcgatcttggttctagtttcagcttgatgccacgatcagttgcactacgacttggtttgacagatttagagcctacgcaaatcactcttgttcttgctgatcgatttgtccgtagacccaatggtatcttatgcgatgtccctgtacaagtcggtactagctacattcctacagattttgtggttttatcttatgagaaagaacctaagtatcctctaatcatgggaaggcctttcttagcctcaaccgattccattattgatgtcaggaaggatagaataggcttgaatgtaggtgatcttacaatgtagtttgacatgaataaggtggttaagaagcctaccatcgatgggcagactttctatgtggatattatctcgtctctagttaacgatatctcatggagatgacacatgctgatcctttgaaacatgctctaatcccttcaatagacaatgttcccgacgggtatggtaagctgttggatagaactgagcatgtaatgcaattgattactcaagaggagttaattggcccatctacaaaagcagcaacggttggcgagtggagcccagaaaaagctcctaatattgatctaaaaccacttcctacaaggctaaggtacgcatttcttggtgaaaattctacttccatgtcattgttaatccttctttaaacaacacagagctcacttaattgctaagcaagctgcgcaagtatcgcaaagctcttggcttttctcttgatgatattacaggtatctctcccgacttgtgtatgcataggattcaccgtaaggattaatctaaaccctcagttgagcatcagagaagactaaacccaaatatcaaggatgttgtaaagaaggagatcatgaaattgtttgaagcaggaatcatctatcctatttcaaatagtgattgggttagtccactccatgtggttcctaagaaaggaggtgttacagatgttaagaatgataagaatgagttgattcatacacggactgttactggccacaggatgtgtattgactacacgaagctgaatggctgcaacaaggaaggatcattttcctctaccattcattgatcaaatgctggaaacgttagctaatcataagtactattgctttcttgatgggtactcaggattctttcagataccaatccatccagatgatcaggagaagaccacgttcacgtgtctgtatggtatttttgcttatcatagaatgtcgtttggtctttgcaatgctcctgcaatatttcagagatatatgatgtcgatcttcacatacatgattgaggatttcacggaggtctttatggatgacttttctatttatgggttttcatttgaagcatgcttggagaacctttgcaaggttcttgctagatgtgaggagaagaatttgattcttaattgggagaagtgtcatttcaaggttcacgaaggtattgttcttggtcagaaagtttcagctgcaagtattgaggttgataaagacaagatagcggttattacaagtctacaagaacccgatagcgtgaaatatgtgaggagttttcttggacatgctggattttacaggtgattcgttaaggatttcagtaagattgccaggccactaacagctttgctttgtaaggatgtgaagtttgacttcaattctgattgccatgctgcttttaatcagattaagaaaggtttagtgagtgctccaatagttcaagctctggactagaatttaccgtttgagataatgtatgatgcaagtgattttgcagttggagctgttttgggacagaggaaggacaatagacttcatgttatccactatgcaagtagaacacttgatgatgcactgcggaattatgcgaaaacagagaaagaattttagctgtggtttttgccttagagaagtttcgctcttatctggttggttcaaaggtaattgtgcatacagatcattcagcactcaagtaccttatgaagaaaagggatgctaagccttactacgatgtattcttcttcttcaagagtttgacatcaaagtacgagataagaaagggattaagaatggagttgctgatcatttgtcaaggatcaaggttgaagatgacattcctatcaattattttctacctgaagaaagtatgtacttggttgagacaagtttgcaggaaaatcctagcagtgtcaattcacgcgttgatgagagctgcagagaatcagtgtcgctcgacaccacaccccctgtcgatcgataccatcgcgtttcatagacagatgcttttgcacttccttcacagcccacaactatttcagttccctgtgataggtactcctccatctcttctcctacttatccttcgattacttctttagaatattcgaagtgtgcttcaccggtaaacaagcatcgagtttctcgagagcttgtttcctcttctgattttgcaggtaaaggagtgagtatcgatagacaccaccaccagtgtcgatcgacaccagatgcagcacatagccgatctgtttacacaacaccttggaaggcgagattgcagcacaagttccatgttcttccatccaagtcttgaactacgccaagtcaaggtattgactataaacaagcgcttagttggaggcaatccacttgtatgatttttctatatttacgcttttcttttaatttctttttcgctaacttcggatttgaatgcgaccggagactgatatgtccccgtttttactgatttctaacacagtttcagaatgttttttagagtctttctagtcttttcgtatgttttgagtcatttcaggtacactcacacatttgggaactatggagcacaaaaaggaattttggaagcttttcagcaataaagatcttgaaggacgtttttcaaaagctggtgtcgatcgacactcttatcgctgccaagagaatattcgtttttcaccaagtctttgaaaagccctaaagtcttccttatttgcaaaataatccctgcacgtttttagggttatatacctaattgtttggtcattgttagacctaggccttgaatggctgcagtttttggcatagtttttggattttgattttgcaaaaaccaaatattatccaatcatgattctacaaaaagtagatttcctaaaaactaggaaaacctgattttaaaagattttgcctatttgttcatagaatctaaaaacccaattttatggggttttctaacaatttacgtcacatttttttcaagttcttaaatattattttaaatatgctattttcaccatttaccattcattaaatgtatacattggttttatttaccaaacctatgtttatatgcaactagattaggacttttaagttttttaaataaaattagatttagcaaaaagatacattaaaattttatagggagtagaaactttatataataaaatatacctatgtttttgttattctgcatatttaatttttattatcattatttttgtaattttaaaacacaaaataaaaactaaaaattaaatttgataacttaaaaagttttaaaataatagttatgtagaaaaaactaaaaactaaacaaattatcattcaagatatttcaaaaacaaaatctacatcaaaaaatcataaactacaaaaatcaaaaaccaaaaatcaaaattcaaaaaccagaaactaaaaaccaataataaactacaaaacattcagggccctagtttttgttcttgagcttttgttacactttagagaaaagaatccaatccctaaagtgaggattttgaactcttttgctattattcttaattcatcaatgaaaactattcagattatgatttgtgtttctattgtcatgtctgagtaatcaccttgttgggtctaggaagtctcaatagggatttagatggattagtagatcgaaaaccccttaggattactcttaaagttcttcatcttgattattcttaatgctagttttagattgatcacctagaacttgatattagataataggtattcccgccataggtatttgttatttgaaccatcatatatgatcctaggcatttaagaaaaaacaggtaggctcatagaagggctctggtttagatactaggtgaactaatcaagcttattaacaatgcatgctttagcataggatttctcggcttctccaggtatcttagttgtaagtatagagagtttcgcggaacgccaccggttactctagaattatattttgagtttgagaacggtgcgataacaatcctgatattagctagatctacaatttatctatctcccgagacaattccttagacctgacgctttaatcacttaactctacaactcatttacttgcttattagttttaaatattcaattacttcatttagcttagtaaacaacatcataagtctattgtgtgaacatcgagagctcagtggaattcgacccttaagtgctaacgacgatctcttatttgagggagtaagcttaaggcaatttgagctatatcagggacagtgacctttaagtcagggggaggcgtttactaactacgtttttctttttgattcttatttttactttttgagtcattttattgagtcaaaatttagttaggaattaggatctatattctttagattattgcctagttgattattgttgcaggttcaactcaatctgactattggcaaatccagatggcaaacgaacaaacttgagaatatcctagtttccaacacaattcattaaggctggagctaatctcactgatcttccttttacctcatcaaaacagttagtattcatagaacttgactccttacaaacctgatattgagaccaatgtgaaaaagaaaaatattcctctccccttattataaataaataaaaacaaagaacagagattgatatgattttcggtagtgtataggggtaagaatgtttctcatgaccctactattatacattattaggaatgatcaattacaaaggttagaacttgccgaggatgtcaatccagtatgcgagtactcctttgtttacttttcaaaaagaataagcataggggagagaaagaatgctaaaaagaataaagaatggtcaatttatcatggtatagtacatgaatgattctagaaggttcttgaatattagcttgcttgatgagacctagcgatgaaagactggtggatatagttaaggaactaaggtatggaatcaagaatgttgtgtaagcttgcggagatgtacatgttgtttaggatttgattacacttcctaggcatatggatttggttagaataaccacggcaatagactagagaatgttgggagttcctgcgttttcaaacctcttccacgagttcggcttttgtgttttgcttgagggcaagcaaaagctaagtctaggagagttgatatacctcaattttcactgtttttagctatgatttgggtatagattttagaatcttttgttatttgtagagtttttctagtcttttttaggtctttacatatgtgggatgcatttggagattatggagcattctggatcaaaacagacaacttaagctgcagaagcaatccagagacaaaaatctacgtatgtgtcgatcaacaccacccctggtgtcgagcgacaccaatatctgacggcaattcgattgcgcaacttattcaatttttgaagattttcaaattcggcccagaacgtttctaggaacttaagtatcaatttttaaggtcaatgtttagacctaacacttattatctattctttactagggagcaaaaccctgttgagactccctttagagaagatctttctaactctattctcttcttaattttattactgctttcttattcaaacatgttttgctcttttataatcatgtgtgagtagttctcttgttaggttttcgatctactaattcatctaaatccctgttaggataatatatttagaattcttcatctttgtttgttcttaatgctagttctagagtaattaactagaacttgattttaatataacatgtatacccgccataggtatctattactagaactaccttatatgagcctagtatttagatgcggactagcgtcgatttagatacttaggtaaacttatcaaactggattagaatgtttgcttacttctagggattatatgttgaacgatgtatttaattttaacgtggggtttgatgataactatcataagaatggtagttatcagaatgtggaagaactggtccgtaaccattcaaataaattctacgacttgttagaaggtgcaaataatcaattgtacaatggttgtcgtgaaaggcagttgcaattatccttagcggctcgggtcatgcaaaacaaggctgagtagaatatgagtgaaaagttggtggactgagtttgccaaatgtttaaagttttttttaccaaaaggaaacaaggctaccacttcacattaatagaccaaaaaggtgatgcgctattaggacttccatatcatacgattgatgtttgtaagaacaattgtatgctcttttggaaagaagacaaaaaagaagatcaatgtcgaatttgtggcgcacaaagatggaagcctaaagacaaccgtcgaagaaccaaagtacaatatattcgtatgtggtatctacctattggtgaccgattgaagagaatgtatcaaagccactagatagctgcgacaatgcgatggcatgctgagcaccaataaaaggagggagaaatgaatcatcctttatatgcggcaaagtggagatatttccaagagtttaaatccccggtttgctcaagaaccccgtaacatttatctagggttgtgtactgatgggttcaatccatttggcatgtctcgtaatcattcgttgtggcatgtgatcctgactctatataatttaccccctggtatgtgcatgaatacaaagtacttatttcttacaattctaaattatgggccaaatcatcctcgagctagtcttgatgtcttcctccaaccccttattgaggagctaaaagagtggtgtgataacactgtattttactcattttaggcatgtatttatcatcatttcgcttagtgatcactcattgtttcatatcattttgcatcacatttagcttattttgcacacttaggcatttaggatcatcttgcatacatattgtatgttttggggtgttttcaggtgcagaaggagcttacaaggattctactcggccctctactctatccaaccagtagggaagcagcagaggattctactcgaccagttaactcaatccaggcagccacagaggaggcagcaattcactcgacccacttactcgatcaaggcagcctcacaagaagcagcagatcgatctactcgcccctcctactcgatcctctactcgacccacttactcgaactagggcgacctactctacaagacttgttgatctattaaagcgtcttcggatcctcctcattccccactcaaccagacatctgagcatacagataggagaggaagatgcatctactcgaccaattgatcactcggagcatagacacaaaggcgcggattttgcagcaccctctttactcgatccccaagatcgagcactcgcccaaaccgcctcaagtctcttgtcttctagtgaatctagggttttcaacattttagtataaatagatcactttgggatttgtccgaaggatctagcttttatcctttagttttactttgtgttcttgaatcttcaaaacttaattactcttaatctatttcgtttttgcacttaattctttcagtaaagctgtttagcttgtttagatctacattttgatatgatttcagtaatttatgggtttgtgttcttagttatgttgcttgagtagtgattaggtttcttgaggatggattagattagggtaatctctaggttagttaggtggttaagattaggttagatcccttctggattcgttggcccctatgcggtttttgcaggctaatgtgaagattcgaccatagaagtccagcgtctaaaagacgttcaaatggatgtctgatcttacgaattccagagatttgtagacttgatcaagagattagctagtctgtttattggctttggtagattgttgtttaaaccgtgctctgctatgtttcatcaacgagagttgagattaggaagtggtagagttatgggggtctctgtcacgggagtggattgacccggtttttgaatctatcgtctagggtttctaccttttacctgttagccacctgatgaaccctagagttgcccttatcaatgaatccatccttaggacttctattcttcttagatttatttgtattcaccccctgattgcacttgtatttacctgttacttgtatcccctgttgattgcattttagttcttaaaattatcacatgttggttctacttgaccaaatgatcgagtggggctcttaagttctcatttttacctgtttgaatcataacctaggcatttacggctctgtatctgttcaattataaatgagttgtgttgtaataattcatgagacttaatcatgtcgttttatttttgcagaatcctagtattcaaacttcttctccgtttcatcttatctgtgtaagataacaatcctaccttgttatttatttgtgtttatgttgttttatgcgagtgaataaactatctatcttagtgtctgattattgaacttattatcacaaatgtatgaataatttgtggtgggactcttgtgtcgagttggtgtaaaatggacaaggcatgggcttggctgccaaggtatgcatctgtcagatattttcatagatagttttacttatcgtgatattgaatgtgttgttgttttatattatcttaggaatagccttgagtatgagattggagcaaagaattttgtctctggagcatcaattagtttggggaatcatactgagatgttctgtccctgcgttgattgtagaaatgtctgccatcagctgatagagacagtattggatcatctagtgatcagaggtatggatttgaagtataagaggaatccatgttggagtaagcatggggacaagagagactgaacatttgttgatgttcccacttcagaagaagaggcttatgagttgcttaggacaacgtattttgactcttaagttagtgatgaacaaccatctgataagtgtcaaactgtagaagaatccgattttagtaataagttagaggatgttgaaactccactctactcaacatgttagaagtacaacaaggtttctgcaataacagtcctttaccactttaaagttaagagtgggatgacagaaaacttctttgatcaggtattgacgacagtaaaagacatgttgcccgaagataatgtgcttccaaagtccactacggagatgaaaaagttcttgaaggtctttgggtttggttacgatctcattcacgcatgcaagaacgaatgtatactttatcggaagtagtatgctcagatggaaagctgcccaagatgtagtgcgtcaaaatgggagttggataaacgcagtggtgaggaaaagaaggggattcctgcaaaggtccttcggtattttccaatcaaagacagactgaaactgatgtttagatcaaaaagaatgggtgaggatctgcgatggcatttcagcaatggtagtgaagatggtataatgcgacatccagtggactttgttacttgggcacgggtgaataataaatggcctgagttcgatgcagatccgagaaaccttcgtcttggtctttctacagatggaatgaaccctttctcgatgcagaataccaaatacactacatggccagtcttattagtgaattacaacatggctccaaccaagtgtatgaaggctgataacatcatgttgactatgttgatccctggttcaactgcaccaagcaacaacatcgatgtttatctagcaccgctgatagaggatttgctggatatgtggattgaaggtataaaggtttatgactcatttatgaaagagaaatttacactaagagctatgttgttgtggagtatcagtgactatccaggcttaggcacattgtttggatgtaaggttaaagggaaacaaggctgtaacgtttgtggaaaggacacacctagtagatggttgaagtatagtaaaaaatatgtctatttgggcaataggaagcgtctcaggaatggacatccgtacaggcgccaaaagagttggtttgacaacactatcgagaatgggacagcaaatagaattcaaactagtgcagagattgctgagatacttaaagtttacaaaaattactttggaagacctttggaaaaggtaactaagaggaaaagatctgaagttattttagaggaagtctatggagaagacagtgattaatggaggtggaagaaattgttttatactcttcttattaccttactggaaggttagcatttggttttgtttaatagcaaaaatgagtaaaactattgtaaacattatgtgtagcctgaaactagtttttattttgacttaggatctgccggttcgtcacaacatatatgtcatgcacgtggagaagaaagtgtctgacgctatgttgtccactctaattcacaatgctaaatcgaaagatggcttgaaggcaagaaaagatttggaagatatgggaatacgaagccacttgcatacagaatcacggggtaagaaaacatatttgcctccagcagcttaggatgtagaaagaggagaagaagagattttgcctgaggttatctaagttcagaggtcctgatgggtattgtgcaaacatcgctaattgtgtgtcagtgaatcctcctggtattggtagttttaagtcagacgatcatcatatgctcatgcaaaatctattacttgtggctttgagagggttgctaccaaaagggcctaggattgttgtgacccgagtatgcaactttttccatagattatgccagcgttcccttgactctgagatgttattatcattggagactgagatagtcgagacaatgtgccaaatggagcggttcttccctccatcattatttgacatcatgtttcatcttcctcagcatctagcatcttcctccagacagcgtttcttcgagatacatacatactgccatcacaagctaaacaagtgttttactcaagagaagatgaatcctctccatggtatgtagtcatgagggcgccaccaagaggatatcatgagctagatactgaggaagagtatgtagcaacaccattgtttgaggagcaagttgaagatatggggaatcagttgtctgacgatgagagttactatgttagagatgactatgatggagttctagtggaagattaatgtggaatataaactggattatgtaatgctaatgtgggatatttattgttggttttgtttcaggctcagtcatggcaattactagaggaggaggaaatctacgccgtagtaaccgtcaggaaggaaaaggtgtgagtcctgtcattgcaaagaaactttccaagaagtctaaaagaagagaagttccacttaacagaataaaatgtctaaaagatattgttggaacataagagaatgagaaagagctgtttgacagagaattacaagttaatgagcatgaaatggttgaaggtgaaaaggcagatgaagaagaaaatgttgaagctgatgcagatggagatgaaaatggtgaagctgatgcagaagatgatctagaggcaaaaaatggtgaagctgatgcaaaagatgagctagaggcagaaaatggtgaagctcatgtagaagatgagctagaggcggaaaattgtgaagaacctgatcagcctgctgaccgtgagacttttgatgattctattggaggtgtagaaactgaccagcctgctgactgtgggaatatggatgcttccacttgagctggagaacctaaccagcctgctgaatgtgaaaatatggatgcttccattggaggataaaactgggagagttagtcaagtgttggggaaggataaacctaggagagttaggggtttaggcagagggattacggctaccaaactagcattccttcaggctagagacacacacgtgcaaaagctagaagaaacacaagccgaattgcttagccatattctagacttgaaaaatgtggtcactgacttagctagaaaagaggtaagtgatgttagcagaggggttaggtgtcagctgctagaatggggttcatcaaaagatgttgttgtcgatgaaggagaattctgctcgtctgatcctttgtacctgattggtcgcattagacttggtcctaacgcagcagctgttgtagtcacatctataattgatagtgattcgccactatggaggcctaccccaaccatgttcacacttggggaagctttgggactcaaaattcattggcaagcggataaagttattttggacaacttatcaaaatctccaattagaagttcttattcaaaggtaacccaggtctcaggagtttacttactttattctcaatacttgcaagctaaatttcatatgctaatatttgtgaatcacttatagggtacaatattagatgagtcagttacaagatgcaaagtttatgattggaattctcatggtgatgttattgctgagggtattttgtgttccactaatccggaccaaatgatcgataacattcctttgggaaaaaatgcagccattgtgaagattgtcaatgttctgaaggaggcggcttatgtgtggaggccaacacttgacatatttgtgatccctgacgcagtagatcatgaaatcccatggccaattaaaagcttagaaatcatcattcatactgcagagaattcaacaatgataagatcgcctagggtaagttttgatgttgcaatgacgtgtaatttaaatttagtatttgagattttgatgagtttgtttttgatgcgttagactacaagtaccaactctggttccagcagcaaaggaaaaaagcatacgaagtgcatcctcttggattgttacaattctggtaaaactgttgcagagggccgagtttgctcgacggatcctgcaactcttctacatttcaaacccataggtcccaaagctagcaaggtcttcttaggtgacaatatgattcacacaacaagaagataagtgtacatgtcttcttaggtgacaatatgagatacaatgatattcatttcaagaataaaaacgtttcaaaatatttttaaataatttctaaaaatctgcaattatgtaaacataataaatttgtcaatatatattttttttttcataaaaaatttgaaaatggcatgtaaaaaacattcttatgccttcatgaaatagccaattagaatgtttcactcggattgatgtcgtggcgaaatctcagcctttcctcatgccatcttaaataaatgtccaagcttgccaaaacgatccaatcaccatatatcactcggatacatgacgtggcgagatattggcctttgatttgtctgtttcgtctccttttcgataatttattcacttctttcgatccaaaaaattagaacatctcagaagaagcctcctttcgatctgtcagccattgaagaaacctcctttcgatctgtcagccattgaagatcagaagaaacaagactcacacggtcagccattgaagaagcctcctctcattacctctcatcaaacatctagatctgtacccaaaccttatccctttttccttatttctcgctttgtctattcttaatctgattaatacttgttgttgttccaggttatagaagatctgggttgtgttatatgcttcattttctccacaggtaatattcttttcatcctttcaaaaataatttccgattcgtcagagtgatattgataagatgcgagtaccattgattttcttttgtgtatattgaatgattcttatatttcagcgaccagttggtgtttggttcttagattcatgaagaccaatagagaggtaaacgattagccattagtaacttatttgtaattcaaacgactaactttctttagtttactgagattaaatctttcgttttgtagcaggaaatttacgttgaaagaagcttcaaaccaaacaattcaacaattcagaatttgatggacattgaaaggttcattttgcctcacacttctacatcaggtgtcgcaaggctcaaaatgagggtcatatcatgggtcgggcttcagttctacaactactgatattgggccttatcacaaattagttatagggccattgtatccaatatttaatatctctgtaaacttgtttaatggttattttgttctaatgcccattacaactagacttaatatcaatataaatactttgtaaaatactttttttttgttaaagagtcaccaaatagtataaaataaggcataaaatacagtaattatatggatactctaaatacagtatccaacgactaaatacagtaattatacggtataaattacaatataaaatatggtataaaaaacagtataaattacagtattaaaatacaatatccagcgcttaaatacagtaattatacggatactctaagaaagctattgttcagcaacccttaaactatcaattattacataatttaaatgctattataaatttaaagtactgctatagttacgcaatttaatagcaaatagtaattgctattgtaaaattaacaataacacacaacaaaacgctatattagttgaaatttttatagcagaacccaaaccgctatataaagtgttcgacctactataacaagcgcatacatagtgtttactacaacgctataatatcttataatattgtttttcctgtgctattgatactcacaattcctgtagtgaattc

SEQ ID NO: 76 - DNA, 82347 bp, Arabidopsis thaliana
gatccattggttcggtttaatattctgaaaatttggaaaagaaattatattaaacctgcagtttggttttaagacctgcaacggctttgaccaacaattggctgtaatatttgcaattgtttattgtcaatatcattacgtctttggaaaacaattaacgtgaagtgaatgaaagttgcagtttttgtttgtttgcaaataataataatcaagtattcagctgcggtttactcgattgagtttcatgaaagtcaaagtcagtttatgactttatgatcactgaattcatatgaacgaatatgataaaaagataaggcctgcaacccatgtggccagtttctctataagagtggaggctgttttttaaatgtaaaagaacgcaacatctcttagttttaagtaaaagaaagcaacaaagtttattttattttggccttacattatggaaactccattaacaaatttaaaacatgataaacatcatgagaaagagactattttaaaaggtagacataagtagtgactgtttagttgtcgatacggaacgtttgtccttgtttccatttgatgcggctgatttggttgtttctggtttgcgtgcattttttcccttgttgcagtaaccttacattcaacatccccatctttggagttttcttcacctgattcactaagagaggcgatttgggtatcaatgatccgggagatggtgatagtttggcgagaagtgttgaagttgtattttgtgagtttgatctggaatttgcaggagcagccaatgatatgctttaaacattctggaattgtggtctttattccttcgcaattatctttacccgcagcctgagagtgagtgaatataattgaagttgtatgtgtgagtttttaaaaggaagaaaagtagtaaagagaagtatacctcaatgcattcatttaaaacatcacgagcattttttccagctattttggtggcttcaccgttgaggacaacaaaagttccgacgtctccgtttctatcacgtaatctcatttcgaaacggtagctatgaaatcaatgatttggttaaagtctgtgtaatttattatgagcatatattttgatgacggagggtcagagttcccaaacctgatgagccccacgttgttatactctttgcacttgttacagtacatagatgtgtctgcttgttgaagtttgttgttggagatgctgcaggagatgtagtaccatccatgttgtggtttgtatgtccacaactgtagcaaagcaggtgaagctaacttcctacaattattaatgtttggttttttaagcagtaaaaaattgtggtaaagatgaaattagaatagagagaggatactttgaatataacctgtgattttcattatgtagaaactggtgtatttcattaattgtgactgtctccagttttgttacagcagaagaggagcttgcgatagttggtgtttttaaaccactatcccctaacctgttggtgggaagttagttagtttggtatgtgaaatgttggaggtgtttgatttagtatttcaaagcataccaagtaaggaactgtttggtttcatggatgtcggtgtcaaaaccacgaaatctaaacttctgttcatcaatttgattgtctccagtatgcacgagtatcattgacgttttctcgttgaagaagattccgtttttttgatcagtgactttgtaaacttttttgcagggggtgatcataaatttactgagcttgtaaatggagttgcgcttaagagcctcttcatagcggaatagccggtttgcatataagaatccttgcactgcattagactgaaggatgaatgattaggatttgtgtagaggtttgtatatattgagttaaaagatagaattacttgggagttgatgagcagtaattcaaggcccatcagtatgttgccttttttgaaattcctagcttcccagtaatgaattagtcgtactaagacatcatcaaaaatctgaaaggtgaatggttggggagactgttgagctttatttggtgccagattttgagtgtagtaacaggtcgtttttgttttggtttctcggtgtggtgatggtgatttggatttatagtgaaaaataaagctatggtattgaagatagtggccattagtttcttttaatgtcaattgaaatgaatgtatgggggattgaagatgagggagtggagatttgataagacgttttcagtttttgtttttgaagaatctgaatcgctagaatttgagagaaagaagacgacggtgaaaggtggtgatggcgaaggttttttattggggctaatttttgttttgttaaattagtagtggtatgggctttcttttttgaagtgtttttttttgggccttgtaatgttttattttgtttcaattagttgtagattagagtttacattatggattaaatttgtttgggcctgcgttttttatagtaattggtctaaagctgcgttgatttttgtagctttgttttttctgtcttgagaaagatgttgacgtgtccattaaagagagtgtttttgagaatgcatatgtggctaggctgagaagcctcaaactgttgcttttattagtagtagattcataaccatgtcatccgattcaaagaagtggtgcaccattgagcagacatcattccctatcaagtcccaaaattgttggtagaaggcagccgtgaaactgtcaaaatttggagctctatttgcctaaatcgaaaggactgcatcctttatttcctgatctaataatgactataataactctcgattcatctgatctgttactttgggtacaactttagaaataacttccgtcaaaccagtattctacgatgtagaaaaaagatcattaaagtctgtttcagccactttcccaatagcatcgtcgcggaactgttccattccttggtcatcagtgattgccttagttcgatttcgagactttcaaatcttagtggatgcattgaaaaactttgtattacgaagtcccagtctcatccatttgtttctactttttagatgttagtaaagttcttcatctctataaacatggttcagattgtgtctaagttgattaactgttagttgggatgtcgagcagtttctctcagcagcatctaaccggtgtttcagagcctgaatcttctcaactgaatttttctttgttcttttcttctaatttgctttttcttttttacacattcgaagcttatcttgatatccatttcgtgcatcaattcgtcccctttgccaacacatttgcaatgtgtcaaccaagtcttcagagtgaacatgtcatatataatatctgaattggccctgtttagtgcaaatctcatttgcaatatctattattacaggggcatgatccgatccaacaatcgtaagaactctattttagaagttggaaaagaggcttgcaagtcagcattatgaaaactctctccaaacatgactatatagtctttttctctctcttgcctacccaaccgaaagggttccctttaaatttcagatccttcatattgcagcaattgattgtacttgtgaagtcttgtaggatgccaatactttgacggccaatactttgacggctaccacataatccaagcatctgtttggtttgctgacaatctttgaagtttttcccagaggtgatgtttttcacttggtattggatgcccatagatgcaaggcaagtagaaattaaaatttttgtattcagcataaagatctacaagccttacatcatgagaaataacttaaagtgaaagatgctttttataatatacactactaaaacccccaattaaacctctaggagaaacaatacacatatcttcaaatcccaacttgactcctaaatcctttgtgtatttgtcttgtttttctgtttcaatcaatagcaacatatccagaaagtacacctgttgtattgcctctaggggtcgaattgtcaaagatcgtccaaatccttgacagttccaaaatccaactctcatagaggttttggtgttacaggccccaccgcggctctatcctgactcttattattgatgttatcctctgaacccattgactcctctgaatgttgaacctcattttaatttctgacgccacccttctccttcgataagatccggatgcttctcctatctcataagtttgttatcttttgcgcagctcgagtgctagtacttctaccggtcctgggagatcacctattgctttagcaaatgaagggattgggttataaagaaaaccttaatcacctgtcaattccgctcaaaacatatcgcggtcattgtcaggggagttctcctccaaggcattatgatttgggtcaatgtcagagagttgcgtctccgctttgttaacattagcagcaactggacttgggacaatttctttcctctgacggtgattccttggtgcatctcagcaccaatgtttgcgggtccattttcttgatttggttcatcagccatttcgagtagttgcttgtgttgtacaaggtcgactgtgtttctccttcctatagttcctgagctatgcgattgatgttatcgttgtaaaggaggttctggataccgtttgattgagtttgcatacagcagaggtgtacctggatcaaaaagacaacaagcaaaacacacagttagtacctgaagtgaaaattgaaaaggaacttgatctaagctagtctgaaatcttaaatgtaacaaataaacacccaatgggcaactgcgccaaattgataataggattttatgatcaattaatcctaaagcactatcatgtcgttgtagtactaaaggttgtcaatccaaattgggtgtgatgctagcaatcaagatgcaatcaaagttcacagagtcaagccaagcaataacaggttttgagtttcaacagtcctaaggcaacatgtaggaaatagaaattcaagcagaaacagttaaaatactcgaccaacacaacttgttgccaagcactgggtgtggttgagtaaagagcagagacagtaacaaagatactcgactgcacattctgttaccagacaactaggtgtggtcgagtatatgagtgataacatctatgaaatgcaaaagctaagcaacatgtaacaatatgcgctaaacaatagcagagtaaacaaagaaatcaattggatgagaaattcccgaggatgggggtaattgagtagttaagtctcctcgatctacaagtgattgacatgctcaatagactatccctagacaacaagttcgataaccaaattatatacaagaaaatagctaactaccgactacaaccggcgactaaataaatagtcgctatatttagtgactattccgctactattgtacgactaatatacaactaataggtttatagtcgcttattagtcgccaaagtaccactacacagacgagacgccgtattagtcgctaaatagtgactattatatgactaatattgtgtgtcgccagagttagtcgtatattagtcgctatttagcgactacatgaacaacccgccgtagtagtcgctaaaaagcgactataatacgactatttcggcgtgtcattaaccatagtcgaaaaatagacgtaatgatcaatttaaaaatcacatgtgtttcgttttctaagttgttgtaccggctttagacgactacaatatttagtcgtgttttagtcacttaaaaattgcctatataatgaaaatttcacgtacacaaaattcattcacaacacaaacacttttaaggaaaaaaaaagtaacaaaattttaatggcgggaaactataattatacgagtagcggtggttttaatcgagagtggatgtacaagaggttcgatgaaatgacggggaatttgacagcagaatacgtcgcatgagtggaggagttcttgacattttctaataggcagcctatagtacaaagttgtcgaggtaaattccactgtccttgtgttgtgtgcaagaataacaacatatcgtctcgggtagaaaagttagtagtcatttgtttagtcaaggatttatgtctgattattatgtttggtataagcatggagaagatttcaacatgaatgtaggaacgagtaattatgttgataggacgtatctaagagagaattatgaaagtgtgggtaatgttgtagaagatccatatgtggatatgatgaacgatgcatttcgttataacgtggggtttgatgataactatcatcaagatggtacttatcagaatgtggaggaacaggtacgtaaccattctaagaaattctacgacttgttagaaggtgcccaaaatcctttgtacgatggttgttgtgaaggccagtcacaattatagttagcagcttgagtcatgcagaacaaggcggatcataatatgagtgaaagatgtgtggattcggtatgtcaaatgttgacagattttttactagaaggaaaccaagctactgattcgcattacaagacagaaaaattgatgcgcagtttaggccttccttattatacaatcgatgtttgtattaacaattgtatgcttttctggaaagaagacgaaaaggaagatcaatgtcggttattgtggtggtcaaagatggaagcctatggatcatgactaccgtcgaagaaccaaagtgccatatagtcgtatgtggtatttacaattctgaattctaggccaaatcacctgcgagatagtctcgatgtcttcctccaacctcttattgaggagctaaaagagttatggtctactggaattgatgcatatgatatgtctttgaatcaaaattttaatctaaaaggagtgttgctgtggacgataagcgactttccggcgtacagcatgttatcagaatggacaacccacgataaactgtcttgtccaatttgcatggaaagtactaagtctttttatctacctaatggaaggaagacgtgctggtttgattgtcaccaaagatttcttcctcatagtcatccattacggaagaatgcttctaccgagtatccacctgagtctttaaccagtgagcaaatttattacgagcggttgtatggtgtaaatccaccaagaaccaaggatgttggtggcaacaatcacgaaaagaagatgccaggctatgggaaggaacataactggcacaaggaaagcatattatgggagcttccatattggaaagatctaaatctccgacattgtattgatgtgatgcatacaaagaagaattttttggataacataatgaatactcttatgagcgtgaagggtaaatcaaaggacaacataatgtcaagaatggatatagaacgattatgttctcggcttgacttacatattgatagtaagagaaaagctccatttccagcttatacattgacaaatgaagccaaaatgagtttattgcaatgtgtgaaacatgcaatcaaattcccagatggttattcgactgatttgggtagttgtgttgatatggagaatgagaaattgtcaggtatgaagagtcacgattgccatgtttttatggaccggttacttccatttatctttgcagaactcctcgaccagaacgttcaccttgcattatcaggtaaaataagaataaaatttactctttatatcatatatgcacttgagatgatgcaatttgtatttttttgtaggggttggcgcattttttagggatttatgttcgagaactttgcagaaaagtcgcgttcaaattctcaagcagaatattgttttgatcatatgcaacttagaaaagatctttccactatcatttttgatgttatggagcatctgcctatacatctcccttacgaagcagaattgggcggtcctgtccaatataggtggatatatccttttgagagggttttcaaaaaattgaaaggaaaagcaaaaaaaaaaaaaagatatgcggtcggatcaattgttgagtcttatatcaatggcgagatttcttatttctcagagcactactttgttgataatatacaaacaaaatcaaggtaaataatagtaattaaatatctttacaaaagcaagttttcaatgcgcaaaactaaccatgaattacctcatttggatcaggttaacaatattcaatgagggtgaagttcatgtatatcatgttcctgaagtacctaatatatttactttcgtcggtcgtgaagtatggctatcagaggaagactatcaatgcgcacatggatatgttttttgaaattttgattattttcaagtaattgagaggtatataacaaattaaatacttccattttaagtttttaattataaatgttggtttaataacccctatatgttgtttttgtatatattttctttctattcaatatccaggattgaacgaaaaagaaatcttcttgaaaagaggcgaagaatatcatgtgtgggtgaaagattattatgtctaaataatttatctatatatttgcatttctttattgttcttcatatctacaatgatgtgtatttctaaatttgcatacatgttacatattggaacaccagtaattcatttccaacttgggttcaagagatagtccatggacctttgcacaaagtcaaaacctggccaatttattttagaagaggttatttgttttatatgcagagtcatggagctggacgtaagacttgtaactatggggtatgtgtgaaaggtgaaaattatacggatgcatctgacgccatagatttttacggaaactttactgatatcatagaacttgagtatggggggtgctcagtttgaaaatcacactttttaaatgtttgtggtatggccccaagcactcggaggagcaatagtggtgttgtcgacgttctttcatcgagaaaatacaacaaatacgaaccatttattttaggtatgtacggtatatatggtcattggcaaacaacatctcaagcggaacaagtgtgttttattccttatccatacacgaaaaaatcaaagcaggagtggctcaatgttttaaaagtaaatctaatgggaaacatattaggagaatatgaaaataaagaccagatgttgcaaacagaaaatgatgattttgttttaatgactacaatagaagatcttgtactcgacaatttgacagaaaatcgcaaccctataaacctcaatctagatgtcggagatgcccagaagatggattccgatgtaatttatcgtcttctgaagatgaagaacaagaagacgaagaaaaatattagttttatgtttatgatatttacttaagttattatgtttaaatatgcaaacattttaaattattttgaaaaattatatttgactaagtatgtttactatgtttaattatatttttatgtataattctgaatatcaccaggcccaaaaacaccaagcccaaacccaattataagaatttaaatatgcgacttattgttgacattttagcgactgtaacaatactattgggccataaaaactcgaggcccaaacccggtgactaattgctgacatttttacgactacaacaatactattgggccaaaaaactcagagcccaaacctggtgactaatttgggacattttagcgactaaactttaaagaaacctgaaacctttaaggcctaaacccttaaggcccaaacaaaacccttatgatcttttgttcttcgaaaccttcgcagtcttcttcttccatttcttatgcaatcgatctttcctcttcgatttcctcttaaatcgatatttcttcttcgatttccaactctatctctctgatttcaaaccatagcagctctcttcgatttcaaaaccctagcttgtccttcgatttcttcgatttcttcgatttctttgatttcttcaatttcaacctccgtctcatctcgatctctccttcacacgatgtttgggcgaggaaaaaagaggcgtaccactcctaaccttgatgagagagccaccggatccacggctggtggacaacctagttctcttctggctcagtacgacttcacgccggcagcacaacggcctactcagctatagacgcctacaacagaagaccccgttcctccattacagtcatcgacagctcatgtccggaactacccgccgcctcaacaattattctagcactccggcagtcgacaacctgaagtgcaaaggactgcttccgtagaagtctagaacaatcccccgactcaagcgacaacgactctggagcttgtccctccgactcctcagcaagacccttcgccttctccagttcaagagtctcgggctcacagtcacccatcctctcaaggcaacaacttcgaagaatatccacctctgtcgccggatctctaggaggacacacttcagtctctaaatgatctgcttatgttgacggagagggataagttcgttaccatcctctcttccattcctcgaccgaatacgacatggaatgatcttcttttctcttgtttgtgatcccatgttgtgttcaatgtcgtttttgttgggtaatgagctttgtgaggccgattagatttagaaaatgtcagaattgtttcttgtttatgtcacggatgcatttaaagagtcgtgttgtgttggtctttgtttaagtttatgtctgatatttagatgatactttgcagccataatctatgttttgctagatatgatctatttgtatgaacttcttattctgttgtttgcgagaaaaagtagtttaagttatgtgttgtgatcttagggttctgttgggtaatgagcattgtgaggccaagtagtttaagtaattgtctgaattgattcttgtttgtcacggatgcatttgaagagttgtgtgttattggtctttgtttaagtttagttgtagatgatactttgtagccacaatctatgttttgctagatatgatctgtttgtatgatactttgcagccacagtctatgttttgctagtttaggtctaatatttagatattatctgtcatataacaactgcttgtttttcttgtgtatggaggtttactcgggacacaaactcgctacttgttaggaatattactcgagtgtttacaaacaaatttgatggtccctactacagctgaacatgtgtgcctcaagagaaatacttccttgagttttcttttaagtgttctttcagcccttcttatatatataattacgcttcttttttttactgacattaccttttgtatttgtagaaaacacaccattgggatcctttgataacatggactatccagtattatttcaatgagatctgtttaaggcgaatgaaaggcatggttagcaccgcaagaactagacgaaataaaccttaatggattggaaaaactctatggaaaacaatgactgtgtactgggacactgatgaagctcaagaaagaagtcaaatatattcaaatgcccgtctgtctgaccgtaacggtctaggtcctcacatacatttctcaaggtcgaagtcatatcagcaaatccaagacaaattagtgagtcttctctctgtttactcctttgcaactttaatctgatgtttctctatttatctattacttgtttttttttcattacaagaagagcaattgggcagagctgtcagtattggtgacgttttgatcaaaacacatacaaaacctgatgggacgtatgttgatcgaaaggcggagaagattgtagagttatatcaaaagaatttgcaattgaggcagtctgagctcaaggcagaaacttctgctgtttcagatggcacttcgcgggaacgggagctcacagctgaggaatgtacaaccatatttcttcaggtaacgttttatgtttcccaatttagtgttttcgagttcaattttcattctctattctcagcttttatcatactttgcagtccactgagagggattcgagaggcgttccttatagagtaggaagcctcatagagtctcttgtcaatgccaagcggaagcaagcaggtgactcaacttcttttgtggctttgcaagaacaattattggaagctcaacgcaagatagaagagcaggcctcttacaatcagaggcgtgaatatgagattgctttgcgtgaagctgagaaatccgtagttgctgatgagaagaagaagaagattgagcacttgtccttattggagaagtttttgcgcgaaactgatctttggttcctgaatttcctcgaatctcattcagctaaggagacaaccacagatcctatctcaccctctccagctgcctctccattttcatctgcttcataggtctatgtcttaactccttcctcaagactcaatatcacttttcaaagtttttctatatgtgtacttgtgttgcttgtacttgtgctaaacaaagttcttagttgtagtgaatcaaacatgtttttgtaatttgggttttgttacttttctgaaatgacaataaatttgtgttcatgattattgtattgtgtttatgattcttgtaatttatgttttgttttctcagcaaggtttccatctttagaacattcatatttgtattctgataacaacaatagtcgcaatttagtcatcaaaaatgtcatcaagtagtcggttcttgatgacaatttagtcactaaattttccgactaaatgacatttcagtcgcaactcagtcttaaatatagtgacaacatagtcgtaaattttaacgactaattacctacaacgagtacagaacccttaagttaatcgttagtttgtcgtctaatagtcgctatattgtatggctatatggtcactataaagcgattacttaaacttagttgctttttagcgactaaaactacgactatagtatttaccgactctcgattagcgactacctttaatagttgtttatttgtcgtaaagaggtatttaacgactaaacagtgactaatactgaagtcggtaaatgtcaatttttttgtagtagtctaagtgccaccgcaacaaagaccctcaagttaaactagtcccggactcaatcacctctgacgagagcttacctaacatgcattacgaaacaacaagttaaagctaaaacgctccctataaccaataccttggtacagagccaagaatctctagaattagtgattctgacatttcgtcgaacaccttttgggtgcagaaatatctgggctcaaattctagttaatcagaaagcaataggcattaggaacaactaatccaaaagggatctataatcaaactccaccacctaacagaccgaggattctaaactactctaacccatcctcagaaacctagtcactactcagactttattgcagaaaacataaacgataaaatgaatgaaaacatcatagcaaaataatgataacagaacaataacaggatgaacaacttagcaatgaaaagtgaaatactatatagattaagagaaatcctattacaaaagcgaagaacacacaaactgtctgcagaataaaacttagtctcgaaaatgtaaagtacatgttacttatagcgaaatattctgaaaccctaatactcaaaacgacacagtattgggacggattaaaaacggtactcgaccctggtggtcgagtaatgggtcgagtgatgagccaaagtcttcttctcttcctgatgctcgaatgtctggttgagtgcggaattgagaagactcttaagctggcagtcgagtagggatatcgagttgtagatgaaggtggactcgacttggtggcagagtgatgaaacgagtgaatgatgatggtggtactcgaccatggggtcgagtggtagtgatcaagtgattgacaaaaggtggcgatggtgttgctcgatcaggggctcgagtgaatggcgagggattgtgatggatgtgctcgaccaattggtcgagtggtggtgagaaacggtgatgtcagctactcgagctcgtggtcgagtggtggatagagtctcgcggtcaagtgatttgatgtagaggttgtggccgagtacttcaggaagtccaggatgacggtactcgagctcgtggtcgagtatgttgatttgatcaggtccgcttcttccaattagctcaccagcagctccaaatcacatgaaaacaacacaaatatgcaatatgcatgcataactatcctaagcatgcaaagtgatgacaaatgatgacaaatggtataaaacagtggtgatatgatgctaaagtgatgacaaatggatgctcaaaacaagaaaaatgtacacttattagttagcgactagacaaaagacgtaagcaaatacttcgcaattttaggacgtaaaaaaacagtcattgttggagctggattctcctccaggaatccacctgcgaaaataccaagccagcccacaaagcccaccaagtagaggacctacgcaactgatgagcccacatacgcgaatgggtacttgggccagataagccgggtcacctgatgaagggagataagcgaataataacctaggaactgatgaggagatattcacggagcagacctgatatctcggaactgacctgccgaatattcaggaggatctccgcagatcccggacggagctaccacgtgcgtagacctatataagggagcaaggacgacttggaagagacgttcaattcagcttacattcacacacatacttttacacttgtaatctcctttcacattgtaaaagctttttcataatcaatacaaaaagtccattcgttcttagcaatataactctcaaggtttcagtgaagttctagccctcctttctcataatctcaattacaaatctctagtgtggatttcagaacccacagtcataatatagtctctatttcactacttcattccgactcaattctgtctataaaacgaaggtcgcaatttacgattattgtcgaacctatttgatactcgtgatttttatgtatatatatacattgattgaataaactcaatcattataagtttctcaaagctttaaatcacactatttgaacacaataatcatatatatatgaaaggaggctaactctcttccacaacttgacacataagcacatgagaacttgccacctagacttcataagttaagtaatacataattagtaattaatttaacataacaactaaaataggaggatataattaatcagaacttgaaccatcactcttttatatttttttaattcaatatatcctctttaatgttgagatccacttaagtggctaaagtgatcataaaatccaaacatgctacacagattccttgcaatctaaattttctaaacttttctaaaatttcatagtctcacaatctaaacatataacaaaaaaacaagaatatataaaataaaaacaaaactaagaatctagaacaacaataaaaaacaactcaagcacattcgtttttcagatgaactaatatagttggacttttcaaaaacaattacaaatcataattatgtttcaaaaccgatgcattcaactttactttatatgaacagacattatataaaactgttgggaatgtcctgaaatcagttatacttattctaatgaaataaagtggtaatgtcgaggtttgacatttgtataatattaggtggttataatgttttgctagagacagcttataatctatgagtgagaactcattgctaatattatacaaacctacaaggtcacacacctaagcaaactgcatcaatgtttattatactatatatgttatatatgatatatatacatatatttatgtacatgaatttcaaaaagggaaaaaaagagttattgggatttggcccattataaatcctaattagttagggttaaacggttggctatatatatgatatattcgaaacttttgtaatatatacttttgatcataaaaccctaaaatagagagataaatagtttatctgagttttgagattagatctcaaaggaactagcattccagatctgattcagtttgtgtgcgtgtggataccggtagaggcacaacatttggggtgctaaaacaacctcgaaacaatatgattcatcttttcgctgcagattatccaggtatattcaaaacctattatctagatttgattctttatttacacagttcctggcaattgaattcgttattaggatttataaatcgttataaagaggtacaaattcctacaaaaataatttgtaaattgtaatacataaacccacacgtaatgcaggtactcatctagtatcattaattctaaatcattcttaagtttaacatgttggtttaaatacttgtaaatttcaaattgggaatctcgatgtaattctaaatcattaacatttttgtaaatttcaaaacaaagttattaaatcaatgttttaagatcttatactaatatggatactctagaatacagttatgcttgttttttagtgattggtatcaatagttttgatcactaatgcctagaatccaaaaaaacaatttatgacttaaaccttagattcacaaaacaataacaatatgtgactatatttggactcatttaatacttgcaattttttgaaatcggaaaatcaccttagagaattgatatatacatacatatagatgagtgaacaaaactcaatcattataagtttttcaaagctttaaatcatattgtttgaacacaataatatcattaattctaaatcattcttaagtttaacatgttgggttagaagaaggatttcagtttttgtaaatttccaaacaaagttatcaaatcaatgttttaaactcttatactaatagggatactctagagtatagttatgcttggtttttagtgattggtatcaatagttttgatctgtaatgcctagaacccaaaaaaataatatgtgacttaaatcttagagtcacaagactaacaatttgcgactatattcggacttatttaatactcgctattttttgtattcgaaaatcaccttagagaatgttatatatacatatatactttgagtgaataaaaatcaatcattataagcttttagctttaaatcatattgtttgaacacaataatatcattaattccaaatcattcttaaatttaacattttggtttagaagaaggattggatttttcaaaaacatttaaatacaaagtaatcaaataaatgttttaaacttttatactaatagggatactctagaatacagttgtgattgtttttagtgattggcatcaatagtgagaaggaaagttatcccatttggagaaggaaagctgtcccttttcccctgagaaccaaatgatcaagcttgggcgggttcctttgtcggagagtgttgaagcagctcctcctcaagaagctcaaactaggcgaggaaggtcgcccccatattggtggcggggtagccccactcgatatgctgcaaaagcaaagcataaggttactgctagtaagcgggttgaagtttcttcttctaaagcaaagagatcctatggtccccgtgtgggtaatgaggatttgcagagaaaataggggagtgcaaaggacaaacccttgcttattagagaaccacctctcaatagagctcatcacacttcgcagtagcgcaggctctcttgtggagatttaaaccacaaatcaaggggtaacatctttccccgaacaagggagactgtattagaaggaaatgcttccttcaggaagcgacgttttgaagaagctgcctcgtcagaccaccaaggacgggattcaagcaggggcaggtctacaaagtcccgtcagactctagaatctaatcttgtttcttctgcaaaagctctcattcaatcccctcttgtggattctcaattgactatttcagaacctcttctagccgtagttaaggctaagcaaggttttggttctccagccctaacgagagagcgcccttttcgtctacagctcaataaaaagtctaacgttgtcacaatgtcaaaaggaaaggagaaagaaggagatttggagctttccggtgattcctcagattttggaagtgcagcaaaaaagagtttaaactttgatgtgttggttcctgcagcttcgaatatgttatcaattgtccaaactcctttgccagctcaaagcctgatcgattgcaaccttaactccaattcttggtatgatcaaacggttgaagaagaggaagaagaagctgcaaaactcaaggcttaagctgtggagattattgttccaatccggaattcgatttcgtgtattccatctgtcgaacgatatgtcgcaattcccaattcgattccgcttgtttttgatgcattcgacccattgcttgaatcaactatgaatggcctgcagttagacgacggtaatgagaacagtatggattgggatctacctttggaaaaggaggatggggtggatctagaattgggagaggatgatgaacaagcttatcgagattcagagtatcccatggaggagggagaaggtgatcccgcgacgagagactatctctttgaagaggtcccggaggattcgactacgagaacgatgatttattgggtgatgagtattatgaaaaggaatcaattccggtgatggaggatcgtgagtctgagccgttagtagttgctgatcaaattgttgattcttcactctctcttcctattgggcctagagtgtggagaaaaaagggaaggcccactcaaggaagaaggtggaacagaaactcaaaggcccatctgggtcatctgcttttattggggctgcgtcgaagaagctcagtaaggcgtcctcgaagaagcggccctccgacatgaaaactggtccaaccaaaacaaggaataccagaaaagctgcagcaagcccgagtagttatgttttcccatcgtcaaagaacaagacatctttggttattttgagtaaggcgggatcgtctgatctccccgattccaagatatgaggattctagcatggaactatcaaggggcgggtgcagatctcacaactcgtcgactggaggaaatgtgtcgtttgtattctccaggttttctttttttatcggaaactaaaaaagaccgtatgcatcttcagaatatgcaagtgcctttaggctttgattctctccagactgttgaaccgattggtaacagtggtggtcttgctcttttttattcgaaagactatccggttaagtttgtttttcttaatgatcggcttattgatattgaaactattattgatggaaatcgatattacttttgttatggcgatccggtagttcaataccgtgaattagtgtgggagcgtttgactcgtattggtatcgagcgttcagatccatggtttatgattggggattttaacgaaattaccggaaaccatgagaaaaagggtggtaaacgtcgatctgaatcctcttttcttccctttcgttgtatgattgaggactgtgggatgatcgagatcccttcacatggtaatttattctcatgggtgggtcggcgtagttgtagggttgcgggtcgtagatttcgacaacttattaaatacatattagatagagctttgggaaatgaagaatggcatacaattttttcccacacaaatgtggagtacttaaaactatggggttccgatcatagacccctcctagcttcgatccagaatagtcctcatcggtttaataaatccttcatctttgatagaagatggattgataaaccgggattcaaacaatcggtcctcgaaggctgggctttcccttcgaatgaaggtgttctttttttacaaaaagttaaaaattgtaggagaactatctctatttggaagaaatcaaattctacaaattctgaaaagttgattgtagagctgcaagataaaattaacttagcccaagaagatgagtctttgtcctcagaagatcttttagctttaaaatggcagttatgcgacgcttatagggaagaagagattttttggaaatcgaagagcagggaattgtcgtttaaactcggggataagaacacaaaatactttcatgctattactaagcaaagaagagcaaaaaataagattattggtttattgaaccaagatggtttgtgggtggataaggaggtggatattgaaagtctagcggtggattattttaaatatatttttacctcctcggatccacgagaattccattccgttcttagggatgtgccagttataatttcggaagctatgaatcagaaacatataaaggaattctccccagaggaagttagacgagctctgttttcgcttaatccagataaagccccaggtccggatgggatgactgcccttttttatcaacatttctgggacttgacagggccagatttaatcaaatttgttcaagatttccatgccacaggttccttcgataaaaagttaaatgcgaaaaatatttgtttgattccgtaaacaaataggcctaggaaaatggcggaatttcgaccaataagtttgtgtaatgtgggttacaaagttatttccaaggtacttagtgcccgattgaaaaaacttcttctggaattaatttcggagactcaatccgcctttgtgtccgggagactcataacggataatattcttatagctcaagaaaattttcatgctcttcgaacaaacccggcatgtagaaagaagttcatggctataaagactgacatgagtaatgcctatgatcgtgtcgaatgatcctttctacaagctcttatggtgaagatgggtttcgctcagaaatgggtagacttgatcattttttgtatctcttcggtgtcatataaagtccttttaaaaggttccccgggaggattcattaagccttctagaggaattcgacaaggtgatcccatttcaccttttctgtttatattatgcactgaagccttggtggcaaatcttagagatgcagagtggcatggtcgtattcaaggtcaccagatttcaagagcaagcccttctacctcgcatctcttgttcgtaaatgatagtttatttttctccaaagcagaccccatccaaggtgaggaaatcatcaagattctccgcatttatggcgaggcttcgggacaacagttaaatgcttctaagtcttcagtgatgtttggacatgatgttgataatattaagcgaaatgctattaaggcgactttgggaatccataagtacgggggcatgggttcctatctgggattaccagagaaaattcatggatccaaagttcaagtcttttcgtttgtgagagatagacttcaaaaatgtcttaatacttggccagctaaattcttgtctaaaggaggcaaaaaggtccttataaagtcttgctcaggctcttccgacatatgttatgtcgtgttttcttcttcctaaggctatacgctcaaaactaagtagtgctattgctaatttttggtggaaaactaatgaaaatagtaatggtattcactgggtagggtaggataagttgtgtaccccacactttgaaggcggcttgggttttataacactagaataatttaatcttgctttactagcaaaacaattatggcgccttattagatatccaaactcccttctgagtagggttttgagaggcagatatttctgttttagtgatcctctgcatataggatcttctaatcgtccctcttttggatggagaagtattatgggttctaaaccgttactagttttaggccttcgaagaacaataggttcaggtatgctgacccgagtttgggaagatccgtggatccccacaattccagcaagacctgccaagagtgtcattgacataagagaccctcatctctatgttaatgacctaattgatcaatccacacagatgtggaaattggatcgccttcaggctttgatagatctcgttgatacttcgctcattttagggatttgaccaagccgtacctacttgagtgatggatttagttggtcgtatactaaatcaggtaactatactgttaaatcaggctattgggtcgcgcaaaatttatcttgccctacttgtgaccccccttttcagggaccaggttttttggcacttcaggcacaagtatggaagctaaaacttacgcggaagcttatgcatttcgcgtggcaatgtatctttggttatcttgccacttgccaaagatagacttattgtcatatgggaacaaataaaagatgtccccgttgtggagaagcagatgagacaattaaccatcttcttttccattgtccaccctcgaaacaaatttgagcattatcgcctattccttgctcagggaatgtcttccctagaaattccctcttctataatttcgattttctcttttggcgtggctgagaatttggaataggagaagaggtgctagaactctttccatggatactttgatatatctagaaaagtatgaaccgttttgtttttgaaaacataagggaacctcctcctgaaactttagctttggcacttcaagaggcagctgtttggaaacaagcatctcaaaaagaagatgatcccattcgtcctaccccgttcgtaggttcttctcaactccctccctctttgctgtctgaatgtcaacttgatgcttcctggcatgtagatgacactatgagcaagcatggttgggtccttgttcgtcaagacttggtcatccagcttggacagaggagcactcgtcgaagtttatcaccgcttcatgcggagtttgactccctgttatgggcaatggaatgcatgatctctattggtgatacttctagtaattttgcttcggattgcttggatttgattggtatccttgataaccaagacaattggccgacttttcctgcagaattggcttcttttggttctttagtttgtttttttccttcttttctgattagatttcttcctcgtagttctaatactcgagcagattgtttagctaagaaagctcggactcgtaatagcttttttcccatgtaagcaaatcggttcctgaatggctctctctagctgagagtctctttccgataacttaatataaatggtgtttaatgaaaaataaaaactaatagggatactctagaatacagttatgattgtttttagtgattggtatcgatagttttgatctgtaatgcctagaatttttgaaaaaaaaaaacaatttgtgacttaaacgtaacagtcataagaaagtaacaatttgccactatattcagactcatttgatactcgcgatctttggatggtgaattttgggcttttattttgggcggtgagttttgcccctttttatatatgtatttttaatggatttgggctttggtttggacagtgaattttgcctccaattttgtttttgttgtgactcgtttgcgaccgattaaggactcctccgtattaattactatgtaaacacttagtcgatttttcattatgcgggacttctctttctggattttgggttttactctcaaaacctctgaactctcttctcttctcaaatcgatttctctcgtcaatctctcctccgtctcttctgaatctctcctcaatctcttctcaatatcgcctcgatctaatggtactaaagggaaattctacacgaggtcgcagtggcaaatctcaatcaggttcgagggtcttcactagtccggatacgaagccaagtgctagtaggacttagagggtgaatcgtccgaatcctctgaaaccaaccattggtaggcgtaaaaggcatatcctttgaatccaagcagaggcttgagtccaaatcctccggatccagcgctggtttgattaaccctccattgaatccaagtgtgagtcggactatgaataatagtcgcggaggtggaagcagaggaggaatgagtggtatcggagtgtcttctcactcctctagtccatcagagacacaatctatgacccaatcacatagaagtcttccatcccagtaccagtagaggacacaacctcttcctgctcctcaaccaccgtctcatgttattcaattaggataattctttagatcctaatttgattaggataaactcgattatattatgttctattctgattagatctataaatttaataagattaactttctagataactaataattttaatttgattaagattaattaaattatttataattcaattagatatatattggatatatattagttatattttatttatattggatataattttttaaatataaactagagttataaaattaattcctcaactaatatcaagtaaattgatgtcttccctgattttatcaactgttaaaacttaaatttttgtatggcgggtctgccaaagcagcggtctgcaattgtttaagattgagacacatagtaacggttactatataaaataaaattggtttacttgactaagctatcaaaacggtttggggcttagagacataagattgtataagatattagatgtcatccacaaccaagaattatattggatataattagcaagaagttgcttacctaaataactagatattcaggggtggagccaaagctcacttggattctagtgaaatatggatcttggatcattgtactcattagagaatatttgttttgagtatagtgttagttttcttaattgttaagaattctaaacttatgaacatcatattaatttctgcttttctttttcgatagttatgtcaaaccctcaaagttcctattcagttcgagatgtccttaagaaggacaaattgaatggatcaaaccctcctgaattcttggaagatctggagaagaagaaaacattcaagatttcttcttcgggtatctatgttatagatgtaaatgttactacttctggttttactccttgggtattggataccggttgtagtgctcacatttgtgtaaatgtgcatggcctaaacaacagtagaactttggaggaaggacaagtggacctacgtgtgactaatggagaaaaagtctctgcattggccgtgggaacatattcgttgtctttgccttcaggcatggttttggaggttaagaactgctactatgttcttgcaataaacaagaatatcatctccgtttcatgtttggacatggaaggtcatcacttttcgagatgatacgttttatggtagcgctccattagagaatgggctctatgttctaaaccaaagcatgccaatttataacattcataccaagagatttaagtctaatggcttgaatccaacgtttttctggcattgtcgtttgggccatataaacgagaaacgcattcaaaagcttcatagtgatggaattttaaactcatttgattatgaatcttatgagacatatgaatcttgtttgttgggaaaaaatgactaaagccccatttaccggacaaagtgagagggctagtgacttattgggctttatacatacagatgtactgtatgtgggccaacgagtacaaatgctagaggaaactatcagtatttcattacatttactaatgactttagtagatatggttatgtttatgtaatgaaacataaatcggaatcctttgaaaagttcaaggagttccagaatgaagtacaaaatcaacttgggaaatcaattaaagttcttcgatcagatcaaggaggagaatatttgagccaagtttttagtgatcatctcagagagtgtggaattgtttcacagctcactcctccaggaataccacaatggaatggtgtatctgaaaggagaaatcaaactttattggatatggttcgatcgatgatgaatcacacagatcttccatcatccttttggggatatgctttagaaatatctgcgtttatgctcaacagatgtccataaaaatcagttgagaagacaccatatgagatatggactggaaaggttcctaatttgtcttttctgaaaatttggggttgtgaagcttatgtcaaacgattgattactgataagcttggacccaaatatgataagtgctatttcgtaggttatccaaaagagaccaacgattattacttttaccaccctactgacaacaaagagtttgttgctcgaaatggtgcctttttggaaagagagtttctttcaaaaggaactagtgggagtaaagtattactcgaagaagttcgagaaccacatggtgatgttccaacttctcaggaagaacatatgtttggatctacgaagagtcgtagaacctatacatgtggaacctgaggtacgtaggtccgaaaggagccgtcacgaacccgatagatttggagattgggtgacggatgatcatgctctatttcttatagagagtgatgaacctatgtcttacgaagaagcgctgatgggccccgattccgataagtggttagaggccgcaaaatccgaaatggaatccatgtcacaaaacgaagtatgaactttggttgatttacctgatggtgtaaaagccataaagtgtaaatggatttttaagaagaaaattgacatggatggtaatatatagatatacaaagctagactatgatgaaacctattctctagtcgtaatgcttaagtccattcagattctcctagcaactgctgctcattatgattatgagatttggcaaatggatgtgaaaacaactttccttaatggaaatcacgaagaggatgtgtacatgacacaacctgaaggtttcactattcttgaggctgctaggaaggtatgcaggcttcatggtttcatttatggattaaagcaagcatctcggagtttgaatcttcgttttaatgaggcaatcaaagagtttgatttcattagaaacgaagaagaaccttgtgtttacaagaagactagtgagagcacagtcgcatttctggtattgtatgtagatgacatactgctccttggagatgacattcctttgcttcagtctgtaaagacttggcttggaagttgtttctcgatgaaagacatgggtgaagctgcctatattcttggataagaatctatagagatagattaaacaaaataattggactaagtcaagatacttatatagataaggtcttgcacatgttcaatatgcatgattctaagaaaggctttatacaatgtctcatggtataactcttagcaagacttagtgtccttcgacgcatgatgagcgagagcggatgagtaagatttcatatgcttctgctataggatctatcatgtatgctatgctctgcactcgcccagatgttgcatgtgctttgagcatgacgagcagataccaatctgatccaggtgaaagtcactggatagtagtcaagaccatccttaagtacttgagaagaactaaggataagtttttggtctatggaggaagtgaggaacttgttgtgagtggttctactgatgccagctttcaaacagacaaagatgttttccgatcgaaatcacgatttgtcttttgtctaaacggaggagaagtgagttggaagagttccaaacagagcactgtggcagactctacaactgaagctgagtatatagctgcttctgaagcggctaaggaggctgtttggattaggaagttcattactgaacttggtgtggttcctagtatttctggccccattgatctttactgtgataacaatggtgtcataacgcaagcaaaaaaacctagatcacaccagaaatccaaacacatacaaaggcgatatcacctcattcgtgagattaatgatagaggtgatgtgaagattagcagagtttcaatgaatgcaaatgttgctgatccttttacttaacctcttccacagccgaagcatgagagtcatattgctgcgattggcattagatttataaagatgtgatcttatttctagtgtgaagtttttcttttatgatatgatgttcatgttaaaagaaatttggatttatttttaaattaatgaaatttgtttcagtattatttatttatttgataattaaataatagtcccaaataatttatatcattcttataggtcatcaagtacgtgacttgatcatgaaaccctgtaagtgaaaaatgacattaaaaaattgattatagagtcagaatcgtttatcacttaagataatgagttctgagttataatgattcctgaactgatatgtagaaacttcaacttcttattaagtccctagtcaaggttattaaaatgggacattaataactaagaatgactagtatgtgaggtgactgatgactaagtttcatggagtcattaatatgtggtattaaagtcaatcacatagatatgtgttcgagaacacagtattggactgacccgttatgagaactctacaagattgttatatgagtgtcataagagtttctcatcacaactatagagtatagttctttgacctgagttcgtcatgatttcttactcatggattagttcgctttgactctgtcaaacatcagccgaaaaggtgattataaagacaagtgattgggcgcgttatgaattgtataaggaacaggcatggaacaagatgggatttgtccctcccatataacgggagataaatatctttgggcctatcgaagatttgatactgagaaatgcgtggccgcgctcaaacgaggtaaatgtcagtcgtttgttttatcagtaaaaatcagagttcgataaacatagtctagctgaataaggatcataatttcttgccttatgctcagatcgagatatagagacaaagggattatgggaatagatgattccagtacaagtgagagattgttgggaatgtcctgaaatcagttgtattttattctatttaaagtggtaatgtcgaggtttgacatttgtatagtattaggtggttattatgttttgctagagaccgcttataatctatgagtgagaactcattgctaatattatacaaacctacatgatcacacacctaagcaaactgcatcaatgtttattatactatatatgttatatatgatatacatatatttatgtacatgaatttcaaaacgggaataaaaagagttattggactttggcccattattaatcctaattaattagggttaaacggttagctatatatatgatatattagcaacttttgtgatatgtacttttgatcgtaaaaccctaaaataaagagacaaatagtttgtctaagttttgagattaggtctcaaaggaactagcattccagatctgatccagtttgtgtgcgtgtggataccggtagaggcacaacacttggggtgctaaaacaacctcgaaacaatatggttcatctttgcgttgcagaatatccaggtatattcaaaccctattatctagatataattctttatttacacagttcctggtaattgaattcgttattaggatttataaatcgttataaagaggtacgaattcctacaaaaataatttgtaaatagtaatacataaacccacacgttgtgcgggtactcatctagtatcattaattctaaatcattcttaagtttaacctgttggtttaaaagaagaatttgattttttgtaaatttcaaaacaaagttatcaaatcaatgttttaaattcttatactaatagggatactttaaagacagttatgcttgttttttagtgattggtatcaatagttttgatctataatgcctagaatccaaaaaaacatttatgacttaaaacttagagtcacaaaacagtaacaatatgcgactatatttggactcatttaatacttgcgatttttttaaatcggaaaatctccttagacaattgatatatatatacatatagattgagtgaacaaaactcaatcattataagtttttcaaagctttaaatcacattctttgaacacaataatattattaattctaaatcattcttaagtttaacatgttgggttagaagaaggatttgatttcttgtaaatttccaaacaaagttatcaaatcaatgttttaaactcgtatactaatagggatactctagagtatagttatgtttggtttttagtgattggtatcaatagttttgatctgtaatgcctagaatccaaaaaaacaatttgtgacttaaatcttagagtcataagacagtaacaatttgtgactatattcggacttatttaatattcgctattttttgtattcgaaaaatcaccttagagaatgttatatatacatatatactttgattgaataaaaatcaatcattataagcttttagctttaaatcatattgtttgaacacaataatatcattaattacaaatcatttttaaattttacattttggtttagaagaaagattggatttttcaaaaacatttaaatacaaagtaatcaaatcaatgttttaaactcttatactaataggtatcaatagggatactctagaatacagttatgattgttttttagtgattggtatcaatagttttgatctgtaatgcctagaatttttgaaaaaaaaacaatttgtgacttaaacctaacagtcataagacagtaacaatttgccactatattcaaactcattcgatactcgcgatttttggatggtgaattttgggcttttattttggggggtgagttttgcccctttttatatatgtatttttaatggatttgggctttggtttgggcggtgaattttgcctccaattttgtttttgttgtgactcgtttgcgacctattaaggactccttctcgttaattactatgtaaacacttagtcgatttttcattatgcgggacttctctttctggattttgggtttcactctcaaaacctctcaactctcttctcttctcaaatcgatttctctcctcaatctctcctcagtctcttctgaatctctcctcgatctcttctcaatctctcctcgatctaacggcgacaaagggtaattctacacggggtcgcagtggcaaatctcaatcaggttcgagggtcttcactagtccggatacgaagccaagcgctagtaagtcttagagggtgaatcgtccgaatcctctgaatccaaccaatggtaggcgtaaaaggctgatcctttgaacccaagcagaggcttgagtcaaaatcctccgtatccagcggtggtttgattaaccctccattgaatccaagtgtgagtcggactatgaataatagtcgcggaggtgggagcagaggaggaaggagtggtgtcggagtgtcttctcactcctctagtcaatcagagacacaatctatgatccaatcacatagaagtcttccatcccagtacctgccgaggacacaacctcttcctgctcctcaaccaccgtctcctgttattcaacaaccgccttttgctcctcaaaatgacaaagaggaagatgacgaagaaacagatgatgacgacaacgacataccaatccaagaagatgatgaagaagaagaaaatccagaccaagactaccaagagctgttagattgtttgcttaatcttcaaggccgccaacatttactttttctgtccaaggttcctatcccaggcgttgaaactctctggtaatttcgctctctctcattctctcgctctccttttcttcctattgttgatgtgtttagagcactgctagagattgatttgtgatttatgattgtgattgtgctagagtttagagcactctctagttacactagttcttgtgattttttattgtgattgtgcaagagtttagatcactctctagttcctttagttcttgtatttgtgattgagcacagctagagatggatctttttcttgtatttgtgattgagcactgctatagtttgtctttatagagactagttctctatttttaatataggtttaacatgcataaatataaactacctcgggcgattgctgaagtatttaggaggaaatttgatggtccatacttcaattggaaggttactatttttagcatccaagagagatatttcaggagtttcgcggtaacaatttcacttttatctttcaaattcttattgttactcatttactaattatccgtgctaacttatctctttaatttgtaccatgtagaggatgttctatttggatcatgggcttactgaggctgttagagaggggttcaaaatgttagcccaaaagcgtatgaagggcattgttagtgaagttaagaggagtggtgtacaacctctttggattcgtggtaaactttgggatctgatgtgggttcattggaacaccagtcgtgtagtggtgaggagtgaaagtgcttcacaatgaagaaaatccaattgtggcgatcttggtctctacagatatgcatccgacagaaatcgtttgtgcaagtttacgaagaattggtaacattcctctgatttttatccaaacaattcactattcttatatattaattacatgattttaatgtgtttcaatttcattgtaggaggacatatatgggcgccctgtataaattggggaagtgtttatgaaaacacatactcgggaagtgtttatgaaaacacatactcgaagcggacctgatcatgtcaaaccactcgaccccctggtcgagtagacgcttcacgacctcaatagaccactcgaccccctggtcgagtagaagacttcactacttcacttcaccactcgaccgcctggccgagtaccaccatgagagtcactcgatcacttcactcgaccacctggtcgagtatcatcacctccaccacttgaccatccctcgatcacgccactctaccacaaagtcgagtatcaccatcaccatcactcgactacatactcgattgccagcttcagagtcttctccattccgcactcaaccagacactcgagcacaaggaagaaaagaagactccagcttatcactcgaccgctcactcgaccacctgggtcgagtaccgttcttaatccgtcccactactgcgtcgttttgagtgttagggttttggaatatttcgctataagtagcatgtattttacattttcgtttatctaagttttattccgcagacactttgttcttcacattttgtaatccggatttcttttaatctattcagtattcaacattttgcttttgatttcgtttacttttgttcatcctgttatcatcatgctattactttgttgttatcatgttttcattctattcaacgtttatgttctctacaatgatgtctgagtagtgaataggtttctgaggatgggttagagtagtttaggattctcggtatgctaggtggttgagtttgatatataaatcccttctggattagtttttcttaatgcctattgctttctgatcaactggaatttgagcccagacatttccgcgcccaaaaggtgttcgatgaaatttctgaaccactaattccagagattcgtggctctgtaccaaggtattggttgcacagagcgttttggctttaacttgttgattcgtaatgcatgttaggttagctctcgtcaatggtgatggagtctgggactggtttaacttgagggtctctgttgcggtggcacttagatttggttaccgaacttgttatctagggataatttattgagcatgttaatcacctgtaaactgaagaaacgaaactactcaattaccccatccttgggaattctttatctgattgatttttttgtttactctactgttgtttactacgtcttgttacatgttgcttagtttctgcaaatctttcctgttactcgacctgatactcgaccacccagttgtctggcaacagactgtgcagtcgagtatctttgtttcatttactgcctgttactcgaccagtcactcgacctcacccagttctctgcaaagagctttgttggtagagtgttttattgtttctgcttgaatttctgttttctgcatgttcacttaggactcctagaacacgtcaaaacctgttattgcttggcttgacttagtgacttctgatcacatcttgattgttagcatcacacccatttggattgacaaactaaaatactacaacgacatgattggtgtttaaggataattgactaaaacctattatccatttggcgcctttgccaattgggtgtttgtttgttacatttaagatttcagacttgcttagatcaagttctttttcaattttcattttagttactaactatttttttttttttttgttgtcttgttgctccaggtacacctctgctgtatgtaaactcgatcaacaggcaatcagaacctccttttcgataacatcgaccgcatcgctcgcaaactcagataaaggagaaacacagtcaaccttttaccccagcaactactcgaaatggctgacaaacagaatcaacagaatggtcctgccaacatcggtgctggagatgcaccaagggaccatcgtcagaggaaaggaattgcacctcctgctatcaagaacaacaacttcgagattaagagtggtctcatctcgatgattcatgggaacaaattccatggtctgccaatggaggatccactcgaccaccttgatgaattcgataggctctgcaacctaacaaaaatcaatggtgtcagtgaagacggattcaagctccggttgtttccattctccttgggcgacaaagcacacatctaggagaagaatctgccacatgactcaatcaccacctgggatgattgcaagaatgcttttctagcaaagttcttctcaatgccaaaactgcaagactcggaaatgagatctctggcttttcatagatgactggtgaaagcttctgtgaagcatgggagcatttcaatggttacaccaaccaatgtgatatggttcaaattagctagaactactctctcaaataagagattaattgcagttatttaagatcgaatcacggagttcttttgtttaaacaatgagttaaatgtcgagattaagctagtagggtgtaagtgaaatagtaagtaaacaaagcaagaaaacagcaatattgattgtgttgtgaacgtttaggaaaagagctaggaacagggtattctcaggaaactattggttagtagatctaatgaaagctaggttgttatcaaaccattcttaaactcaaactctaattatggaataaccggtaggcgtgccgcgaaactctctatacctatagctaataataaccggagaagccgagaaactatcaacctaaatatgcattcttaacgagttcaattgttcatcttagtagataggccgattcttattacacacctataaaccagactcatcaaataatagatccaactacagatacctatggcgggcatatctattgtctagattcaagatctagttaattactctagatctagcattaaacataatttttttttttttttggcaaacattaaacataattaaagatgaagaattctatagataacctagcaaagtggacaatctactaaaccatatgaatccctaatgagaaaccctattcctaacaagcagattactcagacatattgaatgaagcaaacaacatattcgagtgtgaaagcataaacacagtaagtagagaaggggaaagaagggatctcttcactgtattaagatctgaataaaactctgaaaaacaatcgatgaatagcttatgtctcttagtaacagggatttgcaaaagcttgataaaagacttgataaaagaaacttaggtctaaaaacaatatataaaaccctaaaaacgtccagggactaataatacaaataaggaagtcttctgaggcaaatttcctcttatgtaaacttgaaagcgtcatggacttctgccgggccgaaactggtgtcgatcgacaccaagagtgtgtcgatcgacactcctcgctgattcctgaaccaaaatcgtccttagcttcctttttcttagcttttgctccaaaatgtctctttatctccattgttgtcccattgcatagaatacctgaaaagacactaaaaagactcgagaaataacataaagactcaaaatcctatacctaaaacatagataaaatcagtgaaaattgggttatatcacaataccctcatcatggcttcaagaaagcctctctgctcagcactctttacagaggagttctaccacgcatcagaatgcttctggataccgccagcaatgggaatttccagaacaaggatgttgaagaaggccgggaattggttgagaaccttgctcaatcagatggtaattacaacgaggactgcaataggaccatcagaggcacagctgattccgatgacaaacataggaaggagatcaaagcactgaatgacaagctggacataattctacttagccagcagaagcatgtgcacttccttcttgatgacgagcagtatcaagtccaagatggggagggtaaccagttagaagaagttagctacatcaacaacaaccagagtggctacaaagggtataacaacttcaagaccaacaaccccaacctctcctaccgcagcaccaacattgctaatccacaagaccaagtgtatcctccacagcaacaacaaggtcagaacaaaccctttgttccctacaaccaaggttttgttccccagcagcaatttcaagggaacttcagccgcaaccaccacctgtgtttgcacctcagcaaaaccaaggtcttgctgctcctgatcttgacatgaaacaaatgctacaacagttgcttcacgggaaagcatctggctccatggagatagctaagaaaatatctgagttacacaataagttggacagtagctacaatgatctaaatgtcaaggtggaaacactgaataccaaagtccgatacttagagggacattgcatcttcttcagctccaaaacagataagccaacttccaggcaaagcaattcaaaatccaaaagaatatgctcacttccaacttgagaggaaccaaagacagtcactgaggacagtgaagatcaagatggggaggatttcagtctcggtaaagatcgagctgacaaaccactcgagcagccacttgaccagacactcgagcaaccactcgagcagccactcgaccacgttactcgaccaaatactcaaccaaccttcctagcaacatcaccaactgctccaaaaccagttgttgtcaagaacatagaaaaggtctttgttcctcctccttacaaaccacaacttccatttcctggctgtcacaagaaagccttggcagataagtatagagctatgtttgccaagaacatcaaggaggttgagttgcggatacctcttgttgacgctctagcgctaatcccgaactctcacaagtttctgaaagatttgatcgtagagagaattcaagaagtgcaagggatggtagtattgagtcattaatgcagtgctatcatacaaaagaagatcattcctaagaagcttagtgatcctggttcattcactctaccatgctctttaggtccattgcctttcaacagatgtctatgtgatttaggagcattagtcagtctcatgccgctctctgttgccaaaagattagggttcactcaatacatatcctgcaatatatcccttatcctagcagacaggtcagtaaggatccctcatggtttactcggaaacctaccaatcaggattagagccatagagataccaactgactttgtagtcttgaagatggatgaagagcccaaggaccctttgattctggggaggcctttcttagcaactgcagaagctatgattgatgtcaagaaagggaagattgatctaaaccttggcaaagactttaagatgacctttgacgtcaaagacgcgatgaagaagcctactatggaagggcaactcttttggatcgaagaaatggatcagttagctgatgagttactggaagagcttgcagaagaagatcaccttaacagtgctttaaccaaaagtggtgaagatgagtttctgcatttggaaactttgggataccagaagctgtactcccataaagcaatggaagaattacaaccttctgaggaattgaatggaccaccaacataggtaatggtaatgagcgaagaagggtcaacacgagttcaacctgcacactcgagaacatactcgaccaatgactcgacctcgactgtcagcgactctggagagctgatcattccaacttaagatgactggtctgaactcaaggcaccgaaggttgatctcaaaccacttcctaaaggtctaaggtacgcattccttggtccaaactctacttaccttgtgatcattaatgctgagttaaatgatgatgaagtgaacctgctattatctgaacttaaaaagtataggagaacaattggctattcattatctaacattaagggaatttcacctagtttatgcaaccataggatccaccttgaaaacgaatcctattttagcattgaaccacagaggaggttaaatcccaacttgaaagaagtagtgaaaaaagaaattttgaaactgtttgatgttggtgtcatctaccctatatctgatagtacttgggttcttccagttcattgcgtccctaaaaagggtagaatgactgttgttaaaaatgaaaaggatgaattgatccctactagaactataactggtaatagaatgtatattgattatagaaagctaaatgctgcatctaggaaaaatcattttcctttaccattcattgatcaaatgcttgaacggttagctaatcacccatactattgctttcttgatggatatagtggtttcttttaaataccgattcaccctaatgatcaagagaaaactactttcacatgttcttatggaacttttgcttataagagaatgccatttggtttatgcaatgctcctgcaacatttcagaggtgtatgacctctatattttaagatttaatcgaggagatggtggaggtcttcatggacgatttttcggtctatggcccctctttctcctcttgtttgttgaatcttggcagggtattgaccaggtgcgaagagacgaatcttgttctcaattgggaaaagtgtcatttcatggtgaaggaaggcataatgttgggccacaagatatcagagaagggtatagaggttgacaaaggaaaaattgaagtgatgatgcagttgcagccaccaaaaacggtgaaggacatcagaagtttccttggtaatgctgggttctgcaagggggcttttggtggccaataatgtataaggacgctcagaagttcgtttcaaaatgtgattcatggcagagaaagggaaacatcagcaaaagaaatgagatgcctcaaaacccactcttggaagtggagatctttgacgtatgggaattgattttatgggtccattcccatcttcatacggtaacaagtatatactggtcgtcgtagctattgctagtcctaccaacaatgcaaaagttgtgctgaagctgttcaagaccataatcttctggagatttggagttcctagggtagtaatcagtgatggtaggaagcatttcatcaacaaagtctttgagaacctcctgaagaagcatggagtaaagcacaaagtcgccaccccttatcatccacagacaagcgggcaggttgagatctctaacagggagataaaaacaattctggaaaaaactgttggaattacaaggaaagactggtctgcaaagcttgatgatgcactgtgggcttacaggacaactttcaagacacccattggtacaactccttttaatctcctctatggagaatcatgtcacctacctgttgagctcgagtacaaagctatatgggcggtaaaactcctgaactttgacataaaaaccgctgaggaaaagcggttgatccaactcagtgaccttgatgaaatccgtttagaagcttatgagggctctaaaatctacaaggagagaattaagcttttccatgacaagaagatcatcactaaggattttcaggtctttccaggaaagcttaaatccagatggtctggccccttctttgtcattgaggtccgtccttatggagcagtcactctacctggtaagagtggagatttcacagtaaacggttaaaggctcaagaagtacttagcagatcaaatccttccagaggtgacgtcggttcacctcaaggaacttcttgatgattaaaggagtaaaggagtcaagctattgactttaaacaaactcacttggggggaaattctatgactatctctgtaaataaacttttattttcttgttatttttgatttgttttagttgtgtttttggttttcaggaacaaaggaacgatgtggagatagagtaaaaattcaaaacttttactctacagaagaccaggaaatcgagtgtatagcatggtggagtgcaaaattttgaaatttttttgttgcatctggagaccctgaattcgagtacataagtcgagtatatgtgatgtttaaaacccaaaaaaatttaaatcatcattatactcgaccaacaggagctacaaagacttgcagggattttgtcaagtttacagtagatttccttctgttttcccagtcaacagagtgtggaccacacgctgaagataagatggagagagaatctcaaactcaatttccaccactccttttgaaattttactcgaccaacctctattcaattttccatcactcgaccgcaagaaacaattctctgaaacctaagccgcactcgacctcgctgaaaccaatcgaccgtcgttggagagaattactcagccgccgcagtcgagttccaagtttcactcgaccaccggttttgtttcaccgtgaatcactcgactgctacgccaccgacactccaatttttctacttcaccacaaatcgccgcctctcactcgaccacttcacttcaccgtcaaagtctcgggaactactcggtaacaactacagtactcgaccgtcgacttgtggtttcgtccttgccaattccggctcaccgaagaagtactcgacctctggagccaaccactcgaccgacccttcacgtttcaagattccaggcttcaattccggttcactgaggtatcactcgatcgctggtgctaggaaatcagcagatccactcgacttcagaaaagttactcaaccgcggtctctactctactcgatccaattcgtgtaagaggaactcgagaacagctcagtttactcgagtactagattgtactcgaccaatttggtcaatttcattgcctgttgataacaattttggtttcattgttatctttgagactaacctattgacatttgagttttgagttctaaatcttcttgcaggagaatcatgagtaattacagtggcagttcttcggttgatcctgactataacatggatgagacagaacgagaacagagagaatacgatagcttcagaagaaaagctgagatagctcgagggaagagagcaatgacagggaggtatgagcttatagatgtggatctagaagacgagtacatgcctgagcatactcgcaaagccaccaaacttctgcacaaacctaatgtattgcctgctgaggagtatatcaggctcttcaaactgaatgagttctgtagcacagggtatccatgctcgaccacacttgctcaatttggattgttggaggatgttcagcacctgtaccagagttgtcatctggacactctgatggcttatccctatgtagcatatgaagaagaaacgattcagttcctctccacactacaagtggagctttaccaaggtatgacctctgatgatttggaatgcgaaggattgggattcttgagattctctgtgtatggtcatgagtataggtaatcaatcaagcgcttcgaaggattgtttggtttccccaatggaacgggtactaagcccaagtatgatagagaagagttgaaagacttatggatcacaattggcagctctgtaccgctgaattcttctaggccaaagagcaatatgatacgcagccctgtcatcaggtacttccagcgttctacagccaatgtcctctactcccgagagatcacagggactgttaccaattctgatatggaaatgatcgctatggctctcaaaggcactctccgccaaactaagaacaaaatgtctctccaaggtgaaatcaatgacacacctctctctgtacttcttctgatccacctgtgtggatacaagagctgggctgtcaacaataaccataagagaatacgaggcgctctttgtattggcggtgttgtgacaccgattctgatcgcttgtggagtcccaatcacatctgatggactcgagccacgggcaatggatatcgagcatctacgtcactgcgaattcgtggagttcgcaatggttggcgacatgcaccgtttcaggtttgagcactctacggataagagagctagcatccttctccccagcccagaggttacacgcataatagagggagataacattgattttaggcctgagcttggaaacctctactatgagaacgctccgccattggatgaggatgatcttatagaagaagctgctgaggatgggatggatgaagacagagcagtggagtttgacactagcatgtatcattttagtgaacatgtacctccagcgagggagagcaagagcttgagtgaagctcataggaacaatagcaagctgcagaagtggtgcaagaagcaggacaagctactcgccaagtgcctcaagactatcaagtttctgacggatacgctgagctgttcctcttacactacaaatgttccacagggacaacctcctctagagatgccatcgaggagatttgatgagcctgagccaagtcagcacaggcctgagcctagtgagcagagagtctcacatgtccctgctagacattcatcattcgagtctcgggagcacaagagaagaaggaaggctacactcgttcgctctagcagcagatcacgccttattcactcgaggagatcactcgaccacggtgctggtcgcagcagaagaagagaggtcgagtatcctcagagcggtgttggccgccatagagctgatgaggtcgagtacccacatgctggagctgatacagaacagggcgggtcgtctatggcctgggagcaatcacaggcagccattgacgaccaactccgttcattctttgagtgaggtaagcgcctcacttcaccattgtattatatcatctcttgtgatttgttctttattttgtttctgtgattggatttgtcctaagtactctcttccaagtttagtcacacagtggattgtgtgttttaagtttgggggagggctcaggaagtgtgtgttgcattgtttatactcttgagtctgcattcatcaaggcataggaaaaaaaaaaaaattgaaaaattcaagaaaatgatttcacaaaaatagagtgttcatgtagttgcatttcatttaggatcgagtctagagtgtttcatttaggattgttgcatatgcataggggataatgatgagatagccttgtaagcattttggttcaccggataaactcagtgccctcgttgctagttgtctgttgcgtagtcaatgaaattgaagtaaaactgaaccatgcctagattgctctactcgaccacactgtcatgatctgataccattccctatcaatttgaacctgaatttgatctttaattatcttgtctgcatcaaatttgaactcatggataccctaaaatacctggattttcttattcattttgatcactcttgttaatccaagtagctgactctccttattaaagcagttaacccgaactcaaacctagactttctttcaagccctatatcacttgtgagtgtttgtgaggtcttattccgattaagcttggtagaaagtgttaggttcgtaacgatagagatagtgtctcatggagttctagttcgcatttttcggactagataggactaggtgggcgcttatactttgggttgggatgtgtcttaaagaaaaaaaaaaaaaagggttgattcattgatgagaaagggtaaaagactctaggtgaagtaagctaaagaagcaaaaaagtctagtaaaggttttgagatatgtaaagaaaagaaagagagagttcttgttagcaattgaagatgggcaaaagccctcggctttaaaattttaaaaaataggaaccttagttgtcaaagaaatccaaatccgctagatgtatcaaagtgttgagaaagcttctcctaagagttaagagagaagaaaagaatgattagaaaaagggcttaaaggattcatgaatgcaaagggtagagttaagttcttatactgggattggagatgggattaccattagagcttcatttgatatactctgggtagatgggatcttatctctgtatgcatagcttgggacttacctttagcattctactaaagctcaatcattttttgagagatcccctgttgctgaagcctattctataagggaccatctttgtctcttggcctttaccttagccaaatgagttcattgatgatacattgcttgattcacgttcgagaactaatgaatgttaaagggattggtagatttgaaaacattatgtaggtcgagcaaatgagtcggattgattgataacaaggcttggctaacctttttgagtagaattcgatcatatcgtaacttagaactatcaacttggacattgatttcatctgatatacctgctttggctctgagtccccgccttcaaacctcacctccagcttgttcttaattgtttgcttagggcaaacaaagactaagttttggggagttgataagtgtgcattttgcctgttttgagcatccatttgtcatcactttagcatcatatcatcactgttttatatcatttgtcatcatttgtcatcactttgcatgtttaggatagttttgcatgcatgttgcatatttgtgttgttttcaggtgatttggagctgttgacgagctaattcaaaaaagcggacctgatcatgtcaaaccactcgaccccctggtcgagtagacgcttcacgacctcaaccgaccactcgacccccctggtcgagtagaagacttgaccactcgaccacctggccgagtatgatgtgatcatggaaagcacaaaggacttggaatttgatcaagagcttgtagccgcgaaagagcttgaagcagaggagcagcttgaacctgaggagcattttgaagcagaaaatgaacttataacggagaaagagtatgggaaagatgttatcttaacctcattggttttgatacatgatcatcaaatgggcatgtgtctcatttgtactctttttcccttgtcaagttttgtcccaatgggttttcttgacaaggtttttaatgaggcaaatgattcacattcaaatcacccatttgatgatccaaaccatggtataactttcagaagttggcctcaaggaatatatatcaagtccaagtcattttatgcccattacaagcccaagaagagcccaaaccaagtggttaatttgatggtcaagaggagtgacgaaaatggaagtttaagggtcatctttaaagtgaaagagttttttctattcaaattctatctttaatattatgttgtgtttctaagcagccttggagtatgttccaagacttgtctctttctcttcttttcttcttctctttataaactcatgtaatctcttatgagaacccatctatctttttatcaaaactctctcttaaaatagatcatggatccattttcgtatgtcaaattttgatctttctcgacttatcaaaaggcttttccgcatccttttgtggcgtcattcaatccatcatctcgtctttgagtcgtgtgtcgtctctattttgagatatccactccagatcttccaagtgccgaaattgggattgattcctcaccagcatcatatcatgtggtataagagcacacttggaggttgagtcgtttctgtctgtcatcttgttttaattttcataattatttggcgtgtgctacgttacggctgatttgtaaaaggttgcctgagttatacgataacccagacaacggtatgactgagttaaggaatgttgtctgagttataagaatttatagcctaacccagacaacgttatgtcaaagttatgagaaaacggctggcttattccctcgacacagctgagttatatttttggacggtttagttatgggatgatgtgacggctgaattatgatcgagtgttataaatcagccgtaaaggggaagattactaaataacttagccttgttacggcagacttatgtgcaaaaaaattaattactataatagcatgcagttacggacgagttttttaaacgttacggctgagttagttgagttacgacattacacagctaacttaactttgttttttttgcttttttaattacggttaaagtattcatgttgcgactgacttatagatttgcttgatggctgagttatcaaatgttcgtttggtggcttacttgccacctcatcaattcaaaacgacgtcggctgtaatattccatgtcagcatcatcaatggaaatacgaaacgtcccttgcttctttatctcgtctttccggtctgtgtttaacgcctgagcgttggaacatcaccgaaacttctatctaatcatctttttcttcgttcatcttcaatttctttcatctttctctcgatatggctgatcccgtttcggtcatagttgtttccggtatttgggttaagaaatagatattcgtatttaaccacgacgaaagagggtgtagagttgtgcagctagaagcggaaacaacgcacgataggcttttgaagctggtggtcgatgattacggatttaatcagtcgacccatcagttaaggctaagttacatgttctccaacaagactcagaaaaatatgtcgttcgatacttcatcagtgtatatctctaatgatcgacagttgcaatgttatctaggtctctgtgtggagtttacagcgaaagagtcaagggatataagtcggaaggatggatcttgaggaaggatgaaacggcctattgaatctgactcaagagtagaatctagattcgaagtttcgggtaggccaacgatacagtagcaaattcgagttggagtatcgactcaaactttttgcgataagggatggatttgattttgatgtaccaatatctaatactactacagtgaattaccagtgctgggttgatggatgtcgttggagtgttcgtgcatctagacaaggggatgagccttatttttatgttcgtatatacgattcggaacacacatgttctgtgacgaaacgttctgatcgatcccaacaagcaacacttgatgttcttggagttctttacagggactatcttggtgacattggtccggatgtaaaaccaaaaacagtcaaaataatcatcaataagcattttcgagtaaaggtaattacaatgtttcgactgacttattattatatggctgacttatagatatattacgggttacttatggatatattatggctgacatataattacactccggttgatttatgacccttttacagctgccttaacatcactttgtggctaagttgtgttatagtttgcctaagttgtacatatattatggctgacttataaattaatatgtttgtgttaacagatgggttattggaagtcatacaagacattgagggtttacaagggagctcactctaggaacccttgatagtagttttgaagaactgccttcttacctatacatgataagacagacaaatctgagtacaatcgcacgtcttcaaattgatgagagtggaagattcaactatatgttcattgcttttgttgccagtatcgctgggtttcatttcatgcgcaaagttgttgttgtcgacggtacgtttctccatggtagttacaaagggacgctcctaagagccctagctcaggatggtaattttcagatttttctgttagcttttggtgtagttgacactgaaaatgatgaatcttggcggttgtttttacgcaactcaaagttgttattcctgacgcaacggacctggcgataatctcggacagacataagtcagtagggaaagcaattggtgaagtgtatttgttggcttctcgtgggatttgcacttaccatttgtataagaacattttggtaaaattcaaagaaaaacatatgttccctctcgtggaaaaagcggcaaggtattttaggcggactgattttgatgacgcgttcaacgagattcaagagcgtgatcctcaactacatgcatacctccaaagagcgggtgttcaaatgtgggcgtgtgttcattttcccggtgatagatacaatttaatgactacgaatatagcggaatcaatgaacacaacaccgtcaaaagccataaatcttcccatagttcaaccgttagaagcgataagatagatgatgacaagatggtttgctgaacggagagatgatgcgagcacggagcaaactcacctcccacatggtattgagaaactgttacaggtaactcagctgtaactatgtgtataactcagtcctcaaataatgataaacaagacataataagaataactcagccataacgtctttgtttttttttccttctgtctaataagcatgtgtcaagacttatggatgtacaaacgattgatgcttttcgcgtacaagtaacttatggaacatctttgcatgttgtaaatgtggatgcaaaaagaagcgcatgccgtcttttcgagaaagagaaattaccatgcatccatgcaatcacagctgcaaagcatatgtgtgtgtctcgtatatccctgtacagtccttactataagagcagttatttggtcaatgcgtacgttggtgcaatcatgccttcagatacggaagtccctgttcctcaaattgtaattgaccaaccgtgcttacctccgattgttgttaaccaacagggcagacccaagaaactaaggatgaaatcagcactagaagtagccattgagaataaacgccctaggaaggaacacgcatgttctcgatgtaaagaagttgggcacaatgttaaaacttgtcgtgcatagtattgtttgcacgaattgtatgtttcttctttcccttgtttggtaaatgttatatgtatttcgtgtcaattgtagactctaagcaccataatatttgcaatttctttaacgtcccggctgatttatttttgataatgtcttgtcgttttaaatgttggggttgagttagttaaatatggaagactaaaggttgggccattttatatgttgcggctgagttatctaaataaggaaattgaaaggttcagttattttacatgttacggctgagttatctaactaggaaagtcaaaaggttcagtcattttacttgttacggctgagttatctaaatagggaagtcgaaaggttaggtcattttacttgttacggctgagtcatctaaatagggaagtcgaaaggatcggtcatttcatatgccgttttacgactgagttatgcggttttacggttgagttatatttgaattatgttattttacgactaagctatggaggtaggacaatggctgagttatctgaattatgttacttggcggctgagtgattctactatttagctgaggtatattacagatcaaatatgaacattttgaaggctaagacaatatgaaacttcccataaatatatgtttgaaggatacataggaggaaattaaaactaaacaatatgaaacttcaagcagcatgacccgattccttccatcttgcattagtcgacggccatttttatctctaccacttcttcaatattgtgtttggtagtcacatctgatatggtcgaacgattgaaaatcgtcacgtgttgggggccagtatgatacctaacgatcctccaccaagtgagtgcaataacaatattgtcattgcgaaaagatcgaaacctactatcgaagtcaaccgccatttggccaacaacctcacatttccatgtcaccttgctgaaacagaatagagcattgttacaattatacccctctcaaggaaaatacatgatgaaaagaaagaaatttaaaaggaagtgatcgaaagaaattgtactatttgtccataatcttgaagggaagtatgaatccgtttatctcgacaccgttgtgtgagatatttctcatacatccgatatcgacgtgcaccaactaaatcttggagtatgaaataaaagttaaaaacatgcatgtcaaaggtgaaagtatgaaatctgcattccatacgtattacttaccgaccaaagtatttgtaggaatgattttttcaataatgttgtcaaaaggtgtgaatctgttaagtaaaacagttttccttgggtcggacattatgaccaattgcttccatgaactcaatcatgtagtggtgagttgttgctcggattagtccaccgtttgcaatgacacgaaaagttgagattgatttccattgattctctttgagcatatcacagtaacattgtgaaaaacgtcttccgattataggctcaatttgtattccctatgaaaacaacatcggagggtaagttatatagggaataagataggaataaggttaagtatgacttgtaagaagagtgaagattccattaattacccattcatcaacaaagacgacctgtagttcgaatgtgttatctctgtataactttatgtacgttctaagaaccataacacaaattgtccatccagttatgaaaggagacaagtcgcaaaaaccgtggaaatacaccatgttgaaatttagagtcgtagaaaagtgaagaaatattttgattgtgatattctgtttgtgagagtttagccttcgggagtttaaaggagcagctgtttttataggcgtataaaaacgttgttaattgggctggatataaccgtaaatcggttagttagcaaatcgaatgtaaccagcagctttataactattgacaactcagccgtaatgtggattaactcagccgtaatagctcattttcctgcaaaactcagccgtaaccatttaaaatttcccgccaaacagtcatagacgcaacctttcgtattcatttctctatttttttttgtataattctacataactcagcaatattgttacatgttacacctaagttatctaaatagggaagtcaaaaggttctgtcattttatatgtggtttacggctgagttatttggtttaacggctgagttatctaaacagggaagttgaaaggttttatagcattataactattgacaactcagctgtaatgcctggtaactcagccataacaatatattttaccgccaaactcagtcgtaacatagaaaactttcccaccacacggtcagaaaactcagccgtttcattgttacatttcctgccaaactcaactgtaacctagaaaactttcccaccaagcggttacggacgcaacctttcacattcttttttttcttatatatatgttacttcatctcatcatttaggcgtctcatactctcttcctaacgacatggtcgttgttcctcacattgacagacagtttctcaaggatgttgaagccgtattcaccgctcgtgctcgcgtgaatctcccagttccaaaccctggcttgggtacatgggttgacagaaccacggatacgtggttcagattcaatcaccaactatctgtcgcgattgcagatatacttcagcgcaactttcactatgcgtggctgacgtaccagatgattctcgttgtttttaaggcaagatggtttttctcctcacggtaagcatcgagtttgttatttaaagcacttctagtaaaccatataccaaaaaattcatactatttgctctctttgtagcgtaaatacatgtgggattcaaggcacactctaacggtgtggacgcagtttaatttggtggctagaacgttgtaccgagacgacaacagtttggaatgatttggttgacatgtttaatgaatttggcccagatgatgtcggtttcatgtcttgagtgcttttgtatctcttacttgtcttcccttttaaacttaacaactatgtttttatatctccttttttggtaatggttttaaatctcctattatctacgattgtcttttcactataatcagttgttatcgcttgatgtcacttgttaaattttatcataatttaggcgtaactcaaacataactcagccatatcaattgattaactcattcgtatcaatagattaactcagacacaacattataataactcaatcatagcgttgaattaactcagccacaacattacccgtataactcagtcatagcgttgaattaactcaacaacaatattaacttaactcagcaataacattatattaactcagccataacattagattaacatggccgaacacacaataccatttcattacaagccaatactaaaaataaaatgaattaaccttagaagcaagataaacatcaaacacataatggaatccaacagcaaacacatcatccaaacatcaaacaaactattagccaagaagaagcctttgttcgttggtttttcggaacattaggataccaagtacaatgacattgataataaagccaagacaaaaacagcaaagtttgatcatcaattgccatttctggttttccctttcgctcctcattacttcttccttcagttctttcaccatcccctgtaatgcttctagctcgactgcaaccggacttggcagcgtttatctcactgtccatggtggacaattttggccaactgtctacaaccacttcgtatgtaccatcttcgacccatttaaacaaatggtcctgcattttcaatcactaaccagttaacaacgaaaccaataaaacccaaaatcaattatacttacatctttacgcgtatgacaacggaagtatggtcttccagggttctttgctgacgtcgatgtatagatgaccacgtctaatccatgatgacactttgatggtaacccacgtccccaacggcttacggattgcgtactcgaaatcgagttctcagaattgctactcatttctttagctatagcttgggagttcagagaagaaaaataagaaagaatgaagctccagatctgaaaccagaaattggatttttctaacttaggttttgattttggagatttataagtggggatctttcgtttatgtcacaatgacgtcttatgtggtcactaatggagactctttcacaaccgacgtcgtatctggtcaataacagagactctttttctctgtattttgacataactcagtcgtgacgcaggcataactaagcaatgtgactgttataactcggccaaaccctaaaattgctttccttaagccatcagttggtacaatcaagtaattaacatatcatattcactttccaactagtagaatcatgaaactagctcatattctgtatactttatccgacatcatactttatccaacatcatacccaacaacatcattcctagaagtttggtcaacataatttgtcaatagacccttagtgcaaacccaatttattttctgttttgatattatagatcttgacactaatagaaccaacaatttggtggctagtttgaaatctcataataacatttggtttctcataactcgatcaaaccacgaaatcttcttgcattactcagccgtgacgtattggtattccaccgccaaacagaaaatttgaatatttgagggttcagttattcgaactcgtttgaattattttgaatattaactgttggcttgtgttcgtgtgaatatggaaccaatcattattggcggttccccataaaaacactttttgtaatctcgataatgataaaataatggtttatgaacccattgagatgactcaagaatttcgctatttcgattttgctagtctttggaacagcgtagcgacggataattcagaatcagaataggtccaccagttcaaacatacaatattaatgtgttgttactcagccgcaaagcttttataacttagccacttctaaatttattcaccaatatttgattagtgctttttagcatacacgactatatagattaagtgctttagagtgccctattaattgaagacaagatgatggtgcagggatctgtatgtttattcctagagaaattatatctcttatttaggaataaactcagcctaaacaacacgtaatattctattctatatgagtaagggacattagtaaaaccaacaataatgcgagtatacaaatgggcctattaataacatttggttttctcataactcggtcgagcaacgaaatcttctaacataactcagtcgtgacgtaggcatagctaagccatatgactgttataactcggccgaaccctaaaagtgctttccttaagccatcagttggtacaatcaagtaattaacatatcataatcactttccaactagtggaatcatgaaactagctcatattctatatactttatccaacatcatacccatacattgttaagctctacctaacttccgttcctagaagtttggtcaacatagtttgtcaatcgactcttagtgcaaacccaatttattttctgttctaatataatagaccttgacactaatagagcaaccaatttggttgctagtttgaaatctcataataacatttggtttctcataactcggtcaaaccacgaaatcttcaggcatatttcagccgcgacgtattgttattgtaccgccaaacagaaaatttgaatatttgagggtttagttattcgaattaatttgaactcgtttgaattattttaaatattaactgttggcttgtgttcgtgtgaatatggacccaatcattattggcagttccccataaaaatactttttataatctcgataatgatataataatgcaatctcgataaactcagcctaaacaacacgttaattctattctatttgagtaagggacatcaatagaaccaacaataatgttagtatacaaatgggcctattaataacatttggttttctcataactcggtcgaacaagaaatcttcttacataactcagtcgtgacgcatgcataactaagcaatgtgactgttataactcggcaaaccctaaaagtgcttttcttaagccatcaggttgtacaatcaagtaattaacatatcatattaacttttcaactagtagaatcatgaaattagctcatattctatatactttatccaacatcatactttatccaacatcatacccaacaacatcattcctagaagtttgatcaacatagtttgtcaatcgacccttagtgaaaacccaatttattttctgttctgatataatagaccttgacactaatagagcaaccaatttggttgctagtttgaaatctcataataacatttggtttctcataactcggtcaaaccacgaaatcttcaggcatatttcagccgcgacgtattgttattgtaccgccaaacagaaaatttgaatatttgagggtttagttattcgaattaatttgaactcgtttgaattattttaaatattaactgttggcttgtgttcgtgtgaatatggactcaatcattattggcagttccccataaaaatactttttataatctcgataatgatataataatgcaatctcgataaactcagcctaaacaacacgttaattctattctatttgagtaagggacatcaatagaaccaacaataatgttagtatacaaatgggcctattaataacatttggttttctcataactcggtcgaacaagaaatcttcttacataactcagtcgtgacgcatgcataactaagcaatgtgactgttataactcggccaaaccctaaaagtgcttttcttaagccatcaggttgtacaatcaagtaattaacatatcatattaacttttcaactagtagaatcatgaaattacctcatattctatatactttatccaacatcatactttatccaacatcatacccaacaacatcattcctagaagtttgatcaacatagtttgtcaatcgacccttagtgaaaacccaatttattttctgttttgatattatagatcttgacactaataaaccaacaatttggtggctagtttgaaatctcataataacatttggtttctcataactcgatcaaaccacgaaatcttctggcataactcagtcgtgacatattggtattccactatcaaacataaaatttgaatatttgagggtttagttatacaaatcaattcgaactcgtttgaattatttttaatattaattgttggcgtgttcatgtgaatatggacccagtcattattggcggttccccataaaaacactttttgtaattttgataatgatataataaagaatattatttcgtatggaaataaggatgacaatgaggtacggcgaaatcaggaggcgcgataagggcgttctgatcgagtgtgattgcaatgctaaagttgtcgttgccacttctcgtgatcctgttacaagcggaaaactgtatttcagttgtccgtatgaaatatcagttgtaagcatcttttttgagttatgattctttattttatttcttttatttttgtatccctatgaatcaacctcttatttttcagggtcccggtcgaggctgcggtttcaagagatggtggactgttgcattgtgtgacgagtttgacatgataaaagaggagactattgtgatgaagaaggatctggaagcagccaataagcgcgtcgaggctcaggcggaaaagatcttttttatggaaaagaaatttgaaatgttagagatgaattatgagcttgaagaagtatctgtgagcatagctaaatttgattttttcaatttggacttccttgtactgtcaatttaattaagtcagccagtcttccgatttatgcgatgataactcagccatcacgttataataactcaaccaaatatcgaattaatctacgataactcagccgttacgttacaatgattcagctatcacacacgaataactcagccatcacacacgagtaactaaactaaacatcaagttaatatacgataagtccgcctttacgttagcataactcagccatcacacacgaataactcagccaaacatcaagttaatctacgataaatccgccgtaacgttagaataactcagccatcacacacacgtaaaagagagactgattatgaatcatacacacgaataaaagataaaaaaaaaaataacataaataacatagaagtactgcaattaaataacataaaataaaatacaaataacatggagatgtaattttgttatgaccaaacaatcacatccatcgccaccttcattcttcatctgattcaaaacttgaactctcggtcgatccataccccagcttatcccaatcaatactaatcaccttgaatgcattcttctccttgtaagccttgcttacctgctcctccactttctggaactcttcctccacgttaaatccgtccttcatcctcttcattttccttaggagtttaagtttcgcttctttctcatgcagtttgagatccaataattaagtattcttcctccatctcccttatgttgcatctgatgagagagatgatgcctttgaaacgtctctccgtttcatgcagccttctgctggaaccgtcatccacacacggcctcttgttggaaccgtcatccacacacggcctcttgttggaagagtttcggaagagtttcgttgctcagagattatagagattaattggtaagaatcgagaagagaaaagacaagagagaaccagtgtatgtatagtcctctaacgaagtttgggttctttgatataagcgacgtttgggtccttgactattgagttatatttataagaaggtcaaccggtgtatgtatagtcctctagtgatgtttgggttctttgattacagcgaagtttgggtatgacaagtcagcccccacgttagactaactcagccgcaacatcgaattaatatatgataagtcagccgttatgttagaataactcagccatgacatgatctgtgcgatgacaagtcagccaccacattagaataactcagctaaacatcaaattaatctacgataactcagccataacacgaattgagcgataataagtcagtcattacatcgatttaacctataattaacaccgtgcattcaatttcatagattcatacaaacataattttggttatcaatcctaaagcttcaatatttagtaaaatcacatgctaaaaatcccaaaagacacagacattattcgaaaaagccaattacgtctctagaaaccgtgtaggggtcctttccggtgcttcatcgaagatctctgctaccatcttaacccgtagagcctggatatttgcatcagtatgacatcaaaagaaacaccaaccaataaacattcaagaatctttaatgcgtaaacgccgcagtcccctctgatagtattttgcgggaccattttcttgtccctccgccagaatgaaaattggtcgtattgcgggatacggactttggaaggaatcagttcgttcatcatctgtgtaatcatcctcgtgaacggcctacaagtgataaggttcaaatttccctaagaactactatctcaaataagcgatcaattgcagtatttaaggatcgaattcacaaagttcttttattcaaacaatgagttcaatgtcaagattaagctagcaggtgatgactgaaataataagtaaacaaagtaaaaagacagcatgttggttgtgttgtaaacgattaggaaaagagctaggaacaatgtattatcaggaaactattggttagtagatcgaatgaaagctaggtggttatcgaacaattcttaaactcaaactctaattatggaataaccggtggtgttccgcgaaactctctatatctatagctaagaaaatccggagaagcgaagattattaacttaaacattcattctaaacgagtttgattgttcaccttagtagataggccgattcttattacacacctataaaccaggctcatcaaataatagattcaactacagatacctatgatggcatatctattgtctggattaaagatctagttaattactctagatctagcattaagcataattaaagatgaagaattctacagataacctagcaaaaggggcaatctacaaaaccatatgaatcactaatgagaaaccctattcctaacagcagattattcagacatattgattgaaacaaacaacataattgagtatgaaagcataaacacagcaaatagaataagggaaagaaaggttctcttcactaaattaagaactgaatgaatctctaaaaacaatggatgaatagcttatgtctctctgtaacagggttttgcaaaaagcttgagaaaagaaattagggtctaaaacaatgtatataaaccctataaaacgtccagggactaataatgcaaatagagaaatcttctagggcaaacttccttttctgtaaactcgtgtgacgatcgacactctggctgattcctgaatctaaaatcgtccttaacttccttttccttagcttttgctccaaaatgtctccttatttccattggtgtctcattgcatagaatacctgaaaagacactaaaaagactcgagaaataacataaagactcaaaatcctatacctaaaacgtagataaaatcagtgaaattagggttatattaacaagcttccagcatttttccatcgctctcttttgtatgttctccgacgatgcaatcatagcaatcaatgtgagacctaagcaagttcacatgaagggtcacccaatgattacctccggtttggtggataagatacaagtgatccacatctgttactagaaaagtcctagtggtcatttcatcgagttgaatcaatgaactcccatccgaggccaacttaacagtttttccccttgcagcttttactctctgcagcctcatggtttcctcctcatcttcatcagactcatgcaacatgctagtatcttcagctacccactggtcagtaacattaagtatagaatcatcattagtcttgggacagcagtatcaccgtcagcttttttccttggctttctcatgtgattttggcatttttattgtcaactttggaggcacctttctaggcacctttgtaggagcctttgtagtagtctttcttcctcttttatttgtggcggctagctctttcacgattagcccttttaaggttttctccttaactttagctttcttctttggtgatgtcttcgctttggtatttctcctcgccggcgtcgtagagcgtaaacagcgggaaccaggagacttctcaatgaaatcaatatcaacattgtctccatcagtggtcttagcaaattcgtcatcaagattcctactaacctcaacctcagcaatatcaacatccttctctaccaccgaatctacaacttctttctattgcataaacgtaaagaaaactcaggcattaaataacgaaaactcaggcctatgtataaatataactcaaccgtaactaaataaaaagttatacctcagccgtataatatgaagataactcagctgtaactaaataatagttataactcagccgtataatatgaagataactcagccataactaaataaaaagtaataactcagccattagcttaccggaggacgactagtaacagattggttatttgtagatttccgtggaacttttggtgtctattgagtttggggtttagggtggccttgctcctcttgggttaaaaacatttctctaataaccactctagagtttaatgttgagtcagctatgccagtttggccaattaggcctaccccaatgaccttcagatgctctttcatctgtttgacctcattctcaatagatccaaaccttctttcaaactttgcatcaatcctctcttctacttgatctccaatcacctcccgacgggaggacatttctttgatgcttttatcaacggtgtcaaaccttgagtttaagggagatattaagttggacaccatatccacgaacgacacatctccccgaacatcatgcttgtcctcgtcctcatcagattcgacagctacttccttattattcttcttctttttcttttttgcatctcctccaccagcttgaacaccctcactgtgagagactttctgcttctttgcaggagattcagacacatccgctgctttatctttaaccggtttcttcttcttctcattcgtcttcacatcccaataacctttaacaagcttatccccatgtatgccttcgatcaagtgatcgagtgctgggtcttctacttcatctggccaagtatgaaacagctcgcttacatcatccttcataaccatttaatgcacacgcaactacaacacaagagataataaaacccatcagtatgtttaactcagccatactataactcattcgtcacagaacataactcagccatcacctaacatatttgacaaaaatagaacataactcagccattacagaacagaactcagccatcacagaacataattcagccgtcacataacatttgacaaaaaacaaaacagaactcagccatcacagaacataactcagccgttacataacatatttgacaaaaaacaaaacataactcagccatcacagatcataactcagacgtcacataacatatttgacaaaaaacagaacattaactcagtcataagagagcataactcagtcgtaacacaaatatttgataaaaaacagaacataactcagccataacagaacataactcagtcaataactatcataacagagccaaaaccttacctcaccaccatgcgttttgatatcttcagcaatggccgattctattgttgcacgggtacggttgccaccccatctaagcaacggaatctcatccgctttgactatgtttccaaatcgctcaccaatggtgatgattgaatcatacgcccaagcctgcaacacgaaagccataccactgatggtgcacgtcttgccaataggcctcaacaactttatagaaataacaagggcttcaaatgttgtccgaccccatggataagtgttcaagacttcgtcatcaaaaactcttttggcactctcaaatggtatccaagagttaggatgcatgccataaagtccaatggctagaagagtcaataacccaaacaatttacgctttccaggaggccatactctcttcctattactaagcctcgcctaagttcttcttaacttaggacctttaccggttggtacatgatataggtcaaattaatcctaagaccactctctcaaataaagaagtcagttacagcactttgggatcgaattcacaaagttctcgaatcacgcaataaactaaggttttgaattaagctaagtaaaacagtaattaaattaaagagaaacaaaagtaaacaacagcaatcgattggatggttgtgaaacaagattataaaagcgtcaaacttagggtattctcaggaaatagatgatagtagatctagaaataactaagttgttatcgaaccgttctcgaactcaaactatgattttagagtaaccggtggcgttccgcaaaactccctatacctatagctaagaataaccagagaagccgagagaactttaacttaaacatgcattattatcaagtttgattagttcacctagtatctaaaccagagcccttctatgagcctacctgttctttcttaaatgcctaggctcatctatgatggatcaaatagcaagtacctatggtgggcatacttattatctaagaacaagttctagttagctactctagaactagcattaagaacaatcaagatgaagaatttctacagataacctagcaagggggcaatctactaaatcatctataaccctaatgagaaaccctaaacctaacagaaaaactactcaagcatgatgaatgaagtaaacaacatgattagaatagaaatcaatgaataaaacaagaagaaaatagagtaagaaagatccaaagggagtttccacagggttttgctccccaagtacaaaagagatagaaaatagcctctccaagcttcgggtctaaacattgacctaagaactatatatatatatgtcttaaaaacgtgatgggccttaattaaacataagagaaagttctggaccaaatttggaaatcttcaaaacatccataagttgcgtctcaaaattgccgtcaggtattggtgtcgctcgacatcaggggtggtgtcgttcgacacctacgtgcattttcgtctccggattgcttatgcagcttaagttttctgttgatctccagaatgctccataatctccaaatgcatcccaaacatgtaaagacctgaaaagaactagaaaaggctctagaaataacaattaggctccaaaacttatacctaaataatagctaaaatcggtaaaaatagggttatatcaactcccccaaacttagcttttgcttgccctcaagcaaaacactaaagccgaacccgtggaagaggtttgaaaacaaaggaactcccagcattctctagtgtattgccatgatcattctaacaaaatctatatgccgatcagttctaatcaaattctaaccaacatgtacttctctgcaagcttacacaacattctctattttatacctaagttccacaactatatccaccaggctttcatcactgggtctcatcaaacaagctaacattctagatccttctagactcattcatgtactataccatgatcaatcgaccattcttttatcatttttttctttggtgttctttctctccccgagacttattttgtttttcgagagtaaacaaaggggaactcgcatactggatccacaccctcggcatttttccaacctttgtaattgatcattccaaataatatataataatggggtcataggaaatattcctatccctagaaactatctgaaaatcatctcaatctctcattatattttttttctttttataagaggagatgaacatattctttttatcacattggtctcaatataaggtatgaacaaggagtcaagatctatgaatactaactgtttgaagaggtaaaaggaagagcagtgagattagctccagccttagtggttgaattggaaactaggatatcctcaagtctgttggtttgccatctagttttccaatagtcggattgagtcgaacctcatcattaatcaaccaagcaataatctaaagaatagagatcataattccaaacaaaattttgactcaataaaacgactcaaaaataagaaaaagaagagtaagaataagactcaaaaagaaaaacatagttagtaactgcctcccccagacttaaacgacactgtccccagtggtattcaaatccagagtaagcgaaaaaaataaaagaaaaacgaaaaataaaagaaaaagaaaaagaaaaccatatcagtgggttgcctcccactaagcgcttgtttagagtcaatagcttgactttgatggagtttggggatcaggtggatcagatggaggaaaaaaatacttcctagtagaaccccgcatcatctaaggtagcgtataggcagttggtgtgtgcgctctaccaaggaagtaaggaatgtcagcagagtaggacagaggtatgggtggtctactccactttcctgcacaatcatcaaaagaaagaacaagcactcgacgagaaactcgtggcttgcttaaccgtaaaacagtttttggagatttgaaactcttattgatgaaaccaggaggtttaggaggaggagatgagtacctttgccgtttcggagttgcagcaaagggtagaggtgcagtgggagacgtgactgtagtgcctggagtaccggctctgaactcaaaccgaaaactagctctaataaaaaaatcttgcttagcctgtgtggggtgttgatcgacacaggtaatggtatcgatcgacaccatctctgcacatcgattctcagcaacgaatctggagcttgcttcatgtggatgcttgctgttgctgagtacctgttctgagacaaccattatctttgtcttgtcatcttgcttctctggagcatcatctcgtagcatatcaatctgaagaaggggtgacaatttctctatatcaatcggaggcaactgaagtggagtctcttccatgatacccatgcaatgcatctttgaaatctcctgcttggactgtcgatgcagaagacaaggaacttgtggtgtgaagacttgtctagtaacaggtggagatgcaagacatataggaggagtttgagtccagtgtagatcgacactaggtgagtgtcgaatgacaccactgtctagaatcaagcctgctctgtcaaatgtcaacattgtattgtctgtttggtgctggtgtcgatcgacatgaggtgggtgtcgttcgacaccatcagggtcgactctggtcgatctggctttgtcacagcttggcttctctctggagaattgttggtgtcgatcgacgcagataatggtgtcgttcgacaccatcgggaataagttcctcctcctctgtgaaagtattgattccactcgacaaagtcaaaacagagtcgtcaagattaataggtgtcgatcgacaccctgatatatcgttcgacactgagacgtttcctgcaactggacgagatgaagtttgagctgaacattcgcgacgaaggattgggtttagttgctttccactgggtagtgtgactgcattgatagaggctgatggaggtgagagttcggatatatgagagcgtagattgtcaatcttgctatttagattcgtgtagagagaatcatgtttgctttcgagctttgtttggcctgcaagaagcagcgcaagcatagactccattctggtctctgatgagggtggaggggaagataggagcagaaattgctgaaacaggagtcgctttatttgcggtggctatctcagctgaaattcttcgttcagtgtcaaattcatgtgtcgaacgactagttaaagcattggtaatgaggagtaatgcttcactagtagttcttgtcatgaagttacagtagctcgctgcatcaagttgagcctggtatggcatggctatccctctttagaagatattgatgagttggctctcttggaaaccatgttggggacattctctctgataggatttgaatctgatccaagctgcattcaaaccttctgttggagcttgagaaaacgaagagatcttctcccgcagtaattatgtcaatgaatcatcaaggaagtggatcatgaatgcattcttcatgtcagtccaattcgttagtgaacctggttcaagttgttgcagccatgatgttcctctgcctgcgagagagtgtgggaaaagtttgcaaagaagataattagctggtacaccttctactttgattgaggacactaaatcttcgaagacttctagatgatctagtggtgattcatcagaatgtcctcgaaactttcctcgtgaaacaagagtataattaggcagggtgaatagcaaagtcttctcttgcaaaaggaggtagcaggatcgctgatcgattggagtagaaaagatcagctctgttgaagtcgcctatggtagcaggtctgtttgcagatggtgtcgatcgacacccagttggtgtcggtcgacactgtcgtcgaaatctgccagcagtttgttgcgttccatcttttagctcccctgttataggaaaaagaagaaagaaaatgcgtgagaaacaaaagaaagaaaaataaaagcttagtctaaattctacacctagtctaatggtgactcaaagagatcttcggcaacggcgccaaatttgatataggtcaaattaatcctaagaccactctctcaaataaagaggtcagttgcagcacttagggatcgaattcacaaagttctcggatcacgcaataaactaaggtttggaattaagaaaagtaaaacagtaatgaaaataaagagaaacaaaagtaaacaatagcaatcgatggttgtgaaacaagataataaaagcgtcaagcttagggtattctcaggaaatagatgatagtagatctagaaatatctaagttattatcaaaccgttctcgaactcaaactatgattttagagtaaccggtggcgttccgcgaaactctcgatgactatagttaagaataaccggagaagccaaaagatctttaacttaaacatgcattattatcaagtttgattagttcacctagtatctaaaccagagcccttctatgagcctacctgttctttcttaaatgcctaggctcatctatgatggatcaaatagcaagtacctatggtgggcatacttattatctaagaacaagttctagttagctactctaaaactagcattaagaacaatcaagatgaagaatttctacagataacctagcaagggggccatctactaaatcatctataaccctaatgagaaaccgtaaacctaacaggaaaactactcaagcatgatgaatgaagtaaacaacatgattagaatagaaatccctgaataaaacaagaagaggatagagtaagaaagatccaaagggagtttccacatggttttgctcccaaagtacaaaagagattgaaaatagactcaccaagcttcgggtctaaaacaatgacctaaaaactatatatatgtcttaaaaacgtgatgggtcttaattaaacataggagaaagttctgggccgaatttggaaatcttcaaaacatcaataagttgtgtctcaaaattgccgtcaggtattggtgtcgctcaaaatcaggggtggtgtcgttcgacacctacgtgcattttcgtctctgaattgcttctgcagcttaagttgtctgctgatctccagaatgctccataatctccaaatgcatcccaaacatgtaaagacctgaaaaggactagaaaacactctagaaataacaattaggctctaaaacctatacctaaatcatggctaaaatcggtaaaaatagggttatatcactacacccaattcactgaagaacgctttgtagtccgctttaagctcaaacttttctggaggcagtggatctgtgtttaaacccgtgatatgataaaactcgttcaagccaaaccggatgggttgaccagccacgagacaccaaagctccttcttcagtactcttaactgtctgcatagtagataatgtacagtcttacaaaccatacaaaatggctataaacaagtttagcaattaatccaagcggtgtctctttcagttcatcccatgtatcttgtcttattgattctctaatcatagggaaatctccaagcttgatgttgtgattaatggctttagcctccagattagaatccccctctgggtaaagtattggagggtaatcccttgcttggtcttcagccataaatcagtcgtaaggatacaatacactacaagaaaacaggtaaacgacgactacaatcagcgacaataaacgtagtcgtaacattatacgactagttggcgacggatttacgactcgcctgcgacaacacgaaaaattgtagtcacatagtcgttgttttacgactatcgtatgcagtcggcaaagtgtcggcaagtgacgactatttgacgattatattattggagggatattgttgtcgttgtttagtcgctaattaacgactattctaccgtctattttatttagtcgctaatatggcgactacaggccgaccaagtcgtctagtcgtcctgtagtcgtagaaacgtcgcaccgtagtcgtataaagtagatggaaaacatgttttgcattgttaagtaggtacacctaattatttagttgtagtcgtaaattagtcacaaaaattggcctatataataaacgttcacgcaactcttctttcaccaacaaatcaaaacaacaacaacatcaaaaagaaaaaaaaatactagttattttattgtataatggcgggaaactacaattatggcggtactggcggtttctatcgagattggatgtacaagagatttgatgaagtgacggggaatttgtcagccgaatacgttgcaggagttgagcaattcatgacattcgctaatagtcagccaatagtacagagtagtcgaggtaaatttcattgtccttgtagtgtatgcaagaatgaaaaacacatcatctcgggtagaagagttagtagtcatttgtttagtcatggatttatgcctgattattatgtttggtataagcatggagaagaaatgaatatggatataggaacgagttacacgaataggacgtattttagtgagaatcatgaagaagtgggtaatattgtagaagatccatatgtggatatggtaaacgatgcatttaattttaacgtggggtatgatgataactatcgtcatgatgatagttatcagaatgtggaagaaccggtccgtaaccattcaaataagttctacgacttgttagaaggtgcaaataatcctttgtacgatggttgtcgtgaagggcagtcgcaattatccttagcatctccactcatgcacaacaaggcggagtataatatgagtgaaaagttggtggactccgtttgcgaaatgtttacagattttttaccagaaggaaaccaggcaaccacttcacattaccagaccgagaagttaatgcgcaatttaggacttccatatcatacgattgatgtttgtcagaacaattgtatgctattttggaaagaagacgaaaaagaagatcaatgtcgattttgtggcgcgaaaagatggaagccttaggacgaccgtcgaagaaccaaagtaccatatagtcgtatgtggtatctacctattggggaccggttgaagagaatgtatcagagccataagacagcgatggcaatgcgatggcatgctgagcaccaatcaaaggagggagaaatgaatcatccttcagatgcagcagagtggagatatttccaagggttacatcccgagtttgccgaagaaccccgtaacgtttatctcgggttgtgtactgatgggttcaatccatttggcatgtctcgtaatcattcgttgtggcctgtgatcctaactccttataatttaccccctggtatgtgcatgaataccgagtacttatttcttaccattctgaattctggtccaaatcatcctcgagctagtcttgatgtcttcctccaacctcttattgaggagttaaaagagttgtggtctactggagtcgatgcgtacgatgtttcattgagtcagaattttaatctaaaagcagtactactgtggacgattagcgactttccggcgtatagcatgttatcaggatggactactcatggtaaattgtcttgtcctgtttgcatggaaagtacaaagtctttttatctacccaatggacggaagacatgctggtttgattgtcaacgtagatttcttcctcatggtcatccatcccgtaggaacagaaaagactttctgaaaggaagagatgcttctagcgaatcgtctcaagggaacaacttcgcgagattcagacgctccagcaaacagccacccgtcgtctcaagggaacaacttccaagaggaagttcctgggacgttgccggagctacaagaagactcggcgttggctctgcaatcgacactctctgtgccaaaccgggagcagtggtgttgtgtcttgtctccaattcccaaacctaaaaccgaatggtatgttttcttcctctattttattctagtgttcttagcctgtgtagtgtaactcgtgttatggtctgtagaatggcttgttagggtttgtgtaacatagtagaatctgcctttgttggagttggatgtttgttagggtttgtgtaacatagtagaatctgcctttgttctaaactcgtgtgtgatcttgttaagttcttcaatttgtctataatcttgttaggttatttattgtgttctgtggtgaatcatgaacataattgtggaacatttgttgattgttgaacttagcatgttttcggctttgacattgaggatctgtctttgttctatacttgtctataatcttgttaagttctttattgtgttctattgtgaatcatgaacttaattgtggaacatttgttgattgttgaacttagcatgttttcggctttgacaatgaggatctgtctttgttctatacttgtttatacttgttcattactgtctatgatcttgttatgttgactattgtgttctgtgtgtgatcttgtcggcttatacttgtctagaatcttgtaaaatctgcctttgttcaattatatagtctgctgtagttgtagtgttttggattttaaacatgtttactttctgtctgtgttgcatgtgtttggaggtttactcgcgacagaggatctaaattggttagaaagatcacacggatttttactcaaaagttcaatgctccctactataattggtcctgtgtgccattggataaaagagaaagattgtttttagagtttgcggtaagcttcttgtatttcttcaactttcattagactgtactatttaatctgtcatttgttcactaacttcacactttttttgtagaaaactcaccattgggatcctttaataacagggacagtccaatactacttcaatgagatcgttaagaggcgcttgaaggacatggttagcaccgcaaggagaactcgagagcagcctccatggattggagaaactctgtggagaaccatgtgcgactactaggacactgaagaggcacagaaaaggagtaagacatattccaaagctcgtctctctgaccgtaacggtctcggtcctcacgtccactactctgggccaaagtctttccaagaaatccaagatgaattggtaagtgtttctgcaatcttcccatgtgttttagtgatgtttgtttaactgtgtgtgatgtttagtctgttgatagtaatgaagcttgtgatctgtgtttgcaggaagaaaaaatgggaagacctgtccctcttggtgaggtgttcatccagacacacactaagtcggatgggacttatgttgatcagaaggcatagaagattggtctggcgtatgagcagaatgtgagagagaagctgtctgaactagaggcggatgcttctgctgtgtctgatggctcttcacgtcctcgggatctcacactagatgagtatgcagccatatttctcgaggtaagatgttctttgtctttttcagagtcttagagacatttaggatctgtcactaattatcttcctctttatttcttgcagtccacagaaaaggatgcaagaggcaatccttatggacttggctgtcttaaagaaactctaggcagtgccaaccgccaactccccggagactcaacctttaaagccttagaagaacggctgcaggaagctcagcggcaaattgaagaacaggctgcatataacgagaagcgagatgctgagattgctgcccgagaagccgagacagcccgagtcacagctgagcaaaaggacaagctcgagcacttgtccttagtcgagaagtatctccgccaaaccgatccgcagttcttggactttattgccacacactcttccacatccacagagcgtatcccaattactcccccatctaatgatccatagaatttaggtttccaaacactaattgtatctttcaataagttgtatgtttgaacaagataattttatgttttgaacttgattttcaatatataagcagtgttttcatattgtatagcgtatcaataacaaacaagaacaatcgatgaacaaacaagaacaaacaagaaacccatcacctgatgaccaaatctttattcggaccaaactattagtcgcaaaaaagtagtaaataagtagcagtatagtcgctgaatcgtcgtcaagtagtcacataactttacgacaatcataagactaaacaaattagtcataaaagaatcgtaaaactgacgtccaatagtcgtatatacttatacgactatgttatgacaaaaagtttcaaatccttggcaagtacttttaatcgtcaaagagtcgtcgaatagtcgtaaacatatttacgactactttacgacaactggaaacatacccagggtttataataattaatcgcaacatagtcgtaaagtcgtcgtaaacaattaacgactatgaaacgactacatgttctcacacgctcagtacagtacaaataatcgtaggatagtcgtcaattaatcgccgacataatacgactacgtaacgacgatttttcactgtttagtcaattgtcgtattattgtcgttgatcaacgactaataaacgactactgtttttagcgactatggattaatgactacagtcattagtcgtaaattagtcgtattagctttagttacgactactaaacgactgacttgtaggtcgtcaatcacctgttttcttgtagtgataactcagtcataacataaaccaaactcagccacagataacataacttagtcaaaacataaacctaactcagccatagataacataacttagtcacaatataaacctaactcagccacagataacataactcagccataacataaacctaactcagccatatcgtaatagaaactcagtcaaaacataaacaaaaccataaaataaaaaaatctcagtcaaaacataaaccaaactcagccatagcataaccaaactcatccatatcgtaacagaaactcagccataacataaacaaattcatccatatcgtaacagaaactcagccacggatttaagattaaaccataactcaatcacagcatataacaaactaagacacagatgaattgataaatcataaatcagtcggcaaacaaacggtaactcagccatcaaatcaaatagatctaacaaatcggcaccatatgtcaatcaacaacgacgttaaaaaccatcgttaagcatcggaaacaatttcagtgacgagaatcacttgcgattgaacttagatgtcggattcttgtcggaaaattcgaaataaagttaggaaacatacttaccggaacttagccagaaaccagaaatgcaactccagatgtcagatgtgacttcccgaaaccagtaatgcaactgcggcataagaatttcggtcggaacagacgagaacagcaaaaacggcgacgaaaatagggtaaagggtttgttcccgtggagagagaaagaaagcgacagtttttttccgctgatgaacagtaatgctcaaaaaaaaaaactgaaacgtttatgcgatttgagatgagtaataacgtggattatgttaatgatatggattgatgacatgtataatcagtgtttttttatttaatattaagttaaaaacgaattaaataataatatttaattaaaactaatgaaggatttaactgtaattacataagtactgaaaacatgtgagtaataaaaaaagatgtatgttattgtaggaagaaacatacagttgttttttatctgagtaattttttctttttatttctcttacttaatttaaacatatttaaatttcaaaaaaataaatcaaacagtgttaatacttaatagttctatttacataatcaactactttgttgaaatgcatatactatatattttatattatttacatttttcaattgaaaacatacaatgcattaaatgtataaatctttgtataaaaagctttcttgtttaaaattttgaaatatttaattttgacaagtttagttaattaaaataaatgtatataaaaactaaagtgtttggaaataagagcatctccatcaggtagatattcttgccagtttctaaaaaataaaatattattattttaattatattatatattttagttaaattgtaatatttaagctaataccctattgacatgtggtgattttgttagagaaaggtttctcttagtttctcaagtgagagactcttctttccatctctcctactttttcatttttaattattattttattattaagtttctcaatgaaaaacgatgatggagatggtctaaggatgagaatagagaatatggttcgttatgaactcatctaaagagaaaaaaatcctattgaaggttttgacaaacaaatttgtcaaaaaatgtagacggaggtccgtcggaaatttttcgacgcagttccatcaaaactttccgaggaacccaatggtcggaaaaaatcagaaatttttcaacaagtttttaataaaatttgcatagaaatagtgaaacaaaactgagaaaattgtttgaaatttttaactattttccaacaaaatcatggaaggcctagagaataataaacagagttatgaatgaaaccaagaaacacaagcaacgattactaataagtaacttagggaaaagctgaaaatatgtagcttaaacgatagagtggacacataagaggctgccagaaaagcttcaagatctcatgacgcataagagacgatttcagaggtgataagatccataagtcaagaagaaccatttcttacgatgtaagattgataacgacgaccaccgctatattgtgaactctgcgatttccgtcctcatgtacatagtccatcctccactcctaaaaggtttctcatacctataaattccttcgacaacttgatgagctggtaaaagaaagataactttggagttataggttgctcaaactctcaactgcctaaaaaaaaacattaactttgactcaacgcgtaatacgatggaacaccaacgatccgtctaggtaacgtaccagccataaatccccacaccacagctcctctgttgattgatccatgagaaaaccaacattgcatttaaggaagcttgatggaagatatctccacttggaggttgaagactgaagatatataatgataagatcgatttcttcttatcgggcttctattgggcttattggataatacctcaaactaatctaattaggcctgcttatgaattgagtttgtaattaagttgttcttctacttctggaaacgctatcgattaagaacctaaagaatgtttatctccttcatctcctttcttttcccttttcttctctaattcttcttttctcaatcttattcttctgttttttcatcaccttctgttactcaacttgataagtgatatttgaccttatcaattggtgctttatattgggagttgaaatcatggctactcaagctgctcaaaccattccagccaccatagtcatagatctagaagcaaaactggatcaattcgttcaaaatttcgaagataagctagattccatcgtccaaaggctccaagcacaacaaaaggagcatcgacaagggatgcgtgaaatttttgctaactttttcccggagacagcatgtgacgaaccacctacgatgaagaaccaagagcatcatgagctccatcaagttatcaccacaagatctgaagccaccccaacaaaaacctagacatctctcttgagaattttgtcgaacacttggtgggcactgaattcccagaagcttttcttaatctttgggtcttagagcttccaacgacgtatcattctcgcaggaaaagaagaatccatattacacaagctcgcaggagaggatgtattcatgttaatcgaagctatcataaggtcaggaagaagatcacacggaagaaacgtcacgagatcgtacctacaacaccaatcaacaaacactcaacgaaaagacatggtaaaggacctcgttcctttctcttgactctagaactcgattccatcaattattctacgagcatattcaagatgatgctagcagagataaacatataggattttcgtctgattatgagggatcacagtctcacgaattgagtggtggtgctaatattagaaggaattcacggaaacttaaccaagtccgagacaacaaggagggttacattcgatcaatgaaacaaagtggtaagcaacatgaatctcttgttttaaatgtggggctaaaggctaattctaaagagattacactctatcacaatgttgatgatttgatgatgccggagagaaatggtagagtgggaaatgggtcattggattggaccaattctgccaaggcatgggaacttcagacttggaacagaatggttgggatagatagtcatggggatagatcatgagcgcaagtggtgccaaggtctcagagtaaaggtgttgatttggggagagtattctgttttggttttcagagaacaaatcctcaaatggctatgaaagtggcacgagatactaatagtgctaggcaagcagaatgacaaattttggaatcatctcatggagttattcaagagacacaatcacaaggtgcgaatggaggaagactatgaatagatccactaacaggaggatatcacaagcaagtaaacaagccaatgtgcctaggaatctgtcaagagagaaccgcgaaagaatacagggacatgtttgaaactctttgcctgaatcctgtgatcttaccagggcaacagttggaggagttatttctacaagggttgaggcctgagttgcaagctgcagttaggcatttccagcctaatgggattgtaaacatgatggatttagcacaatagctagaagaaattaacaacaatgtcgccccaagaacagaaccatacggtgaccaagcgacacaagtagagctaatgagctttattatggtggaaggtaatacatatggatatgggaatgagtgggaaggtttattagaggattttaagaccataagacaagttaaaaggcaatcaacgacagaatttaccaagggcaaggatatgagattctatggcttcatatcatgtcataaggtcgttgtagttatcgattctggagcgaccaacaattttatctcagatgagttagctttagttctcaaactacccacgagcactacaaaccaagcttcagttttattgggacaaaggcagtgcatacaaaccataggaacttgttttgggatcaatttgttagttcaagaagtagaaatcaatgagaatttccttttattagatctgaccaagactgacgtggatgtgattctagggtatggtggctctcaaaacttggagagacaatggttaatttggctgaatcaagatttctccttcttccacaaccaacaatgggtcactctttgtgctaaggacaaagaacttgagcaagttactacaaaagtaaagatgaagagtgaatatgagcaagaaaaaattgatcattaccttgaagacaaggtagttttaaaaggggggagtaaggctatgtggggaggaattgctaaggatataccatggaaacagaaaatgagtggtgaaagtcttgctaaggaaatactatggaaacagaaaataagcggtgaaagtcgaaagaatttttcagagattatgttgaaagtgtcaaggctcaagagtgctcaaaccattggaaactatggcggattagaggcgcaacagggtagtctaggagtgatgcccatgggttacaagggtgttggagagaagcaagaggagtttccattgaggcttatatttatcgggaaagcgggtcaatcgccacggccaccagaattgttttgtggtaaagtgttgggacaagagggaagtctttttcaaaaacacaaaggagagaaaggtggtcacctaaacttatggttaatgacgaatggagggaagtcttggttagaggctggaatttgtttaaaactgcagaacggagtctttgagtgttgtaagatatcatagttgttcatctcaaagtggtcttcatcatcaagaaacacggtggcaggggaaggaccagctaaagagagcaggtggaagcagttggagatcgttcataggagctttggtgaaatcttctttgtcaagattggttatgttcgtacctgcaactttgaatctataacaaatgatggggtacaaagaaacaagatattgatcgaggagtttcaataccttcgacgatgaggacatagtttcaataccttcgacgatgaggacatagtcaatctcaacaggaaggtattgaatgatcgatttcttcttattgagcttctattgagtttattggataaatgctcaaactaatctaatttggcgtgcttatgaattgagtttgtatttaaattgttcttctacttttagaaccactatcgattaagaattctccttcatctcctttcttcttcctttttactcaacttgatttctgaccttatcatataactgcttcatgatcaggaatctttgttttatttgtttcaagctatctaatattttattcacggcaaaagaaaatgaagtaaaatatataaaaaagtaaaaagcatttttattgataaggtgaatatacatttgtgaatgatatattgatagtaaaaacatagtccctcatgaaaaatatttagccacaggaaatgttcttacctactccatttcttatattataattttttgttttcaatttcttaaactacatagaagaaatttattcatctacatttcccaatttcatttaatggctccatactctctctttacgcaatcccggcgattaatctcctcttaagttccatcctgcaataaccaataccaacattagtaaaccaaatccaaaatctattaactaaactatatggttaaagaactaatcaagggtgttaactacctcatgagttgacggtcatgagctccggtggccatcattccccggttctcataagcgcgtcggagaagatacggtatagcggttgcgacgggtccaaacggcatgtacttgctaacattgaaccctgctctctttaacccgaaggacaatgcatctgacataccatatagctgtgcaaactctatcttcccgttctgtttatcgatcccgaggtcactcgctttcctcgacgcaagtctccctgagattaaaacatttctacaattagtaaaccatttcactctaactaaagcgctaaaaaaaccgcggttacaatgtgatttaatggcttacccgaatcagcgttatgtgttgcgagaacgacaccgaaaccagaaccgtttgatgctttctccatcaggaatgtcatacaatcattgtaacaagagtgagtatcctgaattgtgtcgtggactggcgacttgcaacccagggaatccgccaagctagcttcgctagacatgtaagcccctctcaccaacttgaaccccataggaacattctctttctcagcattttgtactgccaaatgcagtctctcaccggcgtctctcaagtacgcctgaatcgtgttgtaaacgattggtcggtctttgtcagcattgaacatgatcgccgatgaataagccatgtaatcgatcgcgggttggaggattgtgtcttccgcatcaatcaacaatggtacattggactcttggcatttcctacagatttcttgaatccttccatgagctgcttcgagctccctttcttcttccgcggttaacggttccggttctgagtttgtgtggtagagaggactcgattcggagaaaaccggaaacgatttgagcttccatgagagtttgaagttcggacttttgtattcccaccgcagcagatcgctcactcgtttcagaagactaattggacaaatggcagttatcttcacaaccactgagctaaactgttaggacaagaaaacaaataaccggtcattacaaaaccaaaccggaacaatccgtgtcgcacaacaataaaccggtattttagtaaccggagaatattcctaaagtgttttctcccgaaagttctagtccacctatactcgtacgtgtaaatctaatccgataatgacgcattgcaattaattttaatcacagcaaaaatcgaattttaaaaagcaaataaattcattaggaaaaaaaactaaataaattaaacataaagtcattttcataagagaaacattagggaaacacaactttggtacgtacttgtataacgcgtaagagtaatttaaccaatttaaaatgaaaatagatagatataataaatgtagtacatatctatgcaagtgtactttgtcagagtacggagatttagctgtcgaaccaaacaagttgtctgaatttgataattacgtttcccattaacaaataattacgttttaagacaaaatgattagggattaatgtaaaataatcagaaaaaacagagcaaagaagaaaaacagaggaattaggcttacgtgagatgttggtaaagatttggcagcttcaatggttcgaatgaattgttgcatgttatcatcacaagatacagcgtcatcggcgtgttcgacgccatagacaagcatccctttaagaccagtagcttcataaacgcttctcacgcgctcagcggctgcgtcggcatcttcaccggcgcaaaaatggtcataaaacgtacttttcacaagccctaaaaccatgccacgcgtcaccgaagcgtccataagtttagagctcatgacccacgtccctaggtcgaccataggacctatcgccgccgcatgcaacacggcggtggaacggaggagatcagaggttgggatagaggagaaaagacgggcttgatcggagagatcgagaccatcgtgagattgctcggtgggttttgggtggtgaagaggtggttccggtgcttgttgtccaaaggagagaatctccgggacgacggcggtggaagcagtcacggtgggaggacccaccgggctaaaagcgggtaaacggtaagatc

SEQ ID NO: 77 - DNA, 91567 bp, Arabidopsis thaliana
aagctttcaatgtatgcaataaagagtagtcatattttttaataataaaacgcataatcttgaattaatgtttataaaataaagagagggcatatgttcgcatcaatatatcctcaaacatattggttgcaaaacataacatataagtggctaggaaaacacttaatgttgtggtagttagaaactttagtggtggcttgaacgagttaaatctattgaggtattgttacatctaacttgttcaaatgactatgaaaattcctaaccataacaaccttaagtgtcttctcaaacacttatttgttatgttttgcatccaatgtatacattgatcaataccaatatatcacaaagctctttacaaaatagcaaataaaaattatgagatttactactaatgtaaatataaaaattcataacagtaatgcgactaatctttattccatattttataagtatcttacttcgaaagtgtttggcagaaaaaatatcgagggagagagagagagttaccaagtttgggaaattatcgagaagttgtctaattctcatactctcctttggatgcatgtaaaggctttcctaccaaacatgcaaaatgcttttgtcaaaacttcatcaacaacagaaaaaatcttccacccgcgacttatgaaacttttactaacctgaggaaaaaaaagaaaagaatgataagtaaaaaaaatagaatattgttagctagctacaaagaaaaaatatcttgtggatagtctaggaatcctgataccgtaccttttcatatacttgtttgagtgtgatacttagaattgaacaagtaaatacatacatatatatgagataatttatggttctgccactgcatatcagactcttgccaacttatttggcaccattattaatctaatttgcttttattgactaccatgtttgtggtcaaatatttgactaattttgtttaggaatgaacctattaaatctcttactttgacgggatattttaaggaatgtaatatattgaccaagagattagggtatgcattttaaccggagtgaacataaaccgattcaaatcgaactttcatcaatgtttttccttcaactgaacggtttgatttaattttaaatcgaataaaactgataaaccatttttatttacgtatttctagttaaaatagtattataaatccaaacacgtttgattaatgtaaaataaaatttatttagtttaatttttcctaactctaagagccctaaatctatagggaaaacatacaaaatcacattgaattacttttccttttctaatagtcttactgtaatatttaagtaactagatattaacctccggtataccgcaagtaggcttatattttagttaaactaaaattttttattgtaaagatgatttataaatatatgatattattttatttgattttaaatgtatagtaaactgcgagttgtatatgttttgttgatattatttatattgtttagtgtttaagattatatacttgtattttaatttttaattttagagtttcacctgtagtataccatcttctattataattaatatcgatctaaaccagtcaattctaggattttccagcttgtattaaaaattgaatcacatcatacacataaaaaaatctaatacgttactaattattgtaatatataagattttaaatttttaaaataagatgtatgaaattgaatataaatattcaaattatgacccgttactcagtagaaagttttcttaaatctatttttgactcgttataatatattttcatgtattgaatagtttatatttatttttaaaaattcaaattatggcatatgcaaaacaaactctaattatttttttataacgatgatattatttttttgcaaaaatagaatcatatgaactataataattaataaaaaaataatttgataatttagatatcaaatctaatttgttgattttaattggttagttttttggaaattaataatgtatttcgtttttctaattaaattaaattaattaaaatttagataatttatggttctaccactgcatatcagactcctgccaactttatttggtactattattaatctaatatgctttctattgactaccatgtttgtgatcaaatatttgaccaattttgcttaaaatgaacctattaaatctcttactttgacgggatattttaaggaatgtaatatattgacattagggtatgcattttaaccggagtgaacataaaccgattcaaatcgaaccttcatcaatgtttttccctcaactgaacggtttgattcaattttaaatcgattaaaactgataaaccatttgtatttacgtatttctagttaaaatagtattataaatccaaacacgtttgattatggtaaaataaaatttatttagttcactttttcctaactctaagtgtaacaccccaaatccaatcccttgaatccaccctatttgttttgttaaaacaaatgtccatggatcccattgaagcccaagtgaagcaagtcacaaaataattagggttttgttacatgtgtatgtatatatgcttatatcgtcatcttcccgcatccttctcacgtcatcatctccagcaactcgttactaacttaagaacatcaaatcaacttgatcccaagccaccatcaccattgacgttgagatcggagttgttggagcgtgtggttttgtttttaatcacctacaagtgtggagtgaaagcgaatgtcacggatcatcaccattaaacaacggcttgattgggtaaggaaaacctaatctatttagaaagaattgtctctcctagccattgaatttgtggcagatatatcaagttagcttttgggtttttgtgtgaatatgtgaatgaaggaagcagttcaaatggtaaaattggtgatccgtttcccgtcacgtctgaaggagtttgggcgatttcttaacggttctgaatagatctcgttcccaagttttcagaacagttttccgatccaaaatcagaggtaagatcaatcgggaaatcgcgtttaaagttggtcaatagtcacaattttcagagcgcagttttttctaaagtatctaagaaacattgtagtttcacgtagaggttttcaggatcaatttcccgttgaatcagagagaatcaagcgtggcgtgaggtgtcattgcaataatcataatgtcaagaatccatagccgctgaaagagatagaatcgagattatattcaagaagttatgagtgtttccttctgggcaagtaactgcagaatgtatccacatctgtgctaagtataaatccagaacagtgtgtaactactggttttgcgatgtgttttcccgatggaccaaaaggaattagatcacgatcaagatgtctatggaaagatcttgcttcaaggaacttagagtagctgacatcttgtccatcggatttaagctccatccgtatttgactttgaaaggttgcccagaatcatctcaagttgcagaaacctagatatcagttctgatgcaacgtgggagattcatgtgagatctgatcgagatgaaacttcgtggacttattcatgatactactggctacatattaaacggtgggatcacgtttctaacggttagttctcgacttatgagtatgttactgagacagttttgtatgaagtaaaccatgacaagtttttattgtttgaatgggaaacgggttcggttggagctgaagctttgcagaagcctttaggactcatggagtaaggtttttgttgatggagaagcaaggtggagcgcaagagtatgcagttaaagctcttatagtaagttggtctaaaaggagagaaaggagaatagagatgttattcatcttcaactaggctagggtgagggtggtatttgcgaagcatagtatcattttcttttgttatgcatcttcatgcatgatatgtaggcttagatctgattgcataggataagattatgtgatgatatgatttgatgattgttgagtatgatgtttgataatgtgaaattatgtatgatattataagtatatatatgttaagtatgattatggaagttgggtgagttaataacaaaacggtgcgttttgctctggaggcgaaaataagtgcgatttagggttttttgcttttcacgcaagttctgatgccgccagtggccacgccgccgttggtagatggggttttgagtcagagcaggtcagatacgagggaactaacagaggttggtgagatctttgttagcgaagaggtttttcaaggtgatgctacgaaagtaagtgaggttagtatagatggtatgattggtgtggaaagttgtgaggaacaagatcggggccaggattcacagagtttgtgtgagatggatccaaaggaaatgctgccaaagattggttcggtggaagtcgtgagccaaaaggaggaaaaatcaaagttccacagttcatgggtatccatggtcaaaaacgaaaaggaattggagaaggtggagttagtggtagaagaagttgatggcattccaacagcaaggataccgaacaatgtttttgaggaagcacatccattgtgggaaaattttcttgttggcagattcctcgcaaaagctccgtttgtgggaggaattcatgcgctagtcaacaagatttggactctaggagatagagtagtgaagattgatgtgtatgtggtagataaaacaacagtgagatttcgtatcaatgacgaacgtacaagaagtcgagtccttagaagaggaatgtggaatctatgtggcgtccctgtggttttaactaagtggagcgccatagttgacacagaacaagaagaaatcaaaactattcctctttgggtgatagtaaaaaatgtgccaccgaaatatttctcctggaaggtcttgagtgcgatcactagtccacttggaacaccaaataaattacattcggacacagaggcgtgtaaatcttttgacgaaggaaaggtatttgtggaagtggatttgacaaaggatctaccaaagaaattttctttcaagtcagagaaaggaggggacacgatagttgaatttgtatatccttggctgccaccgaggtgtcatacatgttcaaaatggggacatcaaaccatagattgtttagcaggcaggaggataaaccacgtgggtgaggtagcgactaaggtgcatgaaaataatgaggaagaaagaaaaatacaaacagaggttttggtgggaactgagatctgtgcaaatgtagcgcctgaagaaactgcagtcactagaaaaacagaggataagggatgagaaaaaataattgtaaccgaaatgggtatggaaaagtcggatcaggaatggagtaccccaacaaaagtaactcgaagccctgcaaaaatagagctacgttatggtgaggtatcaatcatgtcgaattctttttcatgtcttagtgataaaggagagagaggggaagctatggaatcaaatgaggttgatatgagggatttagaagaaactgcagaagctggaggaaataagttgatagaagttccaaaaaataatgtggctgaagttgtaagcacaagttcatctcaagaagtgagtttggttttgagtcaatcgcttccccgcgtctcaaaagatgaaaaaaagtttctttctacaagcaactcgcatagtactaggctaccaattcctagtactttgaagacacgtaaaaatccaaagaatttttgatgtcgggattcttctggaatattcgcggcttcaataaacaaggaaaacatggagttgttagggactggataaacaaaggaaattatgattttggttgtttgattgaaacaaaaatcaaagaaagtaaagcagagaggatagtaaattcagtatttcatggctggtcttttctatctaattatgaagaacacagattgggacggctttggctggtttggcgaagtaatgtacgggttactccgatttataaaacttcacagctcatcacctgctctatacacattgaaggacgtccggatgaattttttgtcactttcatttatgcctccaattttgtgacagacaggaaagttttgtggagtgatattacacatcatcataaatcacccctgtttcgagataaagcttggctcctctgtggagatttcaacgaaattttagagggtgatgaccactctcttcatgattcttcaccagtatctccggttggtatgagggattttcaggatgtagtccgcacatgtgaatttacagacatgagctatcagggacaatgatttacatggtgtaataagagaaaagagggagttatctgtaaaaaactagatcgagtgctagtgaacaagcaatggatacatctgcatagtcagtcatattctgtatttgagccagggggttgctcttaccatttgagatgtagattctatatcaaagatgaggcgcatagggtgaagaggcctttcaagtttgtaaactctatcacacagcacccagattaccatcaggagctagtggagaggtgggaagcatatccaccactttttcactcgacatcggctatgtttaagctctcaaaaaagcttaagggactgaaaccacatttcctgaaaatgggaaaacaaatggtaggagcaatatctcttcgcacaaaagaagcgtacacttctttatgcgagttgcaggcgaaaactatggcagacccttcctctcaagcagttcaaaatgaagccgatgcctatgaaaagtggatgagattatcagatattgaagagaagtaccttcggcaaaagggaaagctccattggttaaaggtaggtgaccaaaacaacaaagctttttatacggctgcaaaattaagggaaatcagaaacaacataaaagagattcaatgtgaagatggacgcattgtggacaacctggatcaaataaaaagtgaagcagaaagatattttaaagagtttctttcttttcagcctacagactatgtggaatggtcacgagaggatctagaaaacactttaacattcaaatgcgacgagagtgatcagagtatgctcactgctgaagtatcaaacgatgaggtcaagaacgtgctctttgcaatgccgacaaacaaattccctggtccggatcgttacagctgtgaatttttcaaggattcatggtcgataataggtgctgattttgtcgtcgcgatccaatcttttttcacgacgggtttcttacctaaaggagtcaactctacaatcttagctctaatccccaaaaagaaagaagcaaaggtaatgaaagactacagaccaatctcttgcttggaatgttctttataaggtcatttcaaagatccttgccaaccgactcaagattattctcccaaaattcacctcgccaaaccaatcagccttcgttaaagatagactgctaatggagaatctgctgcttgcaacagagattattaaagactaccacaaggatacagtctcccctcgatgtgcaatgaagatcgacatatcgaaagcttttgattcggtgcaatggggtttcttgctaaacactcttcgtgcactgaacctcccggagaaattcattctgtggatacagacctacatctcatcagcctctttctcagtgcaggttaatggtgaacttgcaggttattttggcagcaaacgaggtctccgccaaggctgttcgctcagtccttacctcttcgtcatttgcatgaatgttctttctcacaagatagacaaggcagcaagtgacaatcgcattgatttccacccaaactgtaaacaactgaaactcactcacctatgttttgctgatgatctgatggtctttgtcaaaggaaacataaaaggtgctcttgaagtctttgatgaatttgctacacacacggggttaaaaatcagtcttgaaaaatcaactctatatatggcaggagtgcctgcgggaacaacagaggagatactacagcaattcccatttgaatacggtcacttaccagttagatacttggggttacctttgttaacaagacgaatgacatctgaggactactccccgcttctagagaggatacgctcacagatttcttcgtggacagctagaacactctcttttgcagggagacttcaactaatcagttccgtggtgtttagcctcacaaatttttggatcgcagctttcaggctacctaaggcatgtatccgagaaattgataaactttgcaatgctttttagtggtcggggccctccttgaatacaaagaaagctaaggttgcttggtcagatgtctgctcaccaaaacatgagggtggtttgggtctgcgttcgatagacgaggcaaccaaagtgtgtattctgaaattaatatggagaatcatgtcagctcatggctctctattggtagattgggtcaacaaatacctaattcgcagtggctccttatggacagagaaaacaacttcgacatatggatcatggatttggaagaagctgttgaaatacagagacaaagcaaaaactttccatcgggttaaggtgaaaaatggggactctacttctttttggtttgattattggagtccgttgggacaccttcatgatactataggagatagagggtacattgagttgggaataccaaaacacactactttgggtgaggtaatggatatgacaagaaggaggacgcatagacagccgttactaaaccgggtggaagaggaaatagagaaacataagcaaaaccggattcatggtgaatatgatgttgcgttatggaaggggaagaacaactgctaccaaaagaagttcatgacgaaagaaacttggtcccaaatccgagttgcaaagcctttgttcgtaggtcacaaaaaaatatggtttccgaatgctacaccaaagtatgctttcgtaacgtggttggtggtaaagaacagagttgctacgggggagagaatggaaaagtggaaccaaaatgttaacacacgttgtgttctctgcagccacccaatggagactagggaccatttgtttttcttatgcccttactcacaacaggtttggagaacactagttcaagggatcatgcttcacaggtttactacaaagtgggaagacgtgatgaaaattcttgcaagcagagacttagacaaaggaaagcgattcttgctagaatatacttttcagaatgccatacacgtcatctggggggagcggaataagagacgacacggagaacaacagtttacaccggaaaagctagtcaagttaatagacaagaatgtacgtaatcgggtgagtactatcacaaggggaggaaactcatcgctcgcgggatgcatcgaaacttggtttgcgacaaggcaatactaaggatatatttaaaccaaaagttaagaaaagtttgcattaatcatgtataaacgtttattttttctttgaatataatttaatattaaattcaaaaaaaaaagtatgattatgagtatgtatgtatgatgtatgtatgactggggagaatcgagctatgggctgtggtctccctagtgatgtggacagtgatggaccgacgggttaacagttggtcaagaacggctgacgagcccgggatgcatgagagtgtctgagccacgagggtcagcctccactcatgaggttctggttatcacgaggatgactggacctaacgatgtgtatgtttatattaatatatataagatgattgttatgaatgtgttgtcagaagttaaagcatgttatggtgattgggtgtgtctaagtttatatgttatgatgatggtggtatagctttagaaagtgttttatgtttcagtgggcaaagttgattcccctcaatgagtattctttaagagatatgttgggaaatgatacgttttttgaacataattatggaactagtacggttcctattcataattagagattgcaccggtcccactgtttcgtctaatagacgagccgtgaaatacaataaagtggggtaggagttgtttagtggaaattacgtataaaggcttcactcataaaagtcatctaccactaaaataataaagggaaggctttatagagagagagcaagagaactagagtataagttagttttttttatatattttctttttctttatttataatatttcatttcctccaattttaagaatcaaaattctcgtttgtaaattttatttttctaaaattgatcatatacattaaaatcaatatttttttctctagatatgtattttgtttaataatttttaaattttatattactgaacactgtaaagataaagactatatactactgtacaaatatataccatcgtacagatgttactatgcatttttttttctctccttcgagttatatttttttgctcgtcaatcaataatttagtcgttggttgattttgatctatacattaatagggttgctaattcagatttttgtggttggtttcgaatcatgtacatactaattgatcacgtttaggctcaaaattttatgtgatgtttgtcactgctggtaatatccttgtttatatttgattagcgtatttaaccgcaaacctgtcctctcacaaccacaaatcatgaaaaataaataagcatacaatattagctagtctctaaaccaattgaataaagaaaataagaaaactattttgttgaaataccagaaacaaaaagaacacaaaaacaaaagtaaattttgtactatctcgacacttgtttattcatctatattaatttgtatctatatatttaaatggcttatatctgtacagtagcttatttctttacggattgtatctgtacagtggtgtacagatgtatctgtacagtggtctgtacaatggtgtacagatacatatgtacatggtgtacagatgtggtgtacggtattagctagtattagctaatatatagataaataagcaaaaacataccagaaacaaaaaagaactataaatagacattttctctcataaccacaaatcatgggaaataaataagcatacagtattatctagtgtctaaactaattgaataagatgtggtgtacaaatgtggtgtacggtattagctagtgtctaaactaattgaataaagagaataagataactatattgttgaaatatcataaacaaaaaagaacacaaagaaaaagaataatttttgtatttatatgtacagttgtttattcatatatattaatttatatctatatatttaaatggcttatatttgtacaccactgtacagactgtatctgtacagtggtgtacagatgtggttacggatatatctgtacatttttttttatgtataatggtttatgatataatttttaaaaaaaatatcaaacaaattgcatatcaaaagttagaaaataaaatgtagatttttatgtatctgataaattttagaaaaataaaattcattaacgaacattttagttattagataaaggaggaatatgatgtagtaaataaaataaaagaaaaaaataaaaaaactgacccacacaaaccctctctctcacgcgctctctacaatttcagtggcataaaatcgtaaatattacttcttcagagtggcaaaaagggatttacaacaaatacaacagtaatgacatgtactataaacccaaatttaaatagtaatcgtactagttttctaattatttttcagaaatgtattagtttgcaaacaaactcattctttaatcacccttttttcccctttttcctcaggttagtaagcgtgaggagttgtgtgtaatatttcgttcgtgtgtgaagtttaaagaaaacgtttttgcaagatcagatgtcgtcttggcctatattgcgggacgggtgttacactaagagccctaaatctatagggaaaacatacaaaatcacattgtattactctccctcttctaatagtcttactgtaatatttaagtaattgggtgtttttttgttttaatttgtcatttttaataaaattaatatcgaaccaacctaaaataaaatgaactaattcgagcaaaatcaaacacagttcaaaacaaagtaattctggttgagttcgcttaagatttttatcaaaactaaattaaccaaaccaaacctaaaattaaaccgaattgccatcccctgttagagatattcaatagtggcatcccctaatttcaaaactgtccaaacgttttatacatttgaattctcaaacaaaggaaattttgaaaattattttgtgaaatattcatgagcttgcatacaagtaaaatctatcgagttcacccaaatatttataaaaaagatgtaagataatagagttccgccaaccaatagtgatgcttcttagcacttttattttcttcaaaatctatggttcggcgtaacacgcgaatagtttcaatgactcttgagtgttgtttgacagtgaaagcaacatagcacgattagacaacactcaagttaatgaaggttttttcttgttcatattttggtatttttcagggttttgaatctgtatttctaaccctactttgagtttctacatatattatgttttaaggtttttaatagtggttttagagtctttaagatgttttcaaataaaggggatcaaaagcattgaaaattatatgaagagtctttggagtttttaggatatatttaaaaaagacaaaacagatttaaaattacaacaaaatagacaaaagattattggacgtaaaaagatgactaatccactagacggattcatcaatcacatatccaatgaaactgggtatggataaattaaccaaatgaaaacggacaggaatggacttaaatatcattatggtcatacaccttttatcccgaaaaaatcaaaccgaatccgatatatctaacatgtactcgaaagtatccaaaatactagtacatacctaaaaacattagttaatttatacttttaataatccaaatgtccaaaattacaattatgaattcgaatatatttgatattcttgagtaatttggattaatttggatagattttagataacaagtaaccaatatgtaagtatgaagaacaatgcgtatgagaagattccaccttgagtcttttcacttttgtatgataacctcatgaaaatcatattgattaactgtgtgatcatatacactcagtaactcgcatttaccttaagaaaacttagctttctctaactaatcaacgctccctggctacttattcttttggcttgatcgtgataattaaataacctgttgtgttacgtactatgagtggataaaaataaagcaaccaatcgatctttcttgacaaaaaaaaatggataaataaaacgagtacaaaatttaacaagaaatcatttcatgttggcccatcaccaattttcttttacctcgagtatttagaacttgtgcaacccaactcctaatcggtatacaaattttggtcacaccctctataaaatttggagaagatccaatagatccagtttttacactgtctttcttacataaatttcagacttaaatctctttttcgttttcagaagtaacataccgatataatatgccgcataccaacttttttgatcaaatcatgtctttgctcttttttgtccaattctttttgcgttttcaaccaaaaactattattcatttatattgatttaaacttttgagagtcatcacaaaacatcaaactagtgttctgaggctgccacatgtatgtcacgtacagtatgaccatcatctacagaattgtttttttgaaatagagggatatatagtacgtgttttatttacggaatataatacccaattcattagcctcccgtaacatttcacgtgggagtgggacatttcgatgaagattcgaacaaacccgtaagactcttttagaaactttagtagacttttctatatattacattccactattaattagtagagcgatgaggaactgatctattttttgaagtttatctcatatgcgaagacaagagaccagattctgttcattgatttaacaaaagagtgaattgctacattgcatatatatgaaacaataaaatgtacctacattgtttttccactgaatcgagtctgtttttcaatcagcaaagagtatttaaatattggaattttatattcttatatgatatctactctttttttagacaaggtctatgtatgatagaatttatctttaaaaggtttataattacatttcttttaggtgttttatgaactactagatgagtacccgcactatgtgcgggtttacgtattactatttacaaattgttttatataatgtctgttcatataaagtaaagttgaatgcataggttttgaaacataaatatgatttgtaattgtttttgaaaagcccaactatattagttcatctgaaaaacgaatgtgcttgagttgttttttattgttgttttagattctcagttttttttgaatttatatatccttgcttttttagttatatgtatagattgtgagacggtgaaattttagaaaatttatttcttacactaaaaatataacatgttcttattaatcatgtctctgcatattcaatctaagcatattcaacttgatgtttttggaaattttagttaagtttttgtcataatcttatatcttacgtattagttataaggataactcctcaaatatctttcaaattacttgttttcttagcataaatctcgaaaaacttagatatatttaatctgcatattcatttagtttctttcataataatcgtctaatttttaggccaggaatatgtgtaacatgtttggattttatcatcactttagccacttaagtagatctcaaaattaaagaggatatattgaattaaaaaatgtagaaagagtgatggttcaagttctcattaattatattctcctatttaaattgttatgttgaattaattactaattatgtattatttattttatgaagtctacgtggcaagctctcatatgctgatgtgtcaagttgtgggagagagttagtcttctttcatatatatgattcattgaaactcaaaccaaaatgtaatgtagattttcacaagaaaatattgttctatgaatactatgatgatccagcttttatatactgttccctttttgtttgtttctgttttcatgtttgctacgtgtttatggaatggaaccgaccgatcatgttgtgaattaaattatcgttaaaaaccactatattgatttttcgaattttttttctaacatcatcatttggcctcatctacattaatggggaaccacttttttataaaacatgttaattatttatttcaacagaattttaatttggaagcaaagactcgacgtctcgaccattcctataattaagtttattatttctaactacaatgtgttctctatatatggaacttattctttgaaatattttcaaagttctaggtacacaaaagcagggttaggtataatatagccttggagactattggatcattattggcttcaagttcttggtgatcctcaaggcctcaacaaaaagcggaacaagtagatatttgtagtattgttttgcacccgttaacactatttttgcaaatatttatatacttgtattaaattaaaaaagaatataaataaagctaaaaattggagttttaagatagaaaatttggtggcgacaaaagaaaaaaaagatagaaaatttggtaaatttgtgattttttttacgaaaatatatatttgaataaatttcttctgcatttgtccgaaacaggcagctactatgaacacgagagaacccatgacacggcctacccatgacggtcgaattggtgtagaatcaatgattggtttgtacagttttaggataagccaaaagtacaattacaataaagccatgcacgtgaagttacttccatgtcatgaatgagggcacgtgggtcttcattcaattacgtcatttatctgtccaaatctattggaaataatttaaaatttccttgtccgaaatcaaatggcagtaatatcataaaaacataaaagaaaaaaaaatatttctggggaaaacgcaaatgattcataaatgtggaactcaatttaggtgtaccaaaatttcagtgtagaacaaacagcgttcgaaaaaaaggtttagacggttgtttaggttccgagtaagccttaattgtttatgtgacatctaaacaactgttaagtccggctaaaatcatatatatattttagtatatttttttagtttttaactaagtttatatttataaaaatgttcatataatatttgatataattaaataaatattttatctaatttttgtttacattttaacaaaaaaactttcagatattttacataatatttaggtataaaatcatatttatactataaatatatgttttaaccgcttaaaattgtttaaattccgataaaacgttcaatgcgctaaatattaaatctccgtccgtttagcgctttgttaaacaaaacacttagagcatctccattggaagtatttcaatgagatacccaacaaaacaaaaaaaatttaaaaaaaaaaagtacgagagagatgaaaaaaagtagaagagaaggagagttaagtttttcggaggagaaactttgagaaactattctcatccaatttggacaggtgtcatcatattattagtttaactattaaataataattaatatatctgttttgattaaaatattattattttttttttttagaaactttccttatttttattgatggagatggtcttacaataaatggctgagatgcttcgtgtatattattattattatgtcgccaagtccagcagggtttgcattagttttgaatttgtgtttcgtatattgtttgtttttttgttttttttttgcagctgacattaataatttagcaagttattttccttcaattatactagttttgaagaacttacaaaaagaacatctaaacgttaattaaatgcatttatactaagctttttttcttcataaagtgcaactatactagtattaggctgattttgtttcttagaaataattatatctgaagaaaattaattaattacgtagcgctaattaagttattaataatagtcgacatgggtttccggacaaatgtcatctgacaaaagttctttgcggaaaggcggaggaagaaaaggaggacgagtacacatgagcaatgcccaattcactccttggaaaaatggatgacgtttcacggccgttgcacctagagatgaccctaaccgtcggctaggatccttggcaagtagctgagagatcagatccttggccgcgcttggaatcgttggttctttcgggaattcgagtgctcgagccacgatattggcaagggttagctcgtggtccattcctttgaacggtgttgttccgtagaacagctcgaacatgaatatccctaatgtccaccagtccactgcactaccatgtccttctcctgccatccacattttacgtttcatgttaggataccacatcggaaaattatacattatataaacttccctaagaagaaaaacgtttgacataaaaatcattcaaatcgaaacaggggaaatgagaatgaggaagatttgaagaatacctgaaacaatctcaggagccaagtactcatgcgtcccaacgaatgacatggaccggacatctacaggttcagccacaagctcaggaccgttgttacggtgatcagttttcttcttacgccttcggattctcgggtggaagcaagagacagcagggacaatacagttagggatcatgcaagaggatgatgtggtttgacggtggtccatgccttggttctcgttctggtcagacgagccattaggaagattgttccggttcagcactatctgtggtgtggaagtcgattcatcacattttaaggagagatcaaaatcagttaacatgatgtgaccatctgatcgaaccagcacgttctcaggcttcaaatcgcggtacacaatccccaacatgtgaagatattcaatcgctacgatcacttccgatacatagaatctgaaaaaatagtaaagagatgttgattagtaatctgaaaagaagggacaaagagaagaaaacatggtagtgaggacaaaacgaataattgagattttacaataatttaacaagagtttgttttggaattattggtttacagttttaggtgttgtgacaaaacagcatttgtttggatttggagacaagaagatgatgttttgggtttgatgtcactatacataaggaacaaaagaggacctacgaaggttggttggcttaacgaactcttttgtctaatagagaattctggtgctaagacattatccaagattcctctagctgaccctttttgtcttcacgggtccacaatcaacaaacatactccacacaaaacagagtcatagtgtacaacagacgaattctaagaacaagttcacacaatcttattcggttcatgtatgaatttccgtagagccattgttctctatatcatttaaagaaaaatcagaatctaaatgagttcaaaggaagtaacccattctatatgaaaaaatgcagctaagtggagagaaatggggaccttttttgtaggacaaccttaaaaaaagaagatatatattaaggaatccctacaatacatgttttggtcccaattctaaatcattttactttaatactaaagaagaaaccttataaaaactaagtcctgctcatgagtaaaacacacagatacaagtcgcgagagtgaagcaaaaatgctcaaatggtaatgaccttgacttcacttgtaggatctttaacgtgtaaaccactactactatgtcaatctgacaataacttaagaacacaaataaatcagatttaacatcaaccaaaaacaacaagatccggttttcaagtacttaccacgtgatacaaattggtccataaatggttataaaagtggctaactcaactaacaaatgatataacttcagctacttcaattcgaagccacagctacttttcaaaacaggttaataatatttcataatttttccaaaaatttcctcctaattgtaggaccaaccaattaataaggaatggcacaattgtaaatattgttatgaagaacaagcttggcacaattgtaaataagaacaagcttagctgggatgttgtttgtactgtaaccacatgcccgattacaaaaaaatattaattttcaacttcaatggcatgctacgtgattttaattcaatcacgcggagtaccactacaagacttacacgtgtctctgagtgatttgttattatttcaaagtcaaaccccactcgttttgactttttattaatcgttatggcctacgatatgcccacacatgtaagtaagatgcacacacaacttttgttaatcgtgcatacatctgcttacaaaaataaaaataaaataaaaaccatatcttatacaaatggttttatttaaaatatactttttagtcccttttctcgtgtagcgtaaatagacttttcctagtttataaaacaaaagcatttatcgagcacatcaatgaataatatatagttattggtgaaaaataccaaaaattcggattaaattacggaaattaaacctcgattgtgtgtgattttcactaggattattattattacaagtaacaaacttaacgggcctatgatataattagtgcataattgccgttaaaaagtatatattataaataaatcgtcactttatggttttataatatacactttctagtccctttttgtgtggcgtattattattacaagtaacaaacttaacgggcctgtgatataattagtgcataattgccgttaaaaactatatattataaataaatcgccactttatagttttaattaataactaaattacactttctagtcccttttcatgtggcgtatatagacttttctagtctatctaaaaatacactacactatcgtgcacatcaatcaataaaaacatatattccaataacaaatctggaaaaattcatttcaattatataagttaaggttactgaaaactgccaaaaattcagaagaaattacggaaactaaatctcgttactataattacgatgtaattaccgttaaaaaggcaataaatctagtactagtgattaattaacggtgccattaaattcagttatgtgtgttttaagtgttaactacgagacaattcgccagctggcgagtcccacttccctgatttcatcaggcttttatatttattcactgcttcatagtaataattacttcccaaaagatttttttttgaattagaaactgaatatttaaaaaaataaataacttaacggaaactgttacctgacggcggattcatggaaacgtttatgagtctgtttttgacggagaacgtgaaggtcaccgccgggacaaaactccgttaataaacagagccatttcggagaatcaatggcggcgtaaagcgtcggaagaaacggatgatcaagagattcgagaatctctctctccgtcttagctctaccttctttgcttctgctcgcgagctcctttttatccataactttcgctgctaacagaggtaatttaacggcggtggtttctgttacggcggttagggatttgaattcggctaagaaaacagagccgatgtcgccggaaccgagacggagacggaatctgagatcggagagtgagagagatgatcggagtgaaggagggagtttcgaagatgagaatgaaccgtgagctgatggtgctggtgttaaagctgcggcggaggaggaagagcgagaaccggagcttgtgcttcgattcacggtggttccggctgatgtaaagcttacactctgtaagtcgtcggttaattcgtcaatccatggctccattttccgatctactgagagtgacgacgagagagagaagaagaagaagaagaagagagggagagaaagagagaagtaactgtgagattttgcctttttggggaagagaaaaaatagaatcaaaagaagatggcaaagttgtaatttaagggttgagatatggtgcgtttcgtaatttaaggtaatagttcgattgttaaggagatgatgatacagtattctataattgagatgttttatttatgtaaatagacaataattagggaattatttgagagggatttttgatttctctatgaatttttaagatctttggtataggatttgtttcaaaagagagaaacaaagagacatataaatctaggcccctacagaattaagataatgacatatacatatcttgtgtttgttctatttcagttgtgattactagtattttcttcgtatggtacaattataaataaatatctaatcactgtcttttgaatattatgtcaccaagtacaaggatggtgttattggtgaacaatttgtatcgtgaactcaaatccctattgcacgaacctcaggttagtggtcgactggtcgctcggcctcgttttcatttcctttgaaaccattatggtttagatattggtttaactcaattgcatatacctaaccggtttgactcgggtgaatatgttagataaggaaagtgtatataacccttgtattttctcattaatgaaatcagcagaaacattttaggttggataaggaaagtgtctataaccatatcattgaaagacaaattgcttgggtcgaaaccggttttgttaagtccggccctggatatattaccaatttgtaacactcgtcttaaaccggatattttctagtcagaccgaaaaaatacaagtgaaagaggttcaaataaattgataacttagaacattcataacaatgaccaaaacaaatcttttcaatgaggtttgtaaattgtaactatatatccgaattaaaaaataatcgtcataagtactaactgtttttcggagaatgaaatgggctatctgttgaaaaccttaggcctgagtttaaagaccatctgtacaattgggccaataagtaacgcattatccatcaacaaagtactgaaacatgagacacttagaccatctccatcgggggtttcttgtaagaatttctcacaattaaaaaaaaaaaataataaaaatgaaggaaaaagagtgtagaaagtttctcacttgagaaactctgagatactctttacaacccatcatgataattctcttctcattattggttcaactttttaacaaaaatatttttttaatcaaaaaatcaaattataatataatattaattttttgtttgtttgagaaactttgtgggtttctcatggataaaaaggcccttaacttgtcatagaagttacaacacaacatgaaagttaaacatcgccggccaaaacaaaaatatttctgtgaatttacacaaaattatttgcattaccgaccataatgttctcctcagtaccttcaacacaatacaacaatacattaacaaaattggtcttctagcattagcctcgtctctaaaatctaacatcttcttctactcctaatccaacaattgtttatgtatattcccaattatacccctctattactttgcttattacggaaaaggagttcaaagagcagaagaagaaaactcgtatatcccaaatctccaacttttcaggggaatgatgatgtactgtcccaacctcacggcttctctaacaatcccttcatatttaccattttgccactacactagacaatttcgtccttctcatttccgatcatctgataaaaacccgaatctcgtttctatcatccgagcaaaacccagaatttctcattcgcttaggtgctttgtatcatcttcaatggcgactcctcctccgacgcagagcagcgaaaccaaaccttactctgttctttttgtctgtctcggaaacatttgtcgcagcccagcggctgaaggtgtctttagagatatcgtgaagaagagaggtctcgattccaaattcaacattgattccgctggaacaattgattatcacgaggtatgataattagttccaaaacaattaatctaattttagggtttatgagagatgcttgattcatggttgatttgaaatattggtgaatgatggttttgtatgtagaaaggtttggttttggttttaggtttttttggtggatgtaatttggtaggaatacagagttatagagactttgaaattcatgtttctgaatcaattttgatgtgaaattgctcttcttactagggaagagcaaaaacagtaatctatttttatggtgattgatgctttgattggaacaattaggcaatggtgctttcagattttggtggatgtaatgtggttgtaaattaggagcagtggagactttggaatttatgtttctgatttgtgaaaatgttggttttttaaaaggggaatatggcggatccaagaatgagaagtgctgcgaaacgtcgcgggattgagataacatcactatccagaccgatcaaggcatctgatttcagagaatttgatctcattcttgcaatggatgaccagaacaaaggtagctgatagagtaatttattcaacctttgtagggtctgatcgatttctatgcaaatgggattcaacataggatagagacttttgcaagttgggatctgattagagttatatatgtagaattgaaataagtatgagtttgaatgtttgatgtttgcagaggatatattgaaggcttataatgtgtggaaagccagagggaatttcccgcccgatgcagataagaaggtaccgttggtgtgtgtttgctggactttggaactctatttagttgatagattttcgttgaattttcaggttaagctaatgtgttcttattgcaagaaacacaatgacaagtttgttcctgatccatattatggtggagcccaaggttttgagaaggtaattaccattagactctaaagaagctgaatgcagatatttaatttggttcataccattagaggttgtctatcaaaatggttgagtcagtctataagactttaaaatggcattaccagtgtcactcccaagtaacttttccattcccgaattttagtgttttatgtggacaaaactcacttggaaacatgaatcttgatctcttacttgttctttcacaggtactggacttgcttgaagatgcttgtgagtctttgctggatagtatcactgcgcaaagttgatgatactacaagtacaaagtcccaatcctagaacctttgttgtttttgcacatagaactgaaaagttctcttattatatttaagtgtcatcagtgatgacaatagagtgagaactgatgtgaagcttggatcttgatcttgttggtgttttccttgaaaaaccctttgttaaatgatctactgatggatcattattattgagattgatagcttcagtgatgtcaatagtttgtgaggaatgatcttcctgattcttaagaatcatagagagtggcactctttacacgcttgaataatacgaattcttttgttcgatcattattattaggaaagaaatagatttaaaaaaaaaagaatgtgtggacgtgaagtgttgttgtttgagatgataacagaatattttctcttatcattatgtggcttccgagaaattaagtgaatggtggtggagcatatggacaatgattttgtcgtttgcaatattttccacgaaatctcactatattttccatgaaacatcaatggagtttttctgtgccaatagactcgtcaacggtctatatcctcattcacacaaattgtttgaactaccaaaattccattaaacccgtgtgattcttcaactctctggagatttctcatcgttttatgcatcggtgagattttcatttttttactcctcactgtctgaactaagttccaactatttttaagttttgcttaaggttttatcactgtggatttgaattgatttgatgataatgctttatttgttttcgattagtgttttgagcccatttcttgattatgtgttcttgatggtgggaattaatggttgcagcagtgaatcatcaataatctaagttctcatgggttctgcaatgagcttgagctgttccaagaggaaagcaacgagtcaggatgttgattccgaatcttgtaaaagacgaaagacatgctcaacaaacgatgctgagaattgcatattcattccggatgagtcatcttggagtttatgtgccaacagagtcatcactggtctgtatccattcacataaaggccatcttaaatcttgatccactctttaccatactaatgaattattcttatttcccttggctcagtggcagccgtagctttaacaaatttcagattccaacaagataaccaagaaagtaattcttcttctttatctcttccctcccttgcaacttctgtgtctcgaaactggaaacacgatgtcttcccgagcttccacggagcagatgtccgaagaacctttcttagtcacatcatggaatcgttcagaagaaagggaattgacacattcattgataataatatagagaggagtaagtcgatcggtcctgagctcaaagaagctatcaaaggatcaaagatcgcaatcgttttgctctcaagaaaatatgcttcttcgtcttggtgtcttgatgagttggccgagatcatgaaatgcaggcaaatggtgggtcagattgtcatgaccattttctatgaagtggagccaactgacataaagaaacagaccggtgaatttggaaaagccttcacaaaaacatgtagaggtaaaccaaaagagcaagttgagagatggagaaaagctttggaggatgtggcaacaatcgccggatatcattctcacagctggtttgtcttcttgatttatattctccttaattaatatttccttgttaaagtgtattctttcagatcttcgtgaccattttatcgcaacgattgtatattgatttgatatctatcctctattgtcaggaggaatgaagcagacatgattgagaaaatagccactgatgtttcaaacatgttaaatagtttcacaccatcaagagatttcgacgggttagtagggatgagagctcatatggatatgctggaacaattgttgcgcttagatttggatgaagtaaggataatcgggatttggggaccgcctgggattggtaagacaactatcgccagatttctgcttaaccaagtctccgacagattccaacttagtgcaatcatggtcaatatcaaaggatgctatccaagaccttgtttcgatgagtacagtgcacaattgcaactacaaaaccaaatgttgtcccagatgatcaatcataaagatatcatgatttctcatttaggagtggctcaagaacggttgagagacaagaaagtgtttcttgttctcgatgaagtggatcaattaggacaactagatgccttggcgaaagaaactcgatggtttggtcctggaagtcggattattatcacaacagaagatctaggagttttgaaggctcatgggatcaatcatgtttacaaagtcgaatatccatcaaatgacgaggcttttcaaatcttctgtatgaatgcctttggtcagaaacaaccacacgaaggtttcgatgagattgcttgggaagttaaggctttagctggtaaactccctttgggattgaaggttctaggctctgctttgcgggggaagtccaagccagagtgggaaagaacactaccaaggttaagaactagcctcgacggaaaaatcgggggcattatacagttcagttacgatgccttatgtgacgaagataaatatctatttctttatatagcctgcctttttaacggcgaatcaacaaccaaagtgaaagagcttcttggaaagttcttggatgtgagacaaggccttcacgtattagctcagaaatctctcatatcctttgatgaagaaatctcttggaaacaaattgttcaagttcttcttttaaacaagttctcgcatgtgaggcatacgaagagaaacaagtcgcaaataatacggatgcatactctgctagaacaattcggaagagaaacttcccgtaagcaattcgttcatcaccgctatacgaaacatcagcttttggttggtgaaagggatatatgtgaagtgctcgacgatgatacaacagtaagttttgccattgcatctccccttgttatttgataacacatcatcattactaatatttcttttggctcatgtttcaggataatagacgttttatagggataaatttggatttatataagaatgaggaagaattgaatataagtgagaaagcacttgaaagaatccatgattttcaattcgttaaaatcaattacgtatttactcatcaacctgagagagtgcagttagcactagaagatctgatttatcactctccacgaattagatcattgaaatggtttccttaccagaatatatgtttgccttctacttttaatccggagtttctcgtcgaactagatatgcgttgcagcaagcttcggaagctatgggaaggaactaaagtaagtgattttgatgaaaactttcatttttttttttaaatctataatttgattccgtaaatgtttattattgtatcaacatgatcttctttgtcaaatgcagcaacttagaaatctcaagtggatggatttgagtgattctagagatttgaaagagcttccctcctctattgaaaaactcaccagtctccaaatattagatctccgggattgctcaagtcttgtgaagctcccaccatctatcaatgccaataatctccagggattgtctctaacaaattgttcacgtgttgtgaagctccccgctattgagaatgtgactaatctccatcaattgaagctccaaaattgctcaagtctaatagagctccctctttctattggaactgccaacaatctttggaaattggatatcagaggatgttcaagtctcgtgaaacttccatcctctattggagatatgactaatctcaaagagtttgatctatctaactgctcaaatctggtggagcttccttcttctattggaaaccttcaaaaattgtttatgttgagaatgagaggatgctcaaagctagaaactcttccaacaaacatcaacttgatatctctccgtatacttgatctcacagattgctcgcagttgaaaagttttcccgagatctccacacacatttcagagctcaggttaaaaggaactgcaataaaagaagttcctttgtcgatcacgtcgtggtctcgtcttgctgtatatgaaatgtcatactttgaaagccttaaggaattcccgcatgctcttgacatcatcaccgacctacttttggtaagtgaagatatacaagaagttcctccatgggtcaagagaatgtctcgtttacgtgctcttagactcaacaactgcaatagtctggtatcactcccacaacttccagattcccttgattacatatatgcagataattgtaagtccctcgagagactggattgttgctttaacaatccagagatccgtctctatttccccaaatgcttcaaactgaatcaagaagccagagatctcatcatgcacacatcaactcgtaaatatgcgatgttaccaagtatacaagtgcctgcctgcttcaatcaccgagctacttctggggattacttgaaaatcaagttgaaggagtcgtctcttcctacaaccttgagatttaaggcttgtatcatgcttgttaaggttaatgaagaaatgagagatgatgagatgtggccgagtgtactcattgccatcagggtcaaacagaatgatctcaaagttctatgtacagcaagcatatatccagttttaacagagcatatatacacatttgaacttgaagtagaggaggtgacttccacggagcttgtctttgagttcacaccattccacaaaagcaattggaagataggagaatgcgggatactccaaagagaaacgagatcattttgccggagctcttcgccggatcttccgccagaatcttctcgtgcgttctctctctctctctctcactctccctttctatctctctgtctcatggattggttaatgattcgatttctcctaatgggtttcaggtgtgtttctagctaggaccactgtttgagaggtaagaatcatgggtttgatttctccttgagtcattcgattattggttttattttgtgtgaatgggaattagctgtgaaatatgtggtagccacatgtaatgattttgtcataaacattgtgtctagcaaactagacattgattaatcatttgagtcggatttggcaagctaatctagttatataatgacatgtgacttttaaaactgctaatatttcttgcaaatgttttcttgcgtttgatttatttgcgtatgttattggcatttctggttgcaggttttgtttttaatgaatctgattggtcttttctaaatactaatcgacttcatccttatcaaatttgattggtttcatcatttgagctaattctatctgattcttgtacattattttagtatttgtctctgtttgatgacatatcattgatgtgataaatgtaggtgaatgaaaatctttaataggagctgccattgtgtgttgattgggtatcaagtactgcttctaagtgatccaaatcctgcttcagcctctggacttgttctttcttctaagtgacccttttgttaataattttccatctgtaatgcgcttgattgcttgcagcgttttctttgtgtctcttggtgtttgttttgtttctttttctttgtgagagatcatcatcacaagtcaatgaatagatcatgtgtttcagatatgctcgtttcatgcgtatgtatcatgttttatctatgtttggtaaaaacttatattgttgttgcttcatctgttttagcatatataagactggagttattaagattttttggagtttctttaatttcataatataggcttatatgctttggtttttatataaaaaacaaaaaaaaaaacatgaaaatagaagtttaaatgtcaaatataataatttgaaatttatttgattgtaaatattgatttgatcagtaaaataaaaattaatatggttagattaagaattgaaaaataatcagatgaaaatatgggcattttagtcatttttaatcagaagcatctagatggatcatccaactgaacaaataagcaaagttttttttaaaaaacaattagatggatcatccaactgaaccacaaaaaatggaaacgaacatcatttagatcgattagtcagatgaatcatttggtggaccatttggatggacatctaaatgagcaaacgaacacgacctacaaggtacaaacaacaacaaagattgaataaaatttggtgtatcctatcaattctagaaattttcttacgtaatgaataagtaactgtattgaatcaaaacacaaacttgttccaaagttagttctgttgtatccattgatatagttgagaaacttaaacaagatttgagaattgaacaatgatccaaatccctacaaatgtagattagaccatcaaacaaacacgatctgcaagcattagtgaattgtcaagaagaaaatttaaaaattgatagaataaagagaagattggattgcgggtaagtgaaattgaatatttgacctaaaggagaagaaaaaagtgaaggatctctgaaaaatagaaaagagagatagagagagcttctcttaaactcggatctgaagcgtggaatgaagttagaagaagaggatgacaattttctactaattggaaattacgatattattcctatttttttgccttcgtgtcgccttcttcgttgtgtctgacattgcctttggacatttctacggaggttttgtgtttaccagcgaattgattccagaagtcgaagatggacccgtcgtttttacaggaattgttgtggatatgggccgggggaagccgaaaggccaattaaagaattttaaagaaaaaaaccttttaatacaaaaaacccctcgactttttacaaaaacccctcaactaaaaaagtcgaatgaaaatttctcttcattggtcaatataaaaattctaactaaattattaatgaaaatcaccttttaggtacgaaattttattaaaaatactcctttatttataattaggtaaaactcgcctaaataggagggtgaaaatattaaactattaaatatttttaaatcgcaaatttcaatcttacaatttccattttgttatatattttaatcttacaattttcattttggtgaggttttttgagcattttccattaaactttgagcataagctttatgtgttagtatcgctatgacaactttgttccatatccattcaaggttttgaaaaatgtagaacataaagaacaaaatgtagcccatagaagttgaatataacccaaatttatcaatgcaagtgcagaacctagtgttgttataattcagtagagaaattttatggatagaagtggatcacaattttgtgtaattaaaccaaattaacgaaattaattgaaatttatttatactaaaatttagaataaaagtacatttaaacataataaattatatagtagattgatgagtttatttttccaaaattatcccacaattatgttgtgtgcgcataatacgttcaactgtccacaatacaaaataatagagggcgccaaattgatgttttttatctaatcaattgaagcttcatatatagattgaggaatatcaaataatgaatcatgtttaattataacaagaaactcagctttaagaagatcttacccctagactttgattggaacatctaacgaaaactaaaaagaagtagatcacatcgatcaacttagataaaggagtctccttgaacatctccacccatggaaatgatacttgggaaagtcctttctcaaagtaaaagtgcaacgcaagtaaatcactgcccagcacagactatgaacaaacaacaagaacaaaaaaaaaacaaagttgtgatttatcaattaacattagaatttattaaacaaaacaagcagagtttcaaattgcatgcacttatcggtttggcaaagaaatctgcaagatgtgaaggatcgatcttcacagcagcttcgagcaaaacaactgactttttcagtttcttattcttccatacaccgggaccctccgattcatctttcacaacggaagtaaccttgccggatacgctgtcacttccctcagatctgctggtttttgcttctggttacgcttccagctcacgacgtgggagttaccttttttaagccaccgaactccatagatttgatcacttccattagttgtactaatgtttttcgctttatctgttcccttttatttcttaattctctatgcgacattaaaattagatgctagacggtgtgtaaatgcaagaggagactcagatgctgagtttaggtttaattatataaactgtcgtttgatttgaactgttacgatcgttaaaagagcctagtcctacccaaatctgaaataaatccgtcaccagaaatcggaaaaaaacttttatctattttttttaataaaaaaaacaaagtaacaaaaagtagataatatatatatatatatatatcgggctgaaacagttttaattccttatagaacccgatatatatatatatatatatatatatatataaatattattttcggtttacataaaaacaaacacattctaacaaatcatgacgaggacgaagcagagtctataaaggaagaagtggcgatggagaacgactccggctcgtgttatacaactccgaatgagctctccactgctgagatatatgatggttacgaaaacgacgacgtcgtaggatgaattcttcggcgatctgggtttcgcagagagagcggcaagattctcgtgtttcagtagccgcagttttaatggcagaccaaacttagtcgttcctgattaatgctcacccgtcacaaactaattgttgcctatatatatatagttaaatttcagaatctgttttagcccatttggttatgtatgcttagaatgttctaaaggttatgggttcgaaaggtaattattttctttttaaaatatgataaaacaacgtcgttttgataatctatatacagacttatgcggtttgcaaaatctatacacgtctaaaggtaatattgtgggtgacatttaagatcgtggtattgacctgcatttatttgacatggaggttaagttgcaaaaaaaattatttatacggtttttttgcataaaactcaactcaaaatgaaacaaaatgtaacaacattaggttttgaatgaatgttatagatgaaactaactaaaccggacgaaaatcatattttttgtggacaataatcagtcgtgacccatatttattttaggaaaaagtaatttgaagtttgtttgaccaaattttttttttttatttttttcgtcaccattaccatttaatttaatggagatttgtaaaaatatcatttttcagggcatttccatcaaggagaatccaaaaagtttctcaaacaaaaaaaatatatgattaaatttttagtttaatgaaaaaattgaaccaattgaaaggagagaaatgtaattatggtttgtagagagtatctcctagtttctcacttgagaaacttcttacactctctcttctcatttcattatttttattattttaatagtgagaaactctcttgacagactaccaatggagatggtctcaatgtctttttgcaaaaataccccattccattgtccatttttaaaaatactcattttcataaacaaatgactaaattacttttcatctaatgagaacataaaattataaattgaaattttcccgccaaaacatttttggctccaatttttttttttcttaaaatttatgtttcctgccaaaattatttcctaacgatcatctgcaaaaatattcccgccaaaatttgtattttaaaatctttgtaaatttttgtagaaccctttaaaaatccttgttaattctttaaaaaatctttctaaaatttttaaagccttttaaaacatttgtaaagttgttaaaaacaattgcaaatcattttaaaacctcttaaaatccttataaagtcttcaaatacacatgtaaatactttaaaaccactttaaaaacctttgtaaatattttaaatccttgtaaatctttaaaaaccattgtaaaagattttaaaatcatttacaagagttttaaagaattttaaaaggatgtacaaggatttttaaacctttgtaaatccttttaaaattcttttgaaactcttataaagtcttcaaaaacatttgcaaatcattttttaactcttcgattttttttttaatatttttaaaacatttttaaatctttttgaactattttaaaattcttgttaaccatttactttaaagatttttggcgggaaaatatattatttcattttattaacttaaaatattttcaaataagggtaaaattatcatttaaaatttaaaaagttataaataaaaatagactacataatgaagtataataaaaaaaatggtcatattggaaggatattcctaacaatttgtttaatttaagaatgataaaaaaaaagggtctaatccataggcggttttgtctactttatcaactaaattgatcccttggattctattttccaaatttgaaaatcctaaaatcttaaataaattgatcggacaaacttgaaaacttcaaaatccagaaagaaaaattagaaccataccttttaaaaaaaaaatctcatatatttaatggaatatttaaaattataatgttaacttaaccatagttaacaaatttaaccctagggcttagattctgaccacctctatatagaaaaaaagaaaccctacctcgtcgcagcccccaataaatacctctgcaccaggaaaacaattcttttcagtctctccattgcttatcattttctctgtttctttattcatttatgttttcgttttacattctttctaatgagtttttatttaacatcaaatccatttgattgcaaatgatgagttaaatcaccattgataaaagaagctcaattgagcactgttgaaaatcaaaaatttccatgactctgatgcaattcaagaaaaatcaaatccttagatctctttttttctgttctttctcagtttttgttaataaccattgaatttgcttttcaattgtatttctgtttaatcttaatcattctctgcgtatttctcactagctttttttaatctattttttatattagtctttacaaattgtactgtacaacatttaacgaactgaatttgatcaaaattgaacttggcccaaaaaaaactaaagtaaaaatcaaaactgtaacaatgatgagaaagtgtacaaaagatgaagaagatggaatcaatcagaagtggttatggtgccccaatagccgttgaaatgttcatatcattacaaatcccataactaaacaagaaaattaaccaacaatttctaagaatagatgttttacgatgcatcgttatcgttgtctccatcgaaatattcatcatccctctggatctgcttatcccgtgaacgctctgacacattcaaaccgtttgcaatatataacattaggggggtttattggttcttacatttataatgactttaaaatctttataaatccactgttattcaatattgaatgtttaagactttgttaaagtcttgtgttattggtttggtattttaaaaattgtttttacaatcattacaagtcatgcgttattgggttaaagattttaaaaatttaatcaaagttatgtgttattcaaataaaatgaatttaacaaactttatgactctatttaagtatagtgttattggtttattgagtttaaagctttttcttcgtataaagactcttccaaaataatagatgcaaccttgatatttcgaaagttttgtaaaatgattattattaattccacatcaagcacacaacatactcgtacacctaaaaagtatcatgattattatcccctacctcctaaaaagcaaacgccacacaaaacaatagagaagcttttattaaaaactgtaatggtaatgaaaaactcaagaatcctaaacggtaatgaaaaactgtttcgtcacaaaaaaaacactcatcaagctcctgtagcatccatccacatattatgagatattgtgtctctccaattgttagcatattctctttgttgggattccagaattccaacatctccattttcttcatagttgttttcttcattgtcatcgctattctcttcattaatacttgtttcaggaggaaactcatctgatcgacattcttgatgaagaaaattatgtaatccagcacaagcaagaactagctctgtttgagtcttaaaaggatatggaggtgctgatttaaaaatcagaaaacgagatttgaaaataccaaagattctttcgatgacattcctcaaagaagcatgacgtagattgaacaactcattctgggtttttggatcgcggccttgacctctaaaatcttgaagatgataacgagtacgccgaaatggagccaagaacttgcggcgatttgcatatccacaatcaactagataaaattttcctgaaaataaaaaaatacaagataaattattcttcttaaataaaatatagaagaaattatggatacatagaaaataaataccttctggaacttgtagcctgttagtgttccttgttaaagcatcattaagtacttttgaatcatgtgctgaacctttccatccactaaggatgtatataaattgtagatcaaagttgcaagcagctagaacattttgtgatatgaaccctttccgattacgaaaactagctgcatcacatgttggtaccattgcaaaaatgtgtgttccatcaatggctccaatgcaatcctatatattaatagaaattttttatatgctagttaatttcaataaatagtaacgttatataaataaataccttgaaataagggtaaaagcttgtactttctcttatctttgcaggtactctaacttcaggtttagccatccaatttggtgcgacgaaagctaatgccttaagtgccttatgaaatttatgcttgtagaataacttgatctctgaaatgtgtccattgtataacagtatcttgagttttggccaaccgtgagtaaaaaagtagccaaaatttcttcgacgcatatatatcgtgtatctcttagccatgtcttcactcttacaacatcacagagtttatgaaacacttctggttccatacgatataactggcggaaatgcgcaggattaactgtaagagcagtttggatataattatacccaactcttgagacggatcgacgaactggacgatcaataaaagtactcgttgttgcattttccaataacaaaacatgatgtccaaatctgactcaccatcttctgcttcaattttttctctgtcatttaagttctcttcttcgtcaccaatgttctccatgttaaacaccttcaaaagaatatatttgttaaatatgttcatagcacgtagtaagatattaatatgtacatagcacgtaccatcatattagacgtagcacatagcatgatattaaagaagacatcataaaatgacaagtctcgagccatcttaaaaaaagaaagaaagtattattcataaaccaaatagaaaaaccaaaaagaaaaactaaaacaaaaaaccatgaaacaaatagtgtaatgatgaatgatgataaaaaaggcaaacagataaaagtattgtatcacggaatctgacatattctcacaatctttctcattcttaaggatatattattgtagagcatgctctttaaataatttcagtttggcttatgctttagttgctcaatctctatttaaagagcatgctctgttcttctttatttcaggtttattaaatttagagaacgttcttttcaaacctttccttgatctcattaccacttttgctagctgattctgatctttgcgaataatatgcaacgtataaatataaaatttgcgtcgagttttcagaaatagcaaaggaagcatttacgtttgacacctaaactgaaaattaatgatgtgaaaaaaagatcaaagaggactcgattaatgcttccaaagatgatccgtggtgcatttctctcttagaagatagcctttttcattaatgcttcttaattactcaaatggatccaaaattttgtaaccatcgattatcaagcattccaaaaaaaattcctttttttttttttttgaatagaatattaaattatactcaaaagaaaaaataacgttgttacaacttgtgcatcgagtaatttataaagagaagattaaaaacagtttgaaaaattgatctaaatatcaagagcggctgtggagccacgcttggaagcatgcttcgtatctattatccttttgcctttgaattgtggtgatttgattcctgacttgtatgtcgatccattgaattaattggcctgcagtattcggtgtttcgccatgtctgcttctgtttctctccctccaaatggtgtatgcagtggcttgaaggatgtatttggtgaggaagctctcgattcgacaacgcttgtgctgcgtagcataggtgatgatttgggaccagttgtttgagtggtttgtgttgaagacgcctttggcaagagctgtccagactgccgatgtgtagctgcatgaaaaaaaggtggtctcgagtttcaatgccttggcgacaaaaggtgcagtcacctgtttctcctcggttccacttgatcatgcgggctccagtggcgaggcggtcgtgtgctgcaagccataagcagaaagagtactttggtgtagcatgtgggaaccaaactcctttgtgccaggctacctcgtttgatgttgtccggagataattccaagtgtttttggtggagaatttatctttgtagatgtcattcttccctttccataagacacgaccctgctgctgctgctgcgttctcttttgatgttgagtggacaacacttcttcaatcgtgtttaagatctcttgtcgatgatgtcgtcttcgacgagaagtccatgcatccgctacagacattgtgcgactaatccccatgtcaatggtgcctcttatccctgcaacatcaataagtcgacccaaaagcgaccagtcatcaaaccaaaaggaagtactttcaccatttcccacctcagccttacaaaaacgttttgcaacccctctgtatttgagaattttcttccatatccaagatcctagatttgcattctctttgacaatccaaaaaatctcgcgctttaacaagttgtgttctacccatttgacccataacgaatcaccatgagatataattctccagaccagtttcaaacaacaaacatcatttgcctctttcaaactccggaggccaagacctccctctgattttggcttgcaaacttggttccaagaaatttttgccttttttgaattcaaatttgttcctgaccaaaggaaacttgagcagagcttctctatttcttggatacatgcacgcggaagttggaaagcacttaaccagaaattacaactactccagatgattgaactgatcaagttaaagcgtcctgcaaaagagagaaatcgagatgaccatgaccctatacgttttcttatctgctcaattaacggagcgtagtccaccgatgatagtcgctttgtcactaaaggtagtcccagatagcgtataggtaactccccaacttcaaaagggaaatgagtgtggagctgagcccgagaagtactagagagaccagccgaaaaaatagtggatttctccatgcttattttaagacccgaccattttgaaaacagatcaaagacctctataatgccctcaattgatcgacattgaccatccgtgagtatcattaaatcgtctgcaaagctcaggtgggttaaccccatacgcttacaatgagggtgatagccaatacgtcctattcctacaaccttgtccaacaattttgagagaacgtccatacaaatcacaaaaagatatggcgagagagcacacccttgtctcaaacctctagaactctgaaaaaacccagccaattctccattgacttgtaccgagaaagaaggcgtggtaatacaaagtcgtatccagtgtataaacatttcaggaaaatgcatcgcagtgagagtgttgatgaggaatgaccattggactgagtcggaagccttagagatgtcgatttttattgcacaacgctccgagatagaatctttatggtagtctttcaccaaatctgttgctagaaggacgttttctattagtagccggtctttaacaaacgacgattggttgcctgcgataaactgtggcagcaaaagctttaatctattagctaagattttggagataaccttatacattacgttgcagcacgatataggtcgataatctttcatctctttggactccagtttcttagggatgagagctaggattgttgagttaacacctttaggcagaaaccccaaagcaaagaaggattgaattgctaaaataaattcaggacctaaaatctcccatgactccttaaagaattcagacgtgaaaccatcagggcctggagatttatcattaggcatagagaaaaggaccttttttatctcttctgctgagacaacacgggtaagcatttgttgatcggtttcggtgcagcgaaaaggaacagaccgcttattttctccactgaaacaccttcataatctgtaggtatgagttgtaggaactctctaaatacgaaatagcatgtcctgtcaggggggggggattccgtctgacacgcagagacatagagaagctcgtcagctcgtccgtctcaagaagctcgtcctctcgcctgcctcaagaagctcgtcagcttgtccgttcaagtagctcgtcagatcgcccgtctcacgaagctcgtcagctcgcccgtctcacgaagctcgtcacctcgtccttctcaagaagctcgtcagctcgaaacataattttgtcattttcttataaatttcaatattataaaatttgaaacttaaaaaaatacaatatcgacccaaaattcatcattgaattttgattgttatatttaagatttttcctgtaatatatcgtctcgtattaatatattttttatatatttataatatttaaatttcttgtaaaattcaatttataatttttaaaacgttataagttttaaaattataaatatttaaagcattttttaaagataaactttataaaaaaaaattaaaattataatatttaacttttgataaagttataatatttataatttcttgaaacattttaaagtttcaattctttaaaataaaaaatccgagtaaaatcggataactattttaattttggacgcctgataaatcaagcttcctgcttattcgtaattagaatcattttggtccttttataatatgggtctgaaccattgtccaatttttttaagcgatgtgggacattgtacacatattatttcttcataggttgaataatatatgtccattttaaaaaatttgaattacatcatattcagaagaaaatataatattttattaactatatatattttatataaattcaaaataaataaagtataaaatcaaataaaaatgaaagaagaattatatatttatgtttaaattaggtagaaatattttaggaaattagttaaggtaaataagaaatatggttagtttagagatattgtttatattaaatttggtaattaaatcattaattttcgtttttaattattagtttttaggtaacttttccaaaaattaatgttatccaagatcagaacaaaattaaacatgttatccaggatccgaacagagttaaaccgggtaaaacccacccatttgaattaattgttgaattatggctcaaatcttcaacattatcttcaaaaacctcctacaaaaatgtatatatagatatctcacgagagttatatggtgggacgggtttggatcgatattaatacaaatttataatatcatcaacaaaaagtaataatacggtttaaatcttgttttaatattttatcagcatcagtttttttaattgtacatatataaaattattaactttaatacacaaaaaaatcgtaaaatctaacattattgtctatactaataaaaaaaatttgtccgtcgtaccacatgttaaatcctaaaattgtacactaaattatatatatatatataaggtttttatattcaaaaaaatacaaaataataggttatataataatgataatcaattaagcatattacattttgattttttctaaaataatatagccccgcggtataccgcaggttaaaatctagtgttcattaaaagttaaaaggctataaataaaaatagactacataatgggtagaattaaaaaatgatagtcttggaaagacattcctaacaatttgtctaatttaaaaatggtaaaaacaaaaagtataatccatagacggttttgtccgctccatcaactttaatcgtttcagaccttaggttatattttccaaatttgaaaatcctaaacacgaaaaataattgatcagacaaacttgaaaacttcaaactccaaaaaaataaataaataacccaaacctttttctataaaaaaatctcatatatttaatggaatatttaaaattataatggttaacttaaccatggttaacaaatttaaccctagggcttagattctgaccacctctatatagaaaaaaagaaaccctacctcgtcgcagcccccaataaatacctcagcagaaggaaaacaactcttttcagttccattgcttatcattttctctgtttctttattcatttgtgttttcgttttacattctttctaatgttttttatttaacatcgagtcttatgttgctcgatatatatatatccatctgattgcaaatgatgagttaaatcaccattgataaaagaagctcaattgagcagtgttggaaatctaaaacttccatgactctgatgcaaattttgatcaagaaaaatcatatccttgatcttttttttctgttctttctcagattttgttaataatcactgaattttgcttttcaaatgtatttttctgtttaatcttaataattctctgcgtatttctcactagcgtttttaaatctattttttctattaatctttagtgttttttactaacaaggctgcctaaaaataaaattgaatttgatcaagtgcaaattgtactgtacaatatgtaacgaatttgatcactatataagtcacaatgatgagaaagtgaaccaaaaagcttcattcatatacaccaagacgaaaacatgaagaagatggaatcaatcagaagcggttttggtgccccaatagccgttaaaatgttgatattattacaaatctcataactaaacaaaaaaattaaccaacaatttctaagaatcgatgttttacgacgcatcgttatcgttgtctccatcgaaatattcatcatccctttggatctgcttatcccgtgaacgctctgaaacattccatatataacattagtcactaagaaaacaaagggactaaagtagagccttgaaggtggttatcgatacttacgatccacacgtacatccgggttttgttcgtcttcatcaaaatccggtatgtagaaatccggtggaacctaagaaattcaagtaaaaaaactgatcagtgtaagattgataaaagcatcaatgtgtcctatgatgatctgagtttacctcctgcatctgtacgcttggagcgtgttgaatgtatcgcaaattctccaaaatctgcactttgatcgaactgatgtacgatttggtattaagattctcctgttttcatttcaaacacacaaaatgattctcaatctctctttagattttgttaaagcaatgaggaactataagttacataagagctccttacaatgtgaccacccggtatcttcaaagaaaaatccggcgcaaaatactttatgtagtcgttttcaggaatctctgcagaaacaattaacccctgagccccaaaacattaaactttctctgacaaaatattgaaacaaacttttactaaccattaggaagttctgtatccaaaagaatgccagtctcaacggtccaacaacgagctacattctcctttgtgtatcctccacctcctgtaacctaaacaacaatcggaaaaaaactgacttattcgtagagaaattaaacacattcagcatgtcctgtgaaaagcatagagaaagccatttcaaaacccaattcgcaaagaaattagcaaacgggagattgaaagagagaaagagattttgattacaagaagaaaaagcaccatcaatagagagattaaagcatcctagtcgataatatgagtttgaatgtttgtagaggatatattaaaggcttataatgtgtggaaagccagatgcagataagaaggtaccgttagtgtttttttggtttttgctggactttggaactctttttaggagatttttcagagcattttcattgaatttttaggtctagctaatgtgagtatgaatgtttgatgtttgcagaggatatattgaaggcttataatgtgtggaaagcgagagggaatttcccgcccgatgcagataagaaggtaccgttgttgtttgttgttgtttgctggactttggaactctttttagaacactttcattgagttttcaggttaagcttatgtgttcgtattgcaagaaacacaatgcaagtttgttcctgatccatatgatggtggagctcaaggttttgagaaggtaattaccattagagactaagccagttgtggattagtaactttttggtttaggcagatgctacctataaaatttcagctatgttgtcttttcaaaatggttgatttggtttataagactttactatggcattagcataccattgttgtcactcccaaattgccttccgttcgagaattttgcaagggggaatgcttatatttcctgtttgatctattttgttaggacaaaagtcacttggaaagttgaatcttgatctgttacttgtctagttgtttctttcataggtactggacttgctagaagatgcttgtgagtctttgctggacagtattataacagaaaaatgatgtgaagcttgaaacttgctgatataaatcttgttaaactgaactctttacacgattgaatgatatgaactctttacaagattgaatgatattaactcttttgttttatcattattattattaggagagaaatagaaagaaaaaaatatatattgtgtggacgtaactttgtttgagacagtgaatggtggagcatagggacagtaattttgtcgtttgcaatattttccacaaaatctcactatattttccaggaaacatccatggagtttagagtcgtcaacgatctatatcttcagtcacacaaatcgtttcaactacaaaaattacactaaacccgtgtgattcttcaactctctagagatttctcatcctttcatgtatcggtgagattttccaactatttttaagttttgcttaaggttttatcactgtggaatcgaattgattggactggctcttgatgattatgctgatattgatgctttgattagtgttttgagctcatttcttgattatgtgttcttgattttatattaatttcttgattcatcgataatcaaagttctcatgggttctgtaatgagcttgggctgttccaagaggaaagcaacgagtcaggatgttgattccgaatctcgtaaaagacgaaagatatgctcaacaaacgatgctgagaattgcagattcattcaggatgagtcatcttggaaacatccatggagtttatgtgtcaacggtctgtatccatgacactcacacagaggcctcttcctctttgttaatccttcatccatcttaaatcttgattcactttttactaataaattattcttattttccttggttcagtggcagccgcagcttttacaaaattcagattccaacaagacaacaaatatactaaatcttctgctttatctcttccatctcctccaacttcagtgtctcgaatctggaaacaccacgtcttcccgagcttccacggggcagatgttcgaaaaaccattcttagtcacatcctcgaatcgttcagaagaaagggaattgacccatttattgataataatatagagaggagtaagtcgatcggtcatgagctcaaagaagctatcaaaggatcaaagatcgcgatcgtcttgctctcaaagaactatgcttcttcatcttggtgccttgatgaattagcagaaatcatgaagtgtagggaattgttgggtcagatagtcatgactattttctatgaagtggatccaactgacataaagaaacagaccggtgaatttggaaaagccttcacaaaaacatgtaaaggtaaaacaaaagagtatgttgagagatggagaaaagctttggaggatgtggccacaatcgccggagaacattctcgcaactggtttgtcctcttgatttctactctccataattaagatttacttgttaaagtgtattcgttcagatcttcatgaccattttgtcataacggttgtatattgatttgatatctatcctctaatgtcaggaggaatgaagcagacatgattgagaaaatagccactgatgtttcaaacatgttaaatagtttcacaccatcaagagatttcgacgggttagtagggatgagagctcatatggatatgctggaacaattgttgcgcctagatttggatgaagtaaggatgatcgggatttggggaccgcctgggattggtaagacaactatcgccagatttctgtttaatcaagtctccgacagattccaacttagtgccatcattgtgaatatcagaggaatctatccaagaccttgtttcgatgagtacagtgcacaattgcaactacaaaaccaaatgttgtcccagatgatcaatcataaagatatcatgatttctcatttaggagtggctcaagaacggttgagagacaagaaagtgtttcttgttctcgatgaagtggatcaattaggacaactagatgccttggcgaaagaaactcgatggtttggtcctggaagtcggattattatcacaacagaagatctaggagttttgaaggctcatgggataaatcatgtttacaaagtgaaatatccatcaaatgacgaggcttttcaaatcttctgtatgaatgcctttggtcagaaacaaccacatgaaggtttcgatgagattgcatgggaagttatggctttagctggtgaactccctttgggattgaaggttctaggctctgctttgcgggggaagtccaagccagagtgggaaagaacactaccaaggttaaaaactagcctcgacggaaatatcgggagcattatacagttcagttacgatggcttatgtgacgaagataaatatctccttctttatatagcctgcctttttaactacgaatcaacaaccaaagtggaagaggttcttgcaaacaagttcttggatgtgaaacaaggtcttcacgtattagctcagaaatctctcatatccattgatgagaattccttatatggagacacaataaatatgcatactttgctcagacaattcggaagagaaacttctcgtaagcaattcgtttatcatggctttacgaaacgtcagcttttggttggtgaaagggatatatgtgaagtacttagtgacgatacaatagtaagttttgccattgcatcgccccctgttaattgagtttatttgataacaaaccatcattacttatatttcttttggctttatttcaggatagtaggcgttttatagggataactttcgatttatttgggactcaggattatttgaatataagtgagaaagctcttgaaagaatgaatgattttgaattcgttagaatcaatgctctcattccaactgagagactgcagttagcactacaagatttgatttgtcattctccaaagattagatcactgaagtggtatagttaccagaatatatgtttgccttctacttttaatccggagtttctcgtcgaactacatatgagtttcagcaagcttcggaagctatgggaaggaactaaagtaagtagttttgatgaaaactctcatttttaaaaaaaatctagaatttgtttccgtaaaggtttattagccaattgtatcaacatgatcttctttgttaaatgcagcaacttagaaatctcaagtggatggatttgagtaattctgaagacttgaaagagcttcccaatctttcaactgcaactaatctcgaagaattgaagcttagagattgctcaagtttagtggagctcccctcctctattgaaaaactcaccagtctccagagattatatctccaaaggtgctcaagtcttgtggagcttccctcttttgggaatgcaactaaacttgaggaactatatcttgaaaattgttcgagtcttgagaagctcccaccatctatcaatgccaataatcttcagcaattgtctctaataaattgttcacgtgttgtggagctccccgctatcgagaatgcgactaatctccagaaactagatcttggaaattgctcaagtctaatagagctccctctttctattggaactgccacaaatctgaaggaattgaatattagcggatgctcaagtctcgtgaaactcccatcctcaattggagatatcactaatctcaaagagtttgatctatctaactgctcaaatctggtggagcttccaatcaacatcaacttgaaatttctcgatacacttaatctcgcaggttgctcgcagttgaaaagttttcctgagatctccacaaagatcttcacagattgctatcagagaatgtctcgtttacgtgatcttagaatcaacaactgcaataatctggtatcactcccccaacttccagactcccttgcttacttatatgcagataattgtaagtccctcgagagactggattgttgctttaacaatccagagattagtctcaatttccccaaatgcttcaaactgaatcaagaggccagagatctcatcatgcacacaacttgtataaatgcgacgttacccgggacacaagtgcctgcctgcttcaatcacagagctacttctggggattcattgaaaatcaagttgaaggagtcgtctcttcctacaaccttgagatttaaggcttgtatcatgcttgttaaggttaatgaagaaatgagttctgatctgaaatcgatgatttttgatccgatgcgtgtagacattgtcatcagggacgaacagaatgatctcaaagttcagtgtacaccaagctatcattttataaattattttatcatttcaacagagcatatatacacatttgaacttgaagtagaggaggtgacttccacggagcttgtctttgagttcatactagacaaggaaagcaattggaaacgaaattggaagataggagaatgcgggatactccaaagagaaacgagatcacttcgccggagctcttcgccggatctctcgccggaatcttctcgtgcgttctctctctctctctcactctctccttctatctctctgtctcatgaattggttaatgattcgatttctcctaatgggtttcaggtgtttctagctacgaccactgtttgagaggtaagaatcatgggtttgatttctccttgagtcattcgatggattcgattattggttttattttgtgtgaatgggaattagctgtgaaatatgggttttgtatggattttatgagttttgtatttgtcgtgtatttagaaagatgaaacattgatgttcaaagcttgctatttttttatctgtatagatagctccgaaggattatcttaaagatgaaacattgatgttcaaagcttgctattttttgtctcgttcaatatctctacagtgtgttttttgttttgtcttttgctatttatctaaccaaatgctttgaattggtttttgtgaaagtgattgggatcatcaataagacttaagtttagccacgaaagtcgtgtaaagctaatgtagttatataatgcttgattgatggatatctctattttgctggtttagggtttagggtttaggattagatagatcatcctactgaaccaccaaaaatggaaacgaacatcatttagatggattagtcagatgaatcatttggatggacatcccaaatgagcaaacgaacagacctacaaggtacaaacaacaatagagattgaattaaatttggtgtatcctatcaattctggagatttacttacataatgaataattaactgtattgcaaaatcaaatcacaaacttgttccaaagttagttctgctttatccattgatatagttcataaacttaaacaagacttgagaattgaacaatgatccaaatccctacaaatttagattagaccatcaaaacaaacatgatctacaagcatcagtgaattgtcgagaaggaaattttaaaatcgataaataactcaagaaagctcaaatcattttaaattctaatttgaatacactctccaaagagaagattggattgccggtaagtgaaatagagtttttgacctcaaggagaagaaaaaaagtgaaggatctctgaaaaaaaagataagagagatagagagaacttctcttaaatgggtctgacattgccgtattggtgccgttggacctttctacggaggttttgtgtttaccggcgaatcgattccggaggtcgaatatggacccgtcgtttttgtagaaatcgttgtggatatgggccgctgggaagcccaaaagcccattaaagaattttaatgaaaaaaaccctaaacttaatttttaatacaaaaacccctcatgtaagaaagtccaatgaaaaaatcattcaattaataatcagtcaatataaaacatcttactaaattattaatgcaaatcacctttttaagtacggagttttattaaaatgacccgtttatttataactaggtaaggcccgcctaaataggcgaatgaaaaaatgaattagaaatttttatttatgatatttgaattctaaataataaatactcatccttacttttttgatatttaatttattaaaaaataaattgaatttcaatttcacaatttcctttttaactatttatactttcatagtaaaatgaaatttaattttacactttgatgatatttgaattttaaatagtagttcacacaattttctgtatttattttattaatttttttaaaccaaattttaatcttacacatttcattttgctataaaatttaattatctatttcatcataataaatccaattttgattattctcacctcattttaatggataagtgttgtatcaaaataatatgtatatcatatcaaatctatatattagctcatattaaaataactaacaaatgacaaaacataataaacaaaacaaaaatgaataattcaaaaaatattttggaaaagaaacattgttaagatatagttttgctatatgccataatctcataagttagttttacctaatgtcaaactaatttaaatgacttcaaatttattaaataatcaaaaatcaatccctctaaaccatattttcctaatttttggtgttttcactaatgacaacatgcgttgaaattcttagactaagacaagtatgaatatactaatattctctctaagtattaaaataaaaatattatattacattgataaatacaattgaaattaattaatttaatgttaattaaattattttgttatttgaaacttcaatgttctttttaattagttaatatccatactaaatgattttgttttatatttgatacatgctaaaaaaaattaattgaccaataacacatataaaaacaaatttgttaatttttcgtttttgttagtaaaaataaatatttttattaatttatagacatagaatttagtaaatataaatttgtttctttttttaggttttctatttttataagagaataaaaaagttaaatcttaaataacacatgtaaacatttgatcgataaaattgacatgtgtcacgatcttatgagttactaacttcgaaaaccatactttatatggtaagattccgcttaaatatattttgtttaatcaattttgtgttaatgcttattaaaatatgtaaatataaatttttaaaacttggtaatgtcgatttaaaaatttcatcgtcgtgttaccgtcatccattaaatccttgtaagtctttttaaaaccactgtaaaaggttttaaaatcatatacaagagtttttaaaatccttataactcttataaagtcttcaaaaacatatgtaaatcatttttcaacttttcaaaaaaattattataaatattttacaacatttgtaaatatttttgaactattttaaaactcttgtgaacccttataaaaggttttaaaaagatatacaagattttttaaagagtcggatttacaagagtttttaagagttttggcagaaaattattgttgaaatatcttttgcgggaaaaatattattttattttgttaaccttaaactttttcaaataagggtaaaatctacatatacatttttgcagccattttaacaaataaatcttggacttggaacttatttacgactcaatgccactgaatatatttttttcaatcgacattttaaatcaaatatttaccaaacaaaaatattgcctaaaatctctctatattaactccaccattacttcaaaaaaaatctagcattacttcaaaaattatcattcctaaaatctctcataagtatttattaatttttggttttaatttgctgttaaaaaaaatcggtttcaataatacaaaatcttttaaggtatgattttctttccatatttatttaatatttcgttttttacagcatctaatatttcgtttataaataacaaattaattatttagcattcaagaaaatttcttctaatctatcctttaattatattgactttattgattttttaaatatatatgaatagagattcaaatcttccatatatgtttatcatcttctaaggaagttaaacaattattttctgaatctaaactaaaatttaggaaactaaatatataaataaaatcgttttaattattttctaagctaaactatattacactctgatctttagtttgaatcattcatttacagtgtaatataaagaatcaatctcatattttcagttagtaaaatgtacatgtattaagataatattattgcttcaaataatgtacaaaactacccaatttaggctattaaatgacgtgaaatacaggtagtccaaaaactcaagtacatatcaatcacaaattatgactaaactaaatatttatttataacattatctacattaaaaaaattgaactacattttgtagagttattttgtttagtaagaattacaaaatatgtcattacgtaaaaggcaaaaaaatattaatttttgaaatagattattgaaatattaaaacttataaaaagtaatatctcacgagagttatatggtgggacgggtttggatcgatattaatacaaatttataatatcatcaaccaaaagtaataatacggtttaaatcttgttttaatattttatcagcatcagttttttaattgtacatatataaaattattaactttaatacacaaaaaaatcgtaaaatctaacattattgtctatactaataaaaaaaattgtccgtcgtaccacatgttaaatcctaaaattgtacactaaattatatatatatataaggtttttatattcaaaaaaatacaaaataataggttatataataatgataatcaattaagcatattacattttgattttttctaaaataatatagccccgcggtatatcgcaggttaaaatctagtgttcattaaaagttaaaaggctataaataaaaatagactacataatgggtagaattaaaaaatgatagtcttggaaagacattcctaacaatttgtctaatttaagaatggtaaaaaaaaaagtataatccatagacggttttgtccgctccatcaactttaatcatttcagaccttaggttatattttccaaatttgaaaatcctaaacacgaaaaataattgatcagacaaacttgaaaacttcaaactccaaaaaaataaataaataaccaaacctttttctataaaaaaatttcatatatttaatggaatatctaaaattataatgttaacttaaccatggttaacaaatttaatcctagggcttagattctgaccacctctatataacaaaaaaaaaacctacctctctcgcagcccccaataaatacctctgcaccaggaaaacaattattttcagtctccccattgcttatcattttctctgtttctttattcatttatgttttcgttttacattctttctaatgagtttttattttctctgtttctttattcatttgtgttttcgttgtatattctttctaatgtttttttatttaacatcgagtcttaagttgctcgatttatatatatacatatacatccatctgattgcaaatgatgagttaaatcaccattgataaaagaagctcaattgagcagtgttggcaatcaaaaacttccatgactctgatgcaaattttgatcaagaaaaatcaaatccttgatcttttttttctgttctttctcagattttgttaattatcactgaattttgcttttcaaatgtatttctgtttagtcttaataattctctgtgtatttctcactagcgtttttaaatctattttttctattaatctttagtgttttttactaacaaggctgcctaaaaataaaattgaatttgatcaagtgcaaattgtactgtacaatatataacgaatttgatcactatataagtcacaatgatgagaaagtgaaccaaaaagcttcattcatatacaccaagacgaaaacatgaagaagatggaatcaatcagaagtggttttggtgccccagtagccgttaaagtgttgatatcattacaaatctcataactaaacaaaaaaattaaccaacaatttctaagaatcgatgttttatgacgcatcgttatcgttgtctccatcgaaatattcatcatccctctggatctgcttatcccgtgaacgctctgaaacattccatatagaacattagtcactaagaaaacaaagggactaaagtagagccttgaaggtggttatcgatacttacgatccgcacgtacatccgggttttgttcgtcttcatcaaaatccggtatgtagaaatccggtggaacctaagagattcaagtaaaaaaactgatcagtgttagattgataaaagcatcaatttgtcctatgatgatctgagtttacctcctgcatttgtacgcttggagcgtgttgaatgtatcgcaaattctccaaaatctgcactttgatggaactgatgtacgatttggtattaagattctcctgttttcatttcaaacacacaaaatgattctcaatctctctttagattttgttaaagcaatgaggaactataagttacataagagctccttacaatgtgaccacccggtatcttcaaagaaaaatccggcgcaaaatactttatgtagtcgttttcaggaatctctgcagaaacaactaacccctgagcccccaaagaccgcaaacattaaactttctctaacaaatattgaaaacctaaccattaggaagttctgtgtccaaaagaatgccagtctcaacggtccaacaacgagctacattctcctttgtgtatcctccacctcctgtaacctaataaacaatcagaaagaactgacttcgtcatcaatgaacttaagattacagaaacgcgtcatacatatatataagttgagagattagataccagtaagggaagattgaacttcttcacgaatttaacacattcagcatgtcctgtgaaatgcatagagaaagccatttcaaaacccgattcgcaaagaaattagcaaacgggagattgaaagagagaaagagattttgattacaagaagaaaaagcaccatcaatagagagattaaagcatcctagtcgatccctggctagtgaatctgccccgcattgaagaacaattgcacccggttgatatatctcaacaaccttggatattatctagagatcaaaggaaatgatgaaacacaaataaacggtgaacgcatcgagaatttttcattgtttttagttaaagaacttacagtcctgaaaagacggttgaaactactgtcatcgataccatccttcagcggcacattaatggcgtaaaatttcccttctctttctcctatttcctttttaaagaaaaaacatcacaatgacaattcaaccaaacacattgaaaccgtcctcacaaatcaggaaaatgaattctgaatattaccttaacatcgcctgtccctggaaagaacttatccccaaacttatgaaagctaacagtcattactctaccaccacaaaatttaaagatattggcaatcagtttctatagtaacagctttcgagaagtagtgttatggatttgtaactgtacctgtcagtgaagtaaaacgcttcttcaaccccatcaccatgatgaacatctatatctatgtatagaacacggggatggtgttttaacaactcaagaattcctagcacgagatcgttgatgtagcaaaacccagatgcatcacattttttggcatggtgcaacccgcccgcccaatttatagcaatgtcacagagtttgttgtttaacctgcgtgcagcatctatagacaaaattctcggtcagtcgtttctctaaagtgacaagcaaacatgaataccaactgtgtatatttacctatggttccgccggcgtaaagttgacaaaattcaaacaaatcttcaaagacaggacaatcctctcccagattatctgcaacacagtaacttaatttcagcttaacatgtagattacaaaaacaaattaatgaagacacaaaacttacatctagccatttcattggggaacaagttctggttttctggattaattcgttgcaggaactctacatagtcaggagaatggaactgagccatctcgataggatatgctttgtgtggacgctgaaacaatagagaacatatacagatttcaatcgagatgtaccgtgatatcataaacaaaaagaataaaaggatcaagaacaaaaacaagaaacatatatgatgagcaagagacactaacataaacttccatcttgctatgcaggccatatgcaaggataagatgatgggtcatacaaagcctgtgaggtttcatcgggtgattcggaccaaaatagacactccccacatcccctgcaacccaaaaaaaaacattcagcataacatcacaatctcatataaactgcctcaaaggctccaatcatcaacaagaatataatctgaaactcgcatcagagtttgaatcatgcagaaaatctgaagtacgaaaatgaaagttatataactatcaagtctataaaagtttctcagagaggaatctcgaaagaacacaatttcaaacattatatgcaatgccaaatttaacaaaagttctagggtttcatattttagcaaagaaataacaaagacttgaccaaaccaatcaaagaagtcaacttcacaggtactagagtcgtcttcaccacaagaaggcttctatcttaagcttaaactcaggccaaagaatcgaaaaaatcagaaacttcacctaaaacccttgttcttttcatcaaaaaccctactcaattctggagtatttccaaactaatcgtaaccctttacttattctagactatagatatgaaagatttcacctttcgatgcatcgattgagcaataaagacaaaaactagtgcggttcaagtggataaaacttgctcaagagttacatcaatctcaaggattttggagtttctttaccataaataaagaagaaaagggaaagaaatgaatataccatcataaaagtaagagattttgtccttggaacgcatctcttaaagaagaaaagacacgaagatcgtacgaaatcaatcttaaagaaagattatacagagatatttcaggtctgcttagattcagtagagagatgagacgatttcttcattgatgaagtcgcagagatttcacgattctccggcggagccgagaagagagcagcaacgaagcgaaaagaagaagagagaagagaagaacaaggggagagtcaaaagtgaaacgatgtcgttttagtgttctgatgacatgacagatgacgtcatttaaagtgtatttgataaaaagcggttttgactcatggttttataataccagaccggtagctttccatcatttgaaccgaatcgaaattgaatttgatactgtgtatataaatcaatcgatttagttatatcttcttctttctcttgtctggtttagtatacatcttcaatttcaaaacatgtaaactgaatcaaattcgaccaaggaatgatcacaatcaaaatgagaaagaaaaccaatttcgagattataatagtaagaagttgttagattatataaacttgttgagttatttacttgttgatctccgatgtcaatgtcactaccagagaccaaaaaagaccaacgtctcgtaaccactgtctacttgattgataggtcgatacaaaccaccgaccaaacaatctaaaagacagacaaaaatctcaacattttaaagtcaagttcaacgccaaaagaaagcatatctactaaccaagataatatcctccattgccaaaaaacttcaatccttgaatctgtttctaacctttttcagaccaaaaaagagccgagattacaactttaggatccttcgttttcacacccatcctttgaaaacctaggagcttttctctctcaatcttgtttggaggaatcaacaatgttgagagaaatgatgacctcaggagaggtacctcttatgggacttaccttttaggtttgggtttctaacctgatgcagtctatgtttcacatgaacacgtgaatcttcttcaacacgcccacctaaccgctcctttgcagataatcgacggcgtcgagttgatgtgtgatcaacattaccagaattcctttcatcagctgagtatcggaattgttctctgcttattcctccatccactgcatagttccctagcttgtctctgtaatcatatgctacttcatgttcacggaaccttttactatctgccttctcataagacattcttgattgcttagcatccctgtagttgtaatcataaggcatattctcatgcataacctcacttgcgttgtctctaagaccataatcatctcttgtacgcaaaattgaatcattcgaatgataaacctcttgtctaccatcttgatatctcatattggcataaactttaacatcaccaccattacgtcgttgcaaacgctcatcatccaagtagacttgatctcggtcatcaaaaagatatctcctgcctcgaagagcttcctcatcttgcttgccagctgatgatctactgacatcaggatgcatcaccccatacgaatcaatttcatgatctcttaggagttgctggctttcatagggcaaataggcttcccttccgtcattcgaggacattcctttacgctctagagctctagcacctcctcggtccacaatctctgctttggtgacagcaggatacatcctctcatcaatgccagagtcgtagtacttcagttgttgtttattgtaatgctgataaacatccttgctttcattatccaaatacgcttcatttctatcaatgaaggctactctcctaagctctagcgccttggcatctccatggtctactataatatctgacgagttgacatcacgatatatcctgtcatcaatgccatagtcatgatctttcttaagttgttggctttcgtaatgcagatatgcatccccccttttataatccatgtatgattcctctccatcatcgaaggatcctcttctacgctcaagagctctggcttcttccccgtttacaagaatatctgatttattgagactgggatgcatcatgccaaaagagttagtttcatgatcttttaggagttgctggctttcactttgaaaatatgcttcctttcgatcatttaaggatactcctctataccttagacctcttgcatcttcatggtctactagaatatctgatctgttgacatcaggaggcatcatgacataagagtcagtttcataatcgtttaggagttgctggttttcacattgcaagtatgcgtcctttttatcattcaaggacactcctccatacctccgacctctggcatcttcatggtctaccagaatatctgatttgttgacatcgggatgcctcatgacgtaagagtcagtttcatgatcgtttaggagtcgctgcctttcacattgcaagtatgcttcctttttatcattcaaggaaactcctctatacctccgacctctgccatcttcatggtctaccagagtatctgatttgttgacatggggatgcatcatgccataggagttagtttcataatcatttaggagtctctgtctttcacattgcatgtatgcttcctttttatcattcaaggaccctcctctataccttagacctttggaatcttcccggtcttccagagtatctgatttgttgacatcgggatgcattatgccataggagttagtttcataatcatttaggagttgctggctttcacattgcaagtaagcttcccttctatcatttaaggaccctcctctataccttagacctctggaattttcccgttcccagtctgctagaatatctaatctgttgacatcatcaggataaatcttagcatcagagcgagagtcataatctttctccagttgttggattttgtaattcagataaacatccttcctttcattatccaagtatgctgcctttcctttgtttaagcatcgtcgttgaagctgcactcctcttccatcctgatctaccacaatatctgccatatctacatcagaatgtatcctaccatcattgccagggtgatactcgtttctcagttcctgtcttttatcatctgaaaaaacagcatttctctcattatccaaatatgcttccctttctttatttaagcaacgtgttatgctctgtgaagctttatcatctcgatctactacagcatatggttcactgaaatcaagattcttcttactgtcaacaccatcatatagataatcctttctcagtacttgacatttgttatccaaataaacaacctttctttcttcgttacggaagttcctgtagtgatcatctcgttcatccaccactcttgatcccaactccacaaaaggataatcttccttcacagactcataatggtcagccatcctctctttcctgctaaactcaagatgggtatcggccgcatcaacatcagctatatttgaaccacagacatgggattttgataaagatcctctcctctgcataaaaagatcattctctctagccacattattgacctcatgcctaacactgggaaactctctcattgctatatcagagcctatatgataattatcccgagcttcatccactatctctttgacacacctgctcacaactggtgaatcatggtctccacgacttaaatctctaacttgttgatcccttggtgagtttctaccaacataatcatcgacacgtctagtacgtagaacctgtggtacacaaagattcccatcataatcatgtcttcttctctcatcggaatcattcacacaaccgaaagatctagaatctgaacttacaagcctagagctttcatcttggaaatcagcaacactagacccaacttgtgacagaggggatgattcatatctataagtatctctctctctaccatcttcactatgacgagatgaatcactacactcacgagaaatcgattccaatcgtttagttttatcgttccttagcaacacattaatcttcccatgagatggagaatactcatcatcatgcgatgtgatgaatctagagggcttaggttcgtcgctcaatctcgatggatgatcatgcgatgtgatgaatctcgatgattccggataacgtttgccggaatcttcctgaagatgataatgtttcgtataacgttcatcgtctctctcttcttcttctcgtcggtccttattagaaaattcagtgcttctttgaatctctacatcgtacagatcagaatcttgccggattccgtcaatatcgtgtttctgttcgtcgactctgtgagaaaccatatcgattttatcggaacggcttgaaacatcgccgagtttaatcatgctcgactcgttcccgtcacggtcactcgtcggagaaggtgacgacaatcgttgaggcagagaatcgcgaatccgctctctcattaacataaccagagattgcaatcggaaaaagttgacagatcgctagagaacctgaacccttaaaaaaagctaaccgtcgaggaagaagaagaactagggacaaaaatataggctggtctggtcctgggcctgggcccaagagccgttttacaacattaggcttgtgcatgtaaaatagttcgtcctcttgaatttttttgtttagtgtttaatttgaataaagattttatcttataaactacgatagattttaacgaccatctcactaattaaaacttttagccatcacattataattaacattttaaaaatataacattttctatactaagatattcataaaaaggagaaaaacacaatatatgtgacaagaagagaaaataaacttttgaaaaaagcaacatatgaaaataaaaaaataaaaatttaggtattataatatactactaaactagattttaacccgcggtataccgcagggacaatttattttttaaagttagtatttataaaattttgcaaattctatctatctatttataaaatatttttgttttatagtttacaattgttattaagtaacgtcctgtcaaacccgtcccgccaactcgttccgtaaaaaaaacttatcgatcttatttatgatatatttatgaatcattgtctaaatattttgtaattttgtagtaattaaatgctatcaaatatctctgcggtttgatgattataatataattgttatagttatgtagaaaaacaatataaaaatgataattttgtagtagttaaatgatattaaatattttgaaagttttattttacagtataacctctataaattaatactcgataaattaataacctctataaactaataaaaaaatgcggtcctgagttgggaccagtgtaaaaaatgacacaaatcgataaattaataagataataattattttaaaatccctatgtaaatatattgtcccattaataacataaattaatagttgtaaaaacttcttaaaatatatatatatataagttatatgttagaaatattagtaatatatgaatctgctattatttttatttttattatactaattcttagtaatgttcaattttaataattttactacatcgaaaacacttttttgttattttatagacacgataatttagtcttatttgcaattacttctagaaaaataatgattataaataaaaacaaattattttaaacataatattttttaaaaattacaaaattagtctaaactctctataaattaataattattaatttattgataaattaatacctctataaattaatagaaatttatggtcccaacattattaatttatagaggttttactgtagtaaccaatcgtgtggttaatgtggagagattttgggaagattgtcaaatattctgtcattgtaaataagtctcaactacaggatttatttcacaaaatggctgcaaaaatgtatatatagagatttagaaatatagaaaattataaatcacaaaaaataatacatttctaatcaacttttaatatgttttcttaatatgtatgattttcctttaaaaaaagtgatacatgtattataaccaatagcaagtattgtattgccatttctagccaattgagataaggatgggatttgtcgaaacataatggttactttctctgcatatttgtacatgaaatgcttctataggcatgagacataactatcatgcatcttatcatcgtagcacacaatacttggaaattaatgagaaattcgctactcacccttcatcttttcttttcttttgttctccaggtcaagatgagatttttgagtagttatgcaagtttgtctcgctcttggtaaattttaggaatcggggtgttacaattggtgctttcccaagtccgataataatatagagggaatatcgagagacaagaaacgacttaaaataaaaaaaaataaaaaaaaagaagcaaagacaaaacaattatctttaaaaatatgtaaaaagatgcgagtctactaactacgaggaaataacgaaacaagaaactacatattaccaagaatgaatttattggatctctactctgtatagacctcaccagtcacttcggaggacgataataggcatacactgcaaagacggcttgtaatgtcgtgagaaggagaatcgtcaaaccagtgcaacatgaaagacatgtgcgaggagtatcgtaagtaagctgggtattcttgaataccgaccaatatgcatgccatcctcgtgaactatattcattaactccttcgaaaacatcagctaagtaactcgcgttgagataaaagtggctatctgtaccgatgaccttatagaattgagagatctcattcactgatccgatacagtttgttataattcctttgcggcaaagcaatctcgcatcgtcctcgttttcgagaagacatcccatgaaaaaaacgtagcttgttatgtgcttggtacaataagcataaaaatcttcaaaggcaacacaattaaagaagaacaagatgagaaattcatcaaagatcattggtggaatctcaagaagatttcttttgtgtcttatatccaatagcgtttttgcattgttcctcagttcgaactttatccccctaaaccgaagatttgttgctgaggggatcagttttagaaaagggcggccgcgacgaaggtagcgaggaagacccagttcttgtttttcttttttaggaataagaggcatggtaattattcgaatcagatcaagaagatgttttgcctctaattgatggtcttctaaacaatatggtatatctatggaaatagaaccctcgaagaaactaattgttatctcaactagccctcttgacgtcccaatcttcgatttgtcataaatagtttgaagaagaaagaaaggaacctgattctccaaaagtagtaggtcactcctttagccgttaaaatccatttcattccgaaaataggatccttcacacgctcagggtagctgacttttctagctaccaccaggaacaaaatcagaatgaaacaacaatcaagaaccatcatatcaatcaatttcttccgaccagatacatcaccattataaagactctcggaataggactctcttatatcttcttccaactctgacactgcttctatcaaatccttcatatccacacccttcttttgagcttcatccatgaagatcccgagaaatcgatgtttgtgctcttgaatcatttggagatgttcttttccatgatggtatggaccgattgagagaacccttggttcgtaagcgtccttgtagttgttgttccggagtctctgatggattctaaagatgcaacacttttctccaccggctgatttcttgagaagcttcgggaccgaccctcctgaaattaaatcatgagatttttctacaactatatctataccaccgttgtcttcatcattgtttgccctctttgcttcttcacgatggttcattatattattctcactctcttttgctggaaaaatcaaggaagacgactaaaaattgtatcaggacccggaaactcagctttaagaaggaaagaacaataaaaaaattattattggccagagagaagagcaactagtctaatacatttaattggagagctcaactacaatgaatattaacggttttaataagatcattgacctctaaaattaataagaaatgaccattgaataatcactaaactaatagtagtcattataaagtactaacaagtgagtaccctaaaaaacggatacttgtgggttacatctaaattaaaatagttacattccagtaaatactcacttgctaaaattaaaatatttaagcttaagaagttagatttaaatttaaaaatattgtaagaagttgtttaaacttcaaaagttatataatagattaagtgaagcgtaataattattaagtagaattgtaaagactttacatccatgcatgatcatcacttttatttaaaagaattgaggaacaaatatattaagaggaaattgttatttaatattctaattttagctattttaaatataaattttatattaaaaaactatttaaaacatcaactaaacgttgactgcagtgacatctgggttgacatggcgaatacatatatgacgttaaaatccaataaaagaaccactaacggtcgttatcaagcgttaactgctatattagtcaaatcaccaactttcagatttagactattttaaacatgaacttcgtttcatcaactaatcgttatctgccatattgaacattagattgtattgacccaagccaaaaacgataggacgttaaaatttgataacataaccactaacaaccgttatctgttgttaacgaacaacaaaactaagacaaaagaaaacactatccaaagaaccaagacacaaaccaaacaccaaaaacacaagacactagtaaccaaaaatgagaaatttgttgttaattactagtgtgcagatgaatggtgagatcgaggtaaacgttagacattagacaattattaaaaaaaattgagaaaaatgaatagatgaatacttaatttgaggggaagcatgatgaagctacataacatatgtatgcaaatggaacaaaatgaagatattatctcgatataagtgagtttgtcgtttttgaattctatagattcttttttaaaggaggaatgctcatatataagagtgtttatggtgtggaattcacctagatggatgtttagtgttaggcactaaatgaaaaatttgttcttggtggttagtggttaatctttgataacgatcattagtggttctgttatcagattttaacgttattgtctatattggtcaactcgatcaacgcagtctgatgtttaaaataatatatcataaatttatatttaaaataggcataatttaaatattggaggatgaaatgatatttttcccaaaatattttttaaggagccaatttgacattgaaaagaaattaaatttgcccaaaaaagaagaaagaaaattaaatatttaatatggggcagctgcccattcgttctcctagataagggtgaagatatcaaatggatccagtcaataagactgtacagaatttaattaactaattaaatgtcaagttgttgagagtagcatcatacattcatatattctatattcacgttagccaagccacaccaaattaacaaacaaactcacaactcaatggttatagacttagaaactagtttgagtgttaacgtagcaacctttcttcttcttcccatactatgagcaagagtgcagatatcaaaacggatccagccgaaatacaaacgaggtctgatctttaatgatccatatagtttttgatgtaataattaaacgtatagtataatatcattcatgatactatttgcaaaaaaaaattcttttatgaatttagtgttaaattatattcaaaagaaaaaatcactatttgttatattaatatgcatactttccatagaaaccaaacatacaaaattctatccttgatttcttcttgtttcaaaaccatggtacaaatgccacctttgtaattcaagaggcctccactcgtaagcgtgctgaaccagttttgtaaacggcctgagcctaagagcgggtttacaacattaggcttgtgcatataaatagtttcttttttttttcttttctttttttgtcaacacacatgtaaatagttcgtgctttagaaatttgtttattgtttttaatttgaaaaaagatttgatcttctaaactatgatagttttttattcgtaaatcgtaactacaaatcataaatcgtaaaaaggtacagtaaaacctctataaattaataatgttgggactgtgatattttattaatttagaaagatattaatttattgataaattaatatttattaatttatagagagattttcctaatttggtaacttttaaaaaatttctataagatttctttcattagaaaatatatttctagaatcagttacaagtaaaacataataataatgtctagaaaacaacaccaaaagttttgatacgataaaatatgaaacctatagtcaaacaaagaacaaatatgaatttaagcaaaagtatattataaatatattttaaagaaattttttacttataatatatatatatatatatatatatatatatatttgatacatttatacaattattaatttatgatattgatgggaccatatatttacatagaactttcaaaaaaattattatcttattaatttatcgatttgtgtcactttttatattggtcccaattcgggaccgaaaaaatttattaatttatagaggttattaatttatagagtattaatttatagaggttatactgtagtttttttaaaccacacaatttaaagttttccaaaattttaaattttacaattgaataaaacaaaattaaatatcatttaactcattcctttgcaaaatagtagatgaagggttgaacaatttttctttataatttgggaaaaattacatcatttgccatatttttcaaaatccttatgcaatctgctatatttttcagggtcttacaactcatgccacatttggttggaaaatgtccattttgtcctcatcatttcttctctattttatctctctttcctcgatatccgtgcattttgaccatacaccattatctttccgaagacaaaacgaaacgttttagtctctctatcactttccctgacaacctgcacagattctctacatgtaactttcaattaaatttgtctcccaattttattcatcataaattctctgttgtatctagatcttgtccccgattttatcatctttcaaaattatcatataagatggcaaaaatagatggcaaaaaatagatggtttcagtttcagcatctctgtgaagacaataacgctcaactaatctgtggaccaaaatagatggcgaaaatctaaataaaattctaaattctaaaatgagaacaattgcatataagatgtaggattcataataatagagaaacatgatgaaatcgaggacaaaacgtagatgcaacagagaatttctattcggagacaagatctggagactaaaacaaaagtcttcctccaattgttctcctctaacaggtaatcatgtcccctaatgcattatatattacgttgtcccccaatattaggtaatcatgtctcctaatatattatatattacgttgtcctccgcagaattttggataaccaatttgcttaaataagtcatttttaaatactcaataacaaccgtagaagccacctgttctccaatattctgttccctaatcctttatgcttccatcatgatttttcgtcatgtatcatcacatcagccaaaagttgttatgtcaccatcttcgtcagagcgctgacccaccttaaaggtaattttgtccacgaaattccacgtataattaaatgtggtagattttgtaaggcaactgaaaatatgacatggattataatttttgagtggaatatggcaaattttgcaagattccctataatttattcatttttttcagtttttttggttaaatagttaaaaattgagatgaatagtcatttaacattttcaaccttttattttacagtcacatccaacatctaccgccaaaaatctattgccaaaactataaagcgacaactggaaccaattagcgcagcattttttctttttctttcttttctgaatttatttttaattttcaagtaaaaagaaccacatgtgaatcgaaaagtatccaatataaaaaaaaatcttgacacccggttaaccctagatagatccacaggctaattaatgactaggatactaatttagtaaataaataaatttaccacttgttacttttttaaattgatcttatacagttgaggacgcacctcatgaatgacatgaaacaaagacttgagattataaaaatgtaacctccacgtcaatgtgtgatgtgaaccttacccccaaaaaaaaaaatatatgtgtgctgtgaagcgtagtcgttattaaataagagtatgaagtctttaattaatgaactaaaatgtgaagtgtcggagcacatcatacatgatacatccataagccatgacttctaacgttctatatatatacaacaaacaactcacgttagctaagaaataccaaattaacgaacaaattcacaactcaatggatctatacttaataaccactttgagtgcgagcgtagcaacctttctttttcttcccatactatggataagagtgcagaaatcgaaacggatccacccggaatataaacaaggtttgatctttaatgatatatgtagttctcaacatactaattaaacgtataatataccattcaaactactattcaattactttataaatatctcttctgattttctgagaatttttgttggttttgaatttctctcaagaaagtttctctattctacgtagtagctatggaaacttgcttcggttttgttttttttaactttttaaaaaatttccagttttcaatctcgtaaatgaaatttacatatatattcaagtgaaagaaaactttaaggaccatttttagctaagaggttttcaaattaactttataatttaaagcactttgatacgtacgtttctattctactagaatctgatcctttcagtcgagcggatcatccaatagaaattatttttaaaaaaaagaacaaaaacaattaacatacaagaacataaaaaatagttaaataacctcttttatgaaaaatgcgagtttatgaaaaaaaaaaaaaaaagataaagaagaaagtaaacaaaaagtatataaacaaagaagaagaaaataatactacgtgcatgcttcaccgtaatcgaaagagatgaaaggaaatggtcaaatgtctacaataaagacgacaactaccacagttttgatgcttattatttggtatttcagccacaaaatttgttgtgttgattatttttattaacaggaatcacgatgggattaattcttcttttcgcacttgtggtattatgcacaagagcatatacggagtatgcatactataccgatatatttcaactaggtttgtgaatgtctcaaatattccaaaatattcataatctcatttgatcgcgatcagttcacacacactttttgtgatgaaaatagctacacttctcgtttgtgccctactcttcatgttggtaacaagaaagtgttgcggagaacgaacgaacaaactaggtatacatgccaaagcttctctgtatcgattagttttcattttttttatcattatgtgtagtcatatatgctattcacatttaataagaaaacgtatagtatattagtatatattattaacacgtacgtataacacaactttgcaatactatatgcttttttttaataagaaaaaatatttgcaggaataatgatatcggtagcagttatcatgctcatgttggtggtaatagcgtggtggggagaacgaatgtacgaaataggtatatatgccaaagctctttatctcttttctttgttcattttctatcattatgattagtaataaatgatattcacattttaacaagaaagagtatagtaaattacaaacacgtataatatagtactttgcaatactatgtttcaaaaaaaaaatgtatttgcaggaataatcataccgatagcaattaccatgttcccgttagtgtcagcttttgcgggagggttaaccccaaaatactcacaaggtactaattaaatagacaaaatacttatacatattacatattactattgtgtatggcactaatgttcatttgagttgtgataattctgaacgttttcttattgcaactaattatataattttttgtactttgttcttcctgattttccgtaaatgatcaatagagacgatatcgccctctgctgtcacgtgcaaacctcccgagaacgcggccatgtacgagccctctgctgtcacgtgcagacctcccgagtgcatggcggccatgcccgagccctcgaaaatgctggtgaatcaattgatttacggcaaaatatttaacattataaagataaaatccaaagtgtagtttcttgtgtgttcgttgccttatgtatgtgtcttctatgtggagactccataatggagtgtagagcggaattgatctacgactaagatgtctacttccatatcgtttttacggatgaattattcgtaaacaatctcatttatatgttttatctatttaatactttcgaatattagaagtttagaactctttatgcagcacaataaaacatatctacaggtgcgatggcgaccttttgtgcgattttttgtgcgattgtaacttctctttggattggattttccgtctctttgaagacggttgttggcagtttcgccggcgtcgtggggcagtttctcctctttggtcgtcaggcggttatctccacgtcgtggctgatcccattacgtgcaaatgggacagtttatgagtttgacggtgactatatattcgaggagatgcctcacccttcaacacttgcaatccaatttctccttctcatcactacctttcctcttcgattctataaaaatctggcaaaaatgggtgataacttaagacgagcggttcaagacattgacttgggggctgacgatgttccaatcgcaattccggcggatgtggtggccgttgctgcagcagagaaccgtttcatactcatgggtcggccggtgataccaagacggcagaatgtacgctctattatagcgtctatgcctcgggtgtggggccaatcgagccttgtccatggcagaattgtgggtggtaaccagtttcagttcatctttccctctgaggaatccttggcgacggtcatgcgcagaggtccttgagccttcaatgatagaatgttggtcctccaaagatggactcctcttgagaacccaccgttaatcgacttcattcctttttggatccaagttcgtgggatcccgtttcacttcctcaatcgcgacgtgctcacacacattggccggtctattggtaatcttctggatgtcgactatgatgcagaggcggccgctagggtggaattcgtttgcatccagattcactgggacattcaacaaccgctacggtttcagagatattttcaattccaggtgggggttaacactttgcttcgcttccgttacgagcgcctccgaggtttctgtgagatctgtggcatgctgacccatgactccggagcctgcataattccaaacggcggtgctgaccacatcccagagggaaacgatgacgacgatgctgcaatccctccacctgaccgtgctcctattgcagacatcaacgctatcccgagggatatcgatgggaatgctgaggacgaagcgagggctgacatggatgatggagaggccgaagctgatgcccttgatgacattgaccctaatcatgatgcgttgggctctcataaagagatggaagggagagccggggtttacaattggtggaatgctgagggggaaacaagcagtgtcactcatcccacttatgcagatcttatcaaccgtatgggccctctcccaactcctaaccttgacgacactgctggggttcgctcctcggaccgtggcaagagaaagagagaagactcacctgacgagactgtgaagattgaaaacgtgacgatggtcatccgggagattggtgaaagcagtggctgctcgggtgaagcttctcaccctggacttgagcgaggcgcggtgggcctagaaccacctcttccgccatgaggacaaccgcttggaactgtagaggactaggcaatgacctcgcagttcgacgtcttaaggagatcaaacgaaagttttctccagacatcatttgcctcatggaaacaaagcaaaacgacgaccatgttcgtgatgtttgtgctgttttgggatatgacagagttataactgtcccccctgtaggattaagtggaggaatagccttaatgtgaaatagtagtatttcagtttctgttctttttcaatccccaaaccttgtagatacccatgttcaatctaatggatttgctttctatttgacttgtgtctatggcaatccaaatccttcattaagacacttggtttgggaaagattagaaagaacagcaactactcgaaccggaccatggacggctattggtgacttcaatgagataaagaataacaatgagaagcgtggtggtcctcgaagaccagaatcatcgttcatggattttcgccgaatgctacagatatgtgactttgaagacctgaagcactttggtgatccatttagttggattgggaaacgttatacccatgatgtggcttgttgcctagacagaacattggtgaataatgaatggctcgctgaacatccggcttcccactctgagtttttggaatttatagaatctgatcaccgaccagtgataacaactatctccaatgacttcactccaagacaaggacaattttactttgatagcagaatgattggtcaggatgggttcaatgatgcagtgaagatgggctggaagttgagaatgaggggtcatcatgaaggcattggatctcgcctaaagaattgtcgtacggaaatttctaagtggaaacgaagatatcgccggtctggctgtgatgaaattgtcttgcttaaacatcgtctggataaggctcactctgttggttcatctactcaacaattaagagatctgcgtcttcagctaactcgggcttatgaaaatgaggaagaattttggcgaatcaaaagtcgaaaaacttggctatcgagtggcgaacgcaatactcagtatttctttgcctctgctaaaactcgcgcagctaaaaacagactgatctcccttatcgatgatcacggcacagagcatcggggtgatacgcatataggagtggtggcggaacagtttttcacgaagctttttgaaagtgacttaaacccacagaataatcactatcatgtcctacacgagttccagactagagtaactccggagatgaacgccaatttgataaaacctgtgtcagaagaggaaataaaacaagctgtgttctccattggatccacgaaggcgccggggcctgacggattcactggtgcgttttttcaacaatattgggaggacataaaaacagagttaatagaggaggtacaaaacttttttgaacacggttcctttgacaagtctttaaaccacacaaacatttgtctgatcccgaagacgtctgaggctaagcatttaagcgaatatcgtccaattgcgctgtgcaatgttagctataaagtcatttcaagggttttggtagagcgacttcagcggcatctctcaagcataatctctgaagagcaagcggcgttcatcccggggagggtaattacagacaatgtcctcatagctcatgaagtaatccacgctctaaaagttaaaaagcgatgtgcaaactcgtttctggcaatcaaaacggatatcacaaaagcgtacgaccgtctcgagtgggattttttgcaagcgactatgttcaggtttgggtttgatgttaaatggatcaaatggatcatgacatgtgttcgtacaactacttattcggtgaacatcaacggcgctcctcatggtttcattgaacccaagcggggcatcagacaaggcgaccccctttcgccttacttgtttattctttgtgcagaagttctcagccatatgatgaaaagagcagagaggaatggagctatcaaaggcattaagatcagtaatggtgggcctgcgattagtcatcttctctttgcagatgactctttatttttctgccaagctaacaagaagtccgtccaagaaattaaaagcatcttataccaatatgagcaagcttcgggtcaaaaagtaaatactcgcaaatcagccatcacttttggtaaacgcgtttcagaggctaccaaaacgcagattcggcgatgtctacaaatattaaatgatggagggtgcagtaaatatcttggaatgcctgagcaatttgggcggaaaaaagttgaactttttcaatacattgtcgagaaggtcagggaaagaactaacgggtggagcaataaattcctttctcagggcgggaaagaagtccttttaaaatcaatagccatcgcaatgccggtgtactgtatgaattgcttcaagctcccgaggagtatatgtgatgagatagaaaggcttatggctaactactggtggcaaacaaaccggaatgattcaccgactcattgggttgcttgggatcgactgaaacatctgaaaaaggaaggaggattaggcttccgtgatattgaaaaattcaatgagtctatgcttgcaaaacaagcatggcgaattcttcagaatccatcttgcttgctagcacgggttttgaaaggcaggtacttctcctcttcaaacattttgacggctacaagaggttcaagaccatctttcggttggcaatccattctattagggagagatctcctaaaaaggggtcttcgcttcaccataggaaacgatactacaatccaaccatgggtagacccctggctcccaattcacccacctcgaccaccgcgattaactagtccaacgtctatcactcgcgtcaatgagctcttcctccaccatcaagcagcctggaatgaaacactaatcagagcagttgtccaccccgacgatgtgtcccatatcctacgtattaagatcagctctcaccaggacaaagactaccttggctggcattattcagatacggggatatattccgtgagatcaggttattggctagcgatgcatctaccggatcaagaagtcttgccactcccaccgcatggagacccgcagttaaaacaaagtatctggaaaacaaaaactgcaccaaaaataaagcactttctatggaaacttctatcaagaggtcttcccacgggtgaggagctcgaacggcgtcatatgattactaatgggccctgccgacgctgtgttacagaattagaaaccacccatcaccttttcttcacctgtccgcatgcaaccatgatgtggcgagcgtctcatgtacctattcgcagcatttttgatcctgtggtttccttggaagctaaaatcagggcaattctcgactttaacaatcaaaaagatacttctaatcatcttacacatttacctttatggatcttatggaagctttggcgaagcaggaacatcctcaccttccaacagcgttcaagtaattggcaaaaagacttacgagaggcgaaacaggatgcaacagaatggtcatctctcctgctgccctcatctcacaatcgacatacgacacatacgggtcatcagacgcgggttgtcacatcgaagacctggaagagaccgcgggccggattggtaaaatgcaactacgatggcggctttctcaacagcgaacagagcgttacaacggggtgggttctccgggatgatgacggtgactacaagggctcagctcaatctactggtttcatggtcacgtcggcggtggaggcggaatgtcaaagtctcattactgcgatgcagcatctatggacaaaaggttacagacgtatcatctttgaaggagacagcaaaattcttgtatcagttcttcagtccaattctatgcgctttgacttattcaactggcttaaggagataaagcactggcaagcacgctttgaagaagtcgaatacgcatgggttccaagaacagcaaacgcacctgcagacaagcttgcacggcatcagcgactttcacaaacactctttacttttcataatttaattccatcatgtctttcacgtgctctgtactcagattctattaatcaatgaagcagtttagtgttaaaaaaaataaaataaaacatatctacatgaaactgaatacccggttttctttcattcaataacgtattttgctttatcagcgatgtcaaatgtttacactttaatcacagtcagaaaaaaacaaaatcaagaaaacaatttcgtatataaaaataagtaattgttgtaatagctaggtcctacgcagtaactggtgactgagagcattctcaattgagaacttttagataattttcttaaatacaaaaactattattattttaatacaatttaattatataattatattaaaattttaatggaaaaattgtaccaatatataagataagtgtatatctttttacttatataaactctcaaatatcagagcttttacataagagtttttcttagtctctttcttctttttcaatttttttaaatcgttttttacagacaagaatcatgtaagagccctccattgaaaatgttctctgagcttatttcaaataaaaaaaagacctgtaagaaactgtatgtaagactttcacatgcatgtatgtcaaagaagatgtgtgtggttctagtttactgtgaaacgtagtaataattaaaagaaaactgtatgtaagactttattaatttataaatgaaaggtcaagtagttgagattaacatcattccactacttcgacaggtctacaactatatatataatatacaatatatctaatattcacgttagctacagatcagtgagagctttacctcaataaactctgatttgtataaacaaaagaccagtacaaaaagcttcgtcacatgcatgctcgtcaataacatgtgtgtgggttctagtttaattaataagactttgttaattcattaatgaaatgtcaaatcgttgagatcaacaccagaacatctctattggggtttaaatatccccattataatcacaacaaataaagaaaaagtagaaatagatccataataatccattacttctgcagttctatatattactataaataaacaacaattcacgttagcttagacacaccaaattgacgaactaactaacaactctgctgcattgaatgttaatagcaatggcgaaatcgtggctacgtatctgctgcatggacatcagctatatttgaatcacataaataggattttaacaaatatcttttggtttggattagaagattactctctcatgccatcatgcatgcctaacagtgggaaactctctcaatgctaaattatcggatactcaattattatccacaagtagtagtattgtgataccttttaggtcaactttaaaattacgaatactattattttgaggacaatacaaataagtaaacaattgaggaggagtaacgtattagtgcatccacgtaaattgtaatattgtatatcacttcacataatctaatttttttttttgttgttgatggctgtagaaaaagatttattacattttggaaagaaacattattgtgcttttcgaagttcgatataatattatagagtgaattgaatatcaaatattagccgaatcaaagagaccaaagacgaaataattatttctgaaatatgaagatgctactagtaaaacaaaaaaacatgacaaaactctagcaggaaatagtcttgttcccgacctcatcaatcacttaggcggatgaaaatagccatacgctgcaaaaaaggcttgaattatcgtgagaatgacaagcgtcaaagcagcgcaagatgaaagagctgtccaaggactatcaaaatgggtatgcttgaatcccgcccattgtacatgccatccacttgaagtatacttattaactccttcgaaaataccagctaagtaactttcatcaatgtcaaataagacatctttaccaacaaccttaaagaatcgggagacttcatcccctgacccgaaatagttctctagaatccctacttcgcttagaaacatcgcatcagcctcgcttttgagaagacatcccatgaaagctacatagctcgtcatgtgctgcttggtacaataagaataatactgttcaaatgcaacacagttaagtaagacagcaatgagaaagtcatccaagatcaatggtggtatctggaggagtttccccttatgccttatgtccattagtgtttctgcttttttcctcgctttgaactttatccccttcaactgaagttttcttgctgaaagaaccattttcagatgatggcgaccagtagtactatcttcttcttcgagcgaatctgattttggtattccttcttccagcatggaaatatccacttcctgttttcctttcttgagcatgacatccaattcttgttttgattctctaggcatacatatcttccggatcatcatacaatcaagaagatgatttgactttttttcttctttaggaacatcaggcatgtaaatatttcgaatcaaatcaagaagatgatttgcctcaactttttggtgttttaaccaaaacgtatttgatttttgtaaggaatagttgaagaaatgaaatataatctcatttagcccactcgatttttctatcttcgatctatcaaatatagtttgaagaagaaagaacggaacctgattctccaaaagtattaggtcattccttatagccggtagaatccatgggattgcaaaaataggatcattctcaatctcagagtggctgactactccagctaccaccagaaatatcatcaggatgaagcaaccatcaagaaccatcatttcaatcaatttcttcccatcactatagaggctctccgagtacgagtctcttatatcttcctccaagactgaaactgctttgatcagaccattcgtatccacaccctttcttttggcttcatccatgaaaatcttgaggaatctaagtttgtgctcttcaatcatctgtagattcttttttccgtgatggtatgggccgagtgatacaactctaggttcataagcggccttgtacttcttgttttcgggtttatgagagattttaaagatgcaacacttttttccaccggctgattccctcagaagctttgggagggccgattctcttgaaaataaatcatgtggttcttctacaactataccaccattgtcttcatcattgtttcctctctttgcttcttcacgagggttcattatattattctctaaatcttttgttgaggaagacgactaaatttggtttgagcaaatttggaattccggcgtgtaccgtagcatgaaaagaataaggcaatctaaaatataaaactaaatattaatattacagtaaaaacctctataaatttaatattgacatcaatgtattatagtgtacatgaaataagatctcatcaactaagatgaatattaacggtttagataagacattgacctttaaaattagtaacgaaagaccactgactaatgatgaaactaattaatagtcattataaaataataagtgcttctcgtttccctgatcgaagttccgcattgaatagtttaatagcacaaattggtatttctttatattttcttgacaatatcaaccgttagatattaacgttaacttcagagaaatcttgtcttcttattctaacgttaacttttattttaccaaatatctttttacagtattctcaatcaagatcaactgataaaaataaattactcacttttgacttaaatgcagaaaatatattaaggttttgaatggtgacagtgatttagatagtgtgggacaaatagttataacaacaatgtgatgcgataaaaaaaacgtatgcagaacaaatactgttaatatagaagaagcagtgtaaaacatttagtgtaggtttttattgtaaacacttaaactttataaaatgtggttcttactttgtgataaaagtctgactagttgtaaaaattgtgactgtttgaattcctctaattcatttgtctgcaattctaataatttattataactgtgaagaaaaaaagagaaccattaatacatcatgcatccaatttcctagatagataaatttattttactagttgatataaaatatgcatttgctggtaattagactatttttgtagtaatttttttttaaaaaacttgtctatatatatatatatcagatttttggcgcttatataagagattaaacaacaattttaattaagatgaatactaacggtttaaataagactattgacgttttcttaaaaaataaaataaaacaaaaaccattgacgttggaatatagattgttagaattcaattttacatatgtggctccggccaactttccggcgacttttccggtgatgtatgtcaccggaatcacccgattatggagtctttgaatttcttgtaatgagttttgaccagaagaataaagaccactgcataatatactactccataaaattaccctcagatccagctagtaaaaattatttttcgttatcaaggatgtgacaaagcttgcttaatcaagacccattttacatgacatataaacatgtttcagtggacggacctgaatcttgaggttgcgattgtaaaactaatatttagggttggtgtttttagagttgcaatccttagaacaacaaaatataagaaataagctgcgataatatttagaaacataaattgattggagaaaatgttgtacttaaaagttaaaacgttaaaaaaaactacagcttgtaaagtctaaataaactaatcatccccttaatcttgttatagttatggatttgtttaaacgaatttgtccactttgattataacactaagcttgggctaaaaaaccggattcgatacccaaactaataatcagacaaaaaaaactggattagagcgggttaagattttaggaattttattgggtagaattttaataaactcatgggtatctggtcgatccggagtttacccgttattcaaataggctacatgaaaaccaatcatataatttaatatcccaaatattaattatatttaatcttagtataataaaaattatctaaaattataatcataaatctacatatgtcaattaattttagacctaaatatccaaaacaactaaattattccaaaattatttgttatatttatcaaaatttaataaaatatattcaaatgtaactaaatttatttaaaattaacaaattttgtaagagtttatttgggaacccgatatttacatacaaaatacccgtttttattttttgagtatttatagggtttgaaactttttatccaaactgacttgagcccgattgaacccgatccgaaccggaaccgtatatttagatctactctagtggtaggatattagatacccattaaatccgaactcgaactgttttatttgattctgcaaaaaaaattattactggttgaattaactttaaataataaatagttttaatataatatataatttatgtcgtttattaatctgtgtgtaaatatcataaacatcatctatattaagtactatatatctaaacacgaaaatcagattatttttttgtttgctaaacttattagcagagtgaactagcattaccagaacttataccagatattatagagaataaatagcatctcatccaaaccacatgtaacaagaaaaaatatcgctggcttctcaactaatatagagaaaactaagacgttcaataggttaaccttagatccgattaccaataaattaataaaattaccactcgtcaattttaaattgatcttgtttcttgtaccattgacattgagaacgtacttcattaaacttatgttttatataaacaaagaccagagattaaataaatgaacaaaaactgtcacatgcacgtcaataacatgtatagttctactctaatgtgtatcgtatacgtagtgggtagtaattaaaccagattgtaagacttaattaattaatgaatgaagaagtgtcaagtcgttgagatcaacatcatacatccataatccattacttctacagttgtattacttatatatataaacaaaaattcacgttagcctaaacacaccaaattaacgaactacctcacacaactcaatggatttagacatagaaaccagtttgagtgtgagcgtagcaacatttctttttcttcctatactatggataaaagtacagagatcgaaatggatccagccgaaatataaaagaggtatgctcttttacagtaccatttaaaataatatacagtttctttataactgttgattttcttaaaattcttgctggttttgaatttgttctcaagaattttttttctattctaagttgtggcgatgtaatatttatgcactcttcatttgcgtcttttccagttatgtctacattgttttttgttttgttttttcccccaatgttaattaagctgataaaaacaaaagactagtaatttttctttttgggcctcacagaaaactttgatgtttgttccattttttgacaggagtcacgatgggattaattctccttttcgctcttgtggtattatgcacaagagcatatacggagtatgaatactacaccgatatatttcaactaggtttgtctccaacattccaaaaatattcataaccttatttgatcggactcacaaacattctttgtgctgaaaatagctacacttctcgtttgcatcatactcgtcttgctggtaacgagagcgtgctggagagaacgaatgtacaaactaggtatatccacgccaaagttctttatctcattctctttcatttagtcatatatgatatttacatttaaatacatagtacattagtatcgcaatttgttttttttataagagaacgtatttaatttgcaggaataatgatactcgtagcggttatcattgtagcattagtggcattttttgcgagagaggtatctccaaaatactcacgaggtatataaatagacactaatacttttgcatattatttattcttgttttgccgacgatgcatgacacatatatactatgttcattgagttgtgtaattctgaaaaaataatatcgcaacttatagattttattgtgtttttctttctgatttgcgtaaatgagtagagacgatacctcctctccctcccatgcccatgtccatcatgcccactccaagcgcgcccatgtcctcggaaacgctggtgaacaaattgatttatggcaaaaaaattaaaataaaacagataacatccaaagtgtgctttcttgtatttgctgtcttatgtgtctgttatggagtttagaaagggacattgtttacgactgagatgtatacgtccatcgtttttacgtatgaactattcgtaaacaatattttctttgttttgatctattcatgtaagactttgccaatattagaactctttatggaacacaatgttacatatctacacgaaactgaatacccagtttttttaagaaatacaattcagacagacacagtgaataaaactaagtaaatgatgtaatagctaggcgatgactggtcattgagagcttaccgcactaaactattgtttatataaacaaagaccagtaaaaaaacattcatgtgcatgcacgtcaataacatgtgtctacttctaatttactgtgaagcgtattgatgattaaatgaatgtaggaaaatatcaatcgatatgcatagaagatgtgaaaattagatttttactattaataattcaatattagatatgtatgaaagaaaaaaaaattaaagtcataactgtcattcttactttgttaatttaccaaatatgtcatgtatcaactattttatagtttcactatatatcaaatatcttaccatatttatgtaaatattatttagatatttaatatgttagcacgatatattcagtataacatgttattataattttaaattgatgatttcatattaatttgtatgatatggtaaatggtttaatatgatatatataaatttatcgtgatactatactagttaacatgttaatcaaatagttatctgtatttagcgcgatattatatacttgttaacattttaatcaaatagttatctacataaatcataaatgttttatgcaatccaatgataaatagtgttgtaaattttggatgaatagtgtcgtcaggtgtaagatgaacaatatcatgcttacagtatccggtaataaataatgttgtgagacaatggcatattaggtaaattaaatagaatataaaagatatttatgcctttaattttattctctttcatacttacttaatattaaactatttataataaataactaatttttaagttttccatacatatacattaatataacccttaaatgtaaagtctcgcgttgagattaaacatatcatacatccatcacccattacttctagagaaatatcaatggatatgcatagaagattcaaaaattaagaatctatgcatgatttttttttatttagttctctttcatctgactcaatttaataacaaaatatcctttgttacatatccacgcgcgataacaacaaaattatcagataaaagtttaggaataatatgctcattaatttatctttttaggtttaattttggtgtcattcttttttctcatcactagattacatgatcttttatctcttatttgttttctggtaacaaaacatcatatttgatgtaaatctgattttcaaagctttgaaatcgacatatttacttaacaaaaattttatgctaacaaaacaaaactgtgagatattttgctaaatgaaacattagtacgttacaattatttttaccgtacttttatgtcataatgaatgaaagaaaaagaaatattgaaaagtttatatgatatattgtataacttagcatattaaaaataaatctaacacattactaattgtatacctctttaacattttttttatcgcgatatcatatgttttaacatgatatatttctttacttacatgtatatatattattatcacgttaacttaatagataatcatcaatttataatatgttattcctcaagtatttgatgataagaatatcgataactattttattacattgctaaataatttgatatatgtgatgagggcattttcgtccaacttacataaatatagagagagaactaataatacaaaaaacaatgatatattcttaatttttgatttatctgggcatatagattaatatagcccttacttctataaacaacaattcacattagcctttgacgcaccaaattaatggactaacactcggtagtcacaactcgatgatattagacatagaaactactttgagtgttaataagagaggcaatatagccacgaaaatgttgaagaagttgagaagaacctaattatctcttaaagatccctaccattggacatgataattttaaaagcttcaatgaagatcattaactttagaattttcaaaatttaaaattagaaaattggtaagagcccctcatgacctcttaccattgcggattgtgatacgttcatgagaagttggcacgtgtgagaactaaagtgagagattggagtcacgtgtgaagaagcttataaatagtaagagagagtagagagaaaaggatcctgcgtgatcattgatgtgtaaagaggattagagctttatgtgctctgttcttgggagataagattgaagaactgtaactccaagcttatcgatttagggtttgtttcattgtaattgggattttaaggataagaaagagagattcatagtttcattcttatcaaatggtgcgttagtgtgctcggatcgaatcgaacgcaagaagattagggtttcaaaagttggggatttttgtcaatcgcaatgtgtcttgagggatttcccaccttcaatggtgtgactcatgaattgcgatcatggatttcatggttggaggatttctttgtttgggagaattttacggacgacgagaagatgaatcttgcacagagtcttatcgaaggagaagctgaggcgtggttttataggagacagaagatgattctttttcgatcttgggaacatttgagggattgtttggtgctgagattcggcgacagaaaagatctggaactaatcagattgcttgccaagcaagatcaatttttaaaggaaaggagagacgaatcgaagatccggaggatgaagaatacatcggtcgatccacaagaagcaactccttcaatggccacgattcaagaaacgattccagtggagaaattacataattctctggagatcactgacaaatctttgaatcaagttgatgaaatctcagttgagaaaggatcgaagaatgatgcgacattgctaagtccacagctacttgtttctgattctgaaaatttgaggaacaacgaacttatggcaataaattcagtggtggaaaacttagaaactgtagtgattaagacaaagattcagaagagcagtaaaatggatgtggttaacggtgatgttgggagaattcaacaagtgagtataatgaaaagttgttctgcacacaagatgttcgataaaatgtctccacttaaagaacgactggaaacgaagaagaaaatgaaaggattaaaatcttggatgttcaaatacaaggctgagaagagaagaattaggaaactacacaatcagggctggttacgcacttggatcaaaagcttgaaatacaagtttgagaaaagaataattgagaaacgaaacgatcatagctggttatacaattggagtagaagagtgacttgtaggaaaatcaagagtgcaaaactacaggttacttcagaactaaaggaatctaattcattgtgggacaatcgagaagttttggttttgtgcgcgcaaaaggaaatgcagactgcttgttagctttggagaatctactgcaagagtgtttaccatacaccaaatttttcaagctccacttgagagggcaattcttcctacgaagggacataaacaggttctagaacaattaggtgacacacttggagaggttgataaggtagcgttgcaatctgatattggcgctaatgtctctaaatcaaaaaaatattgtgagtcaatcacatggattaaagaccatagagtggaagacattaatgagcaagctgttgcttatggagaagctttcatgatatctctaactgagacggatgtattgcagtcttcttgggaacaccaaatgaattctcacatacctacaagactactaagtagaaggaaacagaggaagtgctttaagtcttggagatttaagttcaaacaggtgaaagaaggaaataagcaacaacacaatctcttccgacaaatgggtactataacgatcttgtggtggtggcttcaaaatggaagcaaggtgcagtggcatatcttgattgtcaagagggtgagtgagatttttggggagttaaaaagggttcaggccagcaatggaatcatctatgttctgtcctatggcaatcatcattataagttgtcatggcatttcaagccatctattggcagtttctgtattcttttaagactgaattatatgaagaggctgtcacaggaactgaacacttccaacatcattagcaagacaagtttttaacgacttggttgctcaagtttgataagccatgcgttcaaggggaactgattgcttatgaaggggagattgtcggattttacacaacaattggggacagagacatctatttttctgtgtggcattgttggagaaagaagaaactgcatatcattaacctacaacaattggccacagttttgcacatctatgagaaaccaaaactaggagacttcagtcaatcttatctactagttgctgcaacactttggagtacaaagatgcaacgtgggattgaaagttaccatgtttggcaccgctggaaagctcggtatttgcagatatttgagtataagtttgatgcaggatcaaatccgaattgtgagttggcaacattagtgcaaaacagaggcttgaagttgtcgcatgtccatgaacttcagagaaggggtcaccacattcttcaagaattgtcagaagcttgcagttcgtcaatgcggtacactcaatatcttagagacaatgtcagcttgggatgaattagtagagtaaccagaggttgatacataagggaagccgtcatggtggtactagaacctgtcacagagattcttcattcattttcaagctt

SEQ ID NO: 78 - DNA, 88010 bp, Arabidopsis thaliana
aagcttgttaaaaagtatagaaatacagcaaaaacaccaccgcaactaaaaaattcatgtgaaaatgtttgttaactagattttaacccgcggtacaccgcgagaataatttattttttaaagttagtatacataaaagtttataaattatatttatctataaaatatttttattttatagtttataattgttattaagtaacttcctgccaaacccggtccgccaacccgtcccgtaaaaaaaatatttattttattaatgttgattttatttatgatatgtttatgaattattatctaaatattttttaattttgtagtaattaaatgctatcaaatatctctgcggtttgataattataatcgaattattataataatggagaaaagcaatatcaaaaatgataattttgtagtaattaaatgatattaaatattttaaaagttttattttagtaactaatcgtgtgttaatgtggagagatttagggaagattgtcaaatctcaaatattaaattcgaagatttttttctaattatcaaaaacaaacattaaaatctagtgacagccattgtaaataagtctcaactacatgatttatttcacaaaatggcttcaaaaatgtatatgtagataattagttctcaggttataacctactaaatggattaaaatcggattagtcgttgaagcatctatctaatgggccatacgtatcggcccatataaaccaacaaccactaagaaaggatcgtcctcgggtgatgaagaggaagcaaccagagtactcctagccaccatcataaataaaacatttttgatttctcaagactttacttaaaagagggcaaaaatgcttattttcaagcctcgttttgttttatatactaaaaagagagcaaaaatattccaacgatctctttgttactcacatagtttgcttttagggtttacgctattcagcaaccacctagtattaccaagaataatatatggtaaagacgagacattagcaaatacatatttagaatagaaggtacgaacgagtgaacgaaaacaaagaccattattcataatcattattacatcaaaaggaatagaacaacagcataagaggtagtcttattattacaatgcacaaactcagaatttcaaaccagagttttgaagtttctcttgaatgatcatgtcgattttgttctccatttcaggagtcaaatagttcttccaatcaccaacttctcctttacggaaaaacattttgttttctctaccagaattcaattttccggtcttattgatctccaaactgctcagattacgtagagaacaaagatcgataatctcatccaccgatccgctctcttcttcttccttagtaaaaggacaacctaagaactcggcaaatttcttgatctggtcacgaggttctgctttcatctcttcaaacttcataaaaagcacatggtttggatcttccaagcttcctctccaatagcttaagacatgatcccaaaaaggcccgaaaatgctgactcccctacaaaacatctcaaacgtatcctcgaaactgcttattattttttcatcggtttgtttcttagtaaagaaatgccaatatgaaaccaatgtgtcttttacgtttctagatatatacacaattttacaagtagaacctttgagaccttcttgcaacgtatgtgacggcacgtgtgtcgaaaacagcctcggagatgatgagaacttggtaaggtcaggattttcgctacgtagatagagatctatctcaaagtagggtacaagaacgtgtggattattagaaagaagaggatgatcatcatcatgagaaggctgttttgatctatgaaggagtgcgaatgtaagcgccttgagccaagtggtgccgcatttagggaacgaagcaacgatgatatcggtgtcttgaggcttgaagcttttctggaaattgaggacagcttgaagaacattgtgagtataccaacatccttgatacttgcaaatagttttcccagtgaaatctttgtctgaaggaagtgaagagattagagtctttgtttcttcgtttaggtcttcaattctcaagttcatctccatctttttcacatccattacaaacaatgattctactatatataacatcatcactatgatttgtattgttttgcaaaatgcagcgttttcaaccaacattagtttgtttatttgtcaataattgtggtagctaggatttgctacggtagtagttttgtctgcttatatttttaaaatatgttttgatataatttgagtgatgacttgtgtgtagtaagaagtaacttttgttataaatgtgatgattatccatcatgttacttcttttccaaacaaaatagcctccaaacaaatgaataatattatctatctctttttataattttattagttatttgggcatcaagtttttttactttataaatacatgtaagaagaagataacatacgtatgtgtgtgaagtaatataagcttcgtctctttactctttatatttctttcttatacacacaaacaatagaataatattattttcttttacgttatattttacaacagctttatatttttcatctacattatgatttgtgttatttgcgaaatacagctttatcaaccaacattgatttgtttatttgtcaattattgtggttgctaggatttgttatcgtagtagttaggacttttttgtctgctaattatcaaaaaacaattattcgatataatgtcagtgatgactgtgttttatagtagtttacatttttaccaaaggatttaaatagtaacaacaacgaaatctgcggaaaaactattttggatttaacaacatttaatgatgatattttttagcagagtttggcaaatgatcaaattatttaaacaacacggtttgttgaacttgaaacatcatgcaaaattcttacaaacataatttattgaactttacttttagttgaattggggaagttaacttaaaattatagaaagtcaatcgtaattattgtggtaatagatatctataaagatcatggagaaggaagtctcgtgtattgtgtatctaacagtgtcagaaagaattgtccatggtaaaatcactatgtaagtgttttcattatttacaataaataaaaaattcggacgtttttaaaaaaattgttttgataactagtttcataataccaaaatagatcaaaacactagcctagcaacctcctagtgttaataatatataatatattcaagtccaaaactttataaatacttcaatacaaagtataatatggtaaagacgagacattaaccactatatatgtagaatatataaggtaagaacgcttacacgagagcatacagaaggaatataacaacaacataaaaggtagtcttattattacaatgcattaaagaaaagctcaaaagcacacaaactcagaatttcaaaccagagttttgaagtttctcttgaatgatcatgtcgattttgttctccatttcaggagtcaaatagttcttccagtcaccaacttctcccttacggaaaaatgttttgttctctctaccagtactatgcaattttccggtcttattgatctccaaactgctcagattacgtagagagcaaagatcgataatctcatccaccaagccgctttcttcttcttccttagtaaaaagacatcctaagaattcggctagtctcttgatctgctcacgaggttcttctttcatctcctcaaacttcataaaaagcacatggtttggatcttccaagcttcctctccagtagcttaggacatggtcccaaaaaggcccgaaaaagttgactcccctacaaaacatctcaaatgtatcctcgacactgcttattatgttatcatcggtttgtttcttacaaaagaaatgccaatatgaaaccaatgtgtcttttacgtttctagacatatacacaattttacaagtagaacctttgagaccttcttgcaatgtatgtgacggcatgtgtgtcgaaaacagcctcgaagatgatgagaacttggtaaggtcgggattttcgctacatagatagagatacatctcaagggagggtgaaagaacgtgtggattatcagaaagaagtggatgatgatcatcatgagaagggtgcttcgatctacgaacgagtgcgaatgtaagcgccttgagccaagtggtgccgcatttagggaacgaagcaacgatgatatcggtgtcttgaggcttaaagtttttctggaaattgaggacaccttggagaataggcggagtataccaacatccttggtacttacaaacatttaccccagtggaatttttgtctgaaggaagtgaagagattagagtttttgattcttcgcttaactcatcgtttctcacgttcatcgtaatctttttctcatccattacaaacaatgttttttttttgttgatgtattcttaagcgaacatcactatgtatttttgcaaatcgaagcatttccaaccgaaactaatttgtttatttatcaattattgtggtagctaggttttgttatggttactacttaccaataacaaaggatttgttatggtactaattaggaattttttgtctgtttattttttaaataatatattttgcgatgagttcagtgataactacaaaataagtaattttatatgtttatcaaaaggtctaaaactataaagtaatgtataatatcttcattatgacatgtgttgtttgcaaaacgcagcaatctcacccgaaattagtttgtttatatgtcaattactgtagttgctaggatttgttatgaaagtagttaggattttttttttttgcttgatatcatttcagtgatgactattttttatggtaataagtaactttacatttttatcaaaggatttaaatagtaacaccaaaatctgcagaaaagttatatttgaagttaacaacaatttaacgatgtttttttagcagaatttggcaaatgatcaaattatttaaacaacacggttagttgaaacatagggaaaaatttcttacatacataatttattgaactttacttttagttgatttgggaaagttaactagttaaaattcattaaaaaaaaaaagtcaacagtaattgttcttctaataggtgtccatcaagatcatacataattaagtgttagaatcactattaagagttttcataatttacaataaataaaaaatcaagactttaaaaaaatattgttttggtaaacagtttcaaaatagatcaaaacactagcccaagagttgaaataagtgagactattaatggtgcacagagatgtatgaaattagcaaattttgttttacacttcaatgagttttggaaacctaagctacctgataggttaaaacacaaaaaaaaaaaaaacggaaagaaaaaaaaaccagaaaaccacaggcaaagaggtcacggggcactttagagtactgaatcagtctggttagccaaaatctggtcatctatgattgaaccatgtttcccgacaggcggaatactaagtgaacgtttcctcatcttggctttatccgaggcggctactcccattctgtttctgtattcactcgtgagctcaagggattcagtcaatggctggttcgttgtcttgaggaaaagatcgaggttttgggagtatttgtcatctttgttggtctttgaagcctcgttgtggttgttttgcgataccatggagattgtgtctcgagactcttcttcttcgttgtctgtccagtaactcttgtcttccattgccagatcatcgtactcttcatctgactttgtcgattcctcatccaccgatccaatctggtttaagattacatgtgagagtcgtaaaactataccgaaagctacactaaaaacatgataaatggcattaacatcctcccaatgactaaagatttggttacctcgtcgcggttgcgctcgtcattgttatcgctgagatcttcatcagaatcaggctcatgaaaatcatcgtcgccttcttcatcatcttcatcgctcccattcacagactgctcctccatcagctgcatggaggatatgtggtaaggtaaacaatcttcacaaaatgcaaaaaaaataagtgtctacacattgattaatgcaagatttacctcttttgaaggcccatcagatgtccgaggcgaactgcagcaagaagagtaatgcctgcttccggtttcaataatatctgctcttaagtcatccacactcccggcgtggctagttgcgccatcactaggccaagcgctgatcccaaagtgaccaaattgaagattcactggttcagctttatgtagttgatgctctgttccatcatccatctcagtattcacgacgggcttcctgatcttaccaacggaagcaacaggccaagtttttgctaccgtaccatcagtattgcaaagagccataaatcgcctagaggagccttgtctttggatcacctgaaacattcccttggaagttaatgaattggctgcacattggttcctatgctcgtcgtcaataacagaaacggtgtttgtggttgtatcatagagcttctctccagtttcacgtctacgcaggcaaccaaagaccgtcgcgtggattgtagccacgctcttgtcgacatttgtgttgtttatcttaggaacgagatgtttgtcagctcgtttgcatagataatcctgtattgttctgatgttacgtatatattttacatacttattctttgctgggtccaatgtcatgtacttggctcggacagcaaaccgttccaagtgtttctcctcgttagcgatgtataccatgaagggaacaatcgaagggtgctttttcatcagtcccatctgcaaaaaaggaaagaaagaaaaagttagattgaaaagacctagtagccttaaatgattaaataacaacatgtaatgaaacaaagataagacttaccacaaagttgaggcttaagtggactccttcaacgactactgactcattcctctcttcccaagtggtaatgagcctatcaagactgtcaatcaccatctcactttgtgccttatacccttctatagccatctgcttatgacttagcaactcagtggtgctagagtttgatccagcatccgtcttttgggcattggagtttacacctcgagagcctttcagttttttggcttttcttttggcttttgactcggcaactgccacagggtcaaggtactctccagcatggtatgttgaagcccacagcaaaggattctgcttctcatcagcaaagctcctcatcatgtgccttatagagtcagttgataccacagtcgtaatacccaacctgctaccctgtaacacatatttagatattgcatctgattaagaacacattgaaaccagttacaccgtacgaattgtatcactctgaaaaacattgaataagtacatagcctaggagttcagtatacaaaaaaacaaaagacaagaacttcttattgtcaatctaaagcatataaatggagggcatagaaatttaccagcaatgcagacaacgtagatttaccacagccgctggtgccacagagcaaaacagttacagattctttcctttctcggattctgcgagtgataataagaattaaagacaatgtttgaaataaaagagaaaaactacagttcaggacaagatatatgaatgggaaagtagcaaatccgaggcacaataaaatcaaagtacagccgtccatgcattactaatgtaataggagcactaaaggggattaatgcaggaacgtatgaagataaacacgatcataacatttaacagtcagacaaccacaaaccacattaattatttatgtgaaattcatagtgacaaggaaaagagagaacagttgacatatgggaaaatcaagagcagctatgattctaaatgttaatagagacatgtgcatgataacaactctttattggccattcaatagctgaacagtctagctactatttctatcacatagatacgctagataccctgctaaagaatctattagaaatggcataaaaaatatttaatgcaatttttcacatggaaaatatattttatgcatttaaagaagaacaacagacatatgcagattctatatgccatctctcttttttgacaatacataccaagatatattccaaaagtgaagaaatttacctgcatgccagaatcaaatctgccctttggtcgcgaccaacatacttatattcagccagtgcatcacacacaacatcaacgaatatctctcgtgaaacaacaacagttgtccgtcttttgtacatctcaaatggcttactcttattcttgtcaacatcaccagcaacaaccaaacagttaagtttctctacacaagttgaaccaccaacttccttagcaaattcaggttccttcccattctctggtgaagtattacaagatccctcacttcttattaactcaaaaaccctacggctgatctgccaacagagacaaaaatctatcaaggaatgcaaaactggttacttataaatatttacacacccaaagatcatcaaaggacctcataataagtctttcacatgaagaacaattcatgccagggcaaccaaaagattttacataataactatatcaggcttgcagagaaaagtaacaggactgagcacaaaccacaccaatcttgaaatatactacgagtttaagaaaagtcttgtccttaaccaaatcctaaaaagactattagagacattgataaagacgtgcattaactaactctcacagcagaaagctcaatactagtataacaaaatttccaaatttccaaactatgtaagatcaagtttagtcctttcaagatccaaacacatcattgatctaaccaatacaaaaaaagtctcttcataagattgatccatcaaaactaaaatcagaaacaacattcaatgagacaaaatcgaaataacaccttgaaggcgtgacgagctttgcaacccataagctgaagagtactctgcaaaacaggacgcgtatacctaaacgaatcatctccattattatcatcatcatcaccttcttcacgcaccactatatacaacaccttcgtcgcctccgtcatcatctctatacaaaacaaaaacaaatctcacaaaattttcagagaaaattcaaacgatcgggaatgcagatcaatcggtaacataccggagaagagaaaaatcggagatcggagaagttagagagaaagagaaaaactgttggaaaaatttagggtttataatgaggatcgtgataagaagaagaagaataagaagagaggaaagatattttcgccattgttgttggtcactcgcctttcttcaacgcatcgctcgaagagagccttcacgacttcttaaaagataccttcttcttctctctctctctttctcacgtttctcttttacacagacccaaaatataaatgtttgaactcaaccaacattttacttttcttgacaaagacgtccctagattttgtttttagatcaaattggtccatcttaatttcgtgaaattagaatctaatttttggttgccaacttgtttagaagcaagagattaaatctaaatcaattttaataaataatacaacatagtaaattagaaaattagaggatgaaatctaaaattgaaaagataaagtgtgtgaatttaagagataataaagtagagggggtttttaataattttattttttttggttattttggtagggttttctttgggtcaagatttcagttattagaagtttcaccgactcatttgatcaggtctttgtcagcaatttaactatatgttacaagaaaagtagattcgatatctaaccataagtgtaataatctcaaatcgaatctaaccataagagtaattatctttaatatatatatatatataaacataagtgcatatatatatatttataaaaacttaaaaaactttagaaaaagttatatcttaaacccgaaagaaaaaaaagctatgaacttggttttggttatgttactagtgaatcttttttttccatggaatataatatatgcacttgcttatctaattgaggtggtaagaattttaaaatagaagaataggattttacttcgattgagagaagaagagtatgaagatgtaccttcacaactgttttgtttgcacaggttctatcgatttgcagagagatgggattggttttcttcttgtgatatgatgtaaaccgtatttatagcgtttaagattctgaaatatatttagttttggatttgtgtatcgtgcatcattaaattttgtattttaaactacacaaaatcaatatccaatattgaacatatgtttttttttttcacttgcttaaattcaaaatataatgataaaattgattaatcagtattgaaggtcttaccaacattatataaaataaattttaaaatagtcaataattataattatattaaaaaggttatttcaacttaaaataattatttattcattatatatatatatatatattgaaataaaatatttagttatacaaccaatgagttataacttataaattttaaatttatttataaacaaaaagttgtaatttaatttttcacaataatgtaatactagtttattttctcaccaatttgagtatatttcattccatacaaaatcatggcaaaataaagctctagtggaaactacaaaaacaattaatttagtaaatggaaagagaaaaaacaaaatctaaaacttaatcactatcacatgattcagattcaccgtgtggaccccaaataaacaagaatcaacaagtggtaaaagtgtaaatctggtgtgggaacaatggtaataaaaagttttcttctgtgaatgatttgtactttgtcgggaaagaatctctaaagggacaaagaaagtgggttccatcgttaaacaacaaaaattccaaacgttacatccacgaagttttaagccctctataattggtcaatatattttcttgttaatttcctattgaatttaaaaaatacattataagtatctaccaaaactaggataaaataaaacatcatgagaaaaaatcgtctaatcattatatattgttatatcatagtcataactcataacacatttgaatgctctatactggtcggatgatgagaaatagtctcatgaaaaagtctatagaaagaaaaatgatgaccggaactttaaatgttcaataggaatatagttatgtgaatcagatttcagtattgactaaatatcactatacatttattaatagttgtaaccgtttttggtaagtgaaatcttgaaagaattataacttgtatatatatacaaacaaaatctttaagtttttttgctcaaaccatcatctaaactagactataaaaagagacgaaacgcatgtataacttcaccatcaaaagcagaaagaagtagaaaaatgagaagcatttcattcaaacttttgttattggtttctcttcttgtcgtcgtttctcgtaagtatacataccctagctaccaacagtatcattttcaaacaagccaacaaaattttacatatctcttcacaaataattgaaagtaatctttgttaaaatccattttataaaagaatcgagtctgaattttgtttaaacaaactttatattcgaaatcattttctagttaattattttcttaccaatatgcttgtatttaagataattttcttatacttttgtttgtttattaaggatacactcttgcgtatgaagattcttgttcgacagatgaagaatgcagaagaaactgcctatgtgatgtagcatattgcgacaaaagccgtgataagtgcgattatggatttatgaatagagttgatgtccgttttcccaaacatccttatatttcaaaaaataaagatggtagtggtagatgatctccactgcagtgattgaaattgtaatgatacaagtgaatgtatgtcgtactcgtatctaataaaaaaaagttattttttgaaaactatttttaaaattttttttttttttgatgtgtttaatatgttgatgatcataattcatacatatatgaatactgcctaaagttataaatgagattgattaaagtcacataatatatgaattctctacaaattttgtttgatcttaaaaataatttttgtaagaaaaatatatattcatgatggatatatgtggtttattgtgaattagataattacttacaacattataaatcattcatttatttaacaaatatttatataaattttgttggtttgttttcgttttaaaaataggttaaactaggccaataatagttttcaaaacacaacaaaaaagttaaagttagtagtgaagaaaattcaagaaagggatattaaacatatgtaatgttaaagaagaaatgcttgtccatagttctcttttcctctcttatctctctaacatcctttagagagaaaaatcttttcagcgtcgttttttgatttccgatttcagtcggatctgtttatactcttgcttatatgcaagcttaataatttccggtcttggatcggacttttgtttccggttatgtccggtctcctttctcgcttatagcgagtttagatcttcttatcctctttggctttaatcatcgaagtcttcgattgtcttccaacttctctccgatatctccaattgctcgaggaataatatcttcgtcactctccttttgctcaaaatcgatgagcaacgaaggatcttagtctacatcaaattgggtgtagctggtggtggagcctccccggagttggtgcttcccggagaaattttgaagcgatttcatctaaacccggtagatttcgatgctatcttatacaggattgaagatcggcagaaggaatgaagaccccagcgttctagggctgacacgcgacggctaatcagcgcttgggagatgagcggcgaattatagacggtggtgcttcatgaaaagacgcgtggtttcaagggaaatacgtcttctccacgtgtcatatgctaactcataattatcatgatatgttaatgttaattatgtttttagtttgggccgtttaattcgcttgtactcttcttggaccttctgtatgttgccctttgggcatataaatgaatttggtcgacaaaaaaaaaaaaagaagaaatgcttttttgggcaggacagaacgtttaagtttttggatctgaccatgtaatggatggataaagctaaatatgtgggtggtacttcaagagggaatactggactagcagctgtgaggggagtaatgaggaatgaggcagaagactggtgcaagtgttttcactcaacattggtatatgctttgctctgttagcagaactttaggaagtatattatggtatgaacattacatgggaaaagggagttcaaaggctagaactcgaggtcgattcagagattgtagttggttttcttaaggtagagattattaatactcatctgctgtcattcctattatgtttgtgatatggctttttattgaaggactggaatgtccatatatctcacgtgtataggaaaacaaatcgacttgctgacggtttggcgaactatacatttacatttccactaggtttctatttgtttgaacctacaccagatagtgttaagttactttctttgaaaaatgttggcgaaactgcgtttcggagatatgtttgcttgtaattttgttttggtttgaataaattggggagacattagtctcctctctcctaccaaaaaaaaacttctcttctcgtttttttttataaaactgaagcccatcttcctctataaaacataaccaactccttctgattaaaccgagattagaactaaacggatattaaaacaacaaagattaatgactaaatcgagatttctctctcacccttttttttataacaaaaatatatttataaatccaactgggcatggtcaggcataacaaagttacagagaattgacgaatcaatgcaagagaagatattgagtatcatcaaaagccaatggagtttcttccatgagaggatagccaagaacaacaatctcatcacttttgggattgaatttggagaaggaaagaaacagatttaataatctgttggcgagtaaggcttcattatcgaaagcatcgtggaaattcacttctccatcgccttttttattaatcgattatgtattaatggattgaaagttaatgaattccccttgagaggatcattgtattgacaagggattacaaaatcatatatacagaatatataaaacaaattgtaacagaacatccctatattctatcaccctccctcagttgaagcggccggttgaaggacagttaaactggttcggaactcattaaacagacacgtaggtaagccctttgtgaaaatgtctgcatattgaagggaggatgggacatgaacgactttgacctcgccaacaactaccttctctcgaacaaagtgtatgtccagctctatatgttttggcctttgatgcttgactggattagtagcaaggaagaccgaactgatgttgtcacaataaacgacggaggctttttatcgtcaaatgaagttctaacatcaagttttgtagccaacatagttcagccacagtgttagcgacgcctttgtattctgcttctgagcttgatcttgagaaagtaggctggcgctttgcggatcaagagaccaagttcggaccgagaaatacgcaatagccagatgttgaccgtcttgtgtctgaacaaccgccccaatccgcgtctgaatatgccgtgagacaatctatttggcctttaaccacctgcagtccatgcgttaatgtgccttttatatatcgaatggttctgcacaaagcttgaaaatgtggttgacgggggtcgtgcatgtacaagcatatttgatcgacatcgtaacttctatcaggccttgtaaaagtcagatactgtaacgctctggcgagactccgatacaaagtgggatctgaaacaccatctccgatatctactgaaagcttggactttaagtcaacaggagtcgcaataggtttacaatcactcattcatgcacgttccagtatctcctttgcatacaaagactgactcaagaacaatcatttgtcgttgtaatctgcctttattccaagaaagtggtgtatctttcccatgtctgtcattggaaattcagctttcagtgaagcaatgatgtttccagaagtttggtcgaagaagcagttaggaggatatcgtccacatataggagaatgtatgcaaggtcaactccttttctgtaaacaaacagcgatgcatctgccctgcttgtaacaaagccaaggtgggtgatgaattttgcaaacctggagttccaagctcgtggtgctttcttgagaccatagatcgctttgtgtaatcgacacacatgattgggagagtttgtaacgcccgtgtcccaagttagggagtaaacaagatctctcacccgccaaattcgaggacgaattcagtgtaacggggtagacttgtaacgaccgcatcccgcgttcataaagaggcaggtttgttttaggagaaaactagatcatggtcgaggaatggaacaaaatactaagtaggaagaacgagaaagtataagctaaaccagctaggtgagctggacaagctgtatgaactagctaggtaagctatgtgagctaaaccagctggaagactagctagctctgctaggtgagctgaccgacagctcaactgagctcggtgagctgatcaagtactgacccagctgggtggtccggtcagctgacactcgagctggtggactgtggtagctcacgggtgaagaggtgtctcggccaaaaggtgtaaggtcgagcgggtaccaacgaacggttgcatcgcccaaaagatgcaaggaacatatgtgacctttcgaaaggatgcaaggaacggatgtgacctttcggaggggtgcaaggaacggatgtgatgcttcgggaagcatccattcgccccctatataagggaggacgcccaaggcatctcacatcatctcacaacatccaaaacaccataaaacattcttaaaggagtcccaacacatcctagagttgttggtcggaaagggggtgcggctcggcgagtataactcgaccgaactgatgcgcatgctacctcccggtccaacggttcgatggagtgtagaggatggagagggtagaccgttcgtcttagagacgaatcggatccgatagaccgatcgttggatcggatcggccagaccgatcatcagacggatcggatcggccagacggatcggacagaccgatcgtcggacgggtcggatgggacaggccgatcgtctgacggaacgggtcggacagaccgatcgtcggatgggatggatctaattgacgtattggccaatcgagaccaacatgaacattgagaacagttcgtattgtcgccggcttgaccatcggactgaacgtctctgtgaaatcaacaccggcttcctgtgattttccattagcaactaatcttgctttgtgacgagttatgctgccatctgcatcatatttatgtttaaacagccacatagatcttacaatattgaccttaggaggtctaagcactaaactccaagtcttagtcttaagcatagcatctatctcatcagtcatcgctggtgtccaatttggatcagaaaaagcatgaatgtgactttttgggagaggcgattttgtggtggtgagaagtgagatgacctgttttggttttcgaatcccagctattgcacgtgtcatcattgagtgacagggctgaatggaaataaattgtgtttgtggctgggttctttgagcaggaacactagtaggtgttggttttgagtaggaaatggagtttgaagaataggttgcaattgagaagaaggaacatcatcatcgagaaattgatactttgtgtctttttgatgtgtttcggttgccggaaaaatatcctcatcaaagtatacatgacgagatataatgatcttattagtttttagatcaagacatatgtagccacgatgttgtgatggatatccaagaaacaagcatggacttgatcttggagaaagtttatgaagattggaatgatttaagtttggaaaacaaaggcagtcgaatactctcaagtgatcatagcttggtttcttattaaaaagacgagtgtaggggatttggttttggatggcggaagagggaagaatgtttaataggtggacatcgacatggagagcttctacccaataacttggcgagagttgagcttgaaagagaagagctctaatcgcattgttaatggtgcgtatcattcgctcagactttccattttgttgagatgtgtgaggacaagaaaaacgaactgtaatttcatttgaatccaaataattcttgaactcatggttattatattttcctccattgtcgcattgacaggattttatttgggtattgaattgatttttgacataagccgtaaattgaagggatttttgaaccattaccaacgatgaccgagtgagtgatgttatgattaagattagagtgaagattacctgctgtgcccgagagatgtgcagtggcagccgaatccatgacccatggtgcaccattaggatcaaccaaagtctttatcgtgtaagcttgtgtgaagtcagtcgtcgactgaatttccgtcagatgggcttgttgaggatactggtgtatttgaggaaagacatatgggcctcggtatgagcctagttgagagttgggtccccagttcgcaaattgattgggccacagattaaatggtctgggccagaaatttgagtaagtctaattttgttgattggggtgaaactgattgttgttcttgtttcctctgaaatgattgtttcctctgtagttgttgaatttatgcggctgtataggcgaggttgttgatggggttgcagagacggtgagagcagtggatgataatgagttatccttgtgtgttgcggaagctcggtgttactttttgaggcgagtttcctccaattccaacattgacttagccgtctcaaaacttggaaacagctctttgtgtttgattacgttgacgatgtaatcatatttgtcattgagcccgttgaggaggtaagtgaccagatgtatctcgttgaccggtgcatcaacattggcgagcagatcagcaagcgatttgagtttttgacaataagcctgaatcgtttgttctccaatctcttgattacgcaattcattatctagttggatcgctcgagcctctttgttgttgcggaattagttttcgattcggatccaaacgtcacgtgcagtgcctccagtcttgaatgatgagcggaacagatctggagcaagagttccatagatccagagtttaacgagtccgtcgcgtttcagccaagaaccatcgttatctccactgggaaacatagtaccatcaaggtgtcctagaacatcgaacgtcagacagcgtgtctggaaaagctctctccaagcatcataattgtgatcattgagatcgagaattaagagtatgtgggctttgatatttgtaaccccaaacgctcgctctatcgctggaagttgagcagccattggagacttttgaagaagaaaaaagagatgaaagaaggaaagaaggaaaaaaggaaagaagaaagagaaatgagagaaaaggttaaggagcgatggtgctctgataccatgaaagttaatgaattcctcttgagaggatcgttgaattgacaaggctatataaagccaatgttgttacacaaaatcagggattaaaaaatcatatatacagaatatataaaacagattgtaacagaacgtccctatattctatcatggatgtgtactttaattttttttagtagtaaatgaatgaaggtgttaaaaaaaaaacccaactgggcatggcaaagaatgtcacgaggcccaaacggcccacagaaaggtaaagtaaaacgttggccagaaggaagtggagttcggatccgggtcaagtcaccggagacagcgactcacggcctctttggtggatcctcggtggctctctcagcctctttgctccgcccgcgaatctttcccgtgagtcgtcgtctgttcatcagagattaaaatgtgtaacctttttccattaaatcatctaattttctaatttgtcgctttgttgtagaattgtatctatggcggaaccaccaaagcttagggttttaatggtctctgatttcttcttcccaaactttggtggtgtcgagaatcacatctattacctctctcaatgcttgttaaagctcggtcacaaggtcagattcttctaagttctaaatcaacaaaagttcaaatctttttgcatttttagccataaagaaatcaaattctcaaaacccgtttatgctagttcaatacgatgtgatcagattcaaagttttaaattcaaagtttcaagctttatcatcaatagctgtaatcagattaaaagtttcaggctttatcatcaatagctgtaataaactaatgtagcatagtgtgataggagcttgaggccaaagtttcattctttatctgctttggggcattggtttgagatactgttggttttgttgcaggtggttgttatgacacatgcttatgggaaccggtctggagttagatacatgactggtggactcaaagtctattatgtaccttggagaccttttgttatgcagactacatttccgacggtttatggaacacttcccattgtgaggactatacttagacgcgagaaaatcacggtagttcatggacatcaagctttctctacgctttgtcatgaagctttaatgcatgccaggacaatgggctataaagttgtgttcacagatcattccttgtacggttttgctgatgttggtagcatccatatgaacaaggttttacagtttagtttagcagatattgatcaggcgatttgtgtttcacacacgagcaaggagaatacggttctaaggtctggattgtccccagcaaaggtttttatgataccgaatgctgttgatactgctatgttcaagcccgcttctgttcgacccagtactgatattattactatagttgtcataagtagattggtttatcgaaaaggtgcggatttgctcgtggaagtcattccagaagtatgccgtttatacccaaatgtgagttacaaaaccccagctcacattagtagcagaatcattctgccatttctcattagtatccgcatttactttctttttatttggtttttgaaaggttcgttttgtagttggaggggatggaccaaaacatgtgcgactcgaggaaatgagagagaagcattctctacaagatagagtcgaaatgctaggtgcagttccgcattctcgtgtgcgctctgttttggttaccggtcatattttcttaaacaggtgtgctgattcttacactttttgtgtttaaaattcacaaaactcaacattactttttatcagttaacgctactatagtcttgatcctctgacagttctttaacagaagccttctgcatagctatattagaggcggctagttgcggattattaactgtcagcactcgtgttggaggtgtcccagaggcgtgtaacattttctataattccttcgttgccctttcgctacatcctcatcgtttctttcttcgagattgataaaatcaggttttcttcacggtttacaggtcttaccagatgacatggttgtacttgctgaaccagatccggatgatatggtacgagctattgagaaggcaatatcaatacttccaactattaaccccgaggagatgcacaatcgagtgagttctgcttcaaatccaagcctaacgtatcagtctacttataagagttaagattctcttctaagcctttgatttcctttttttgcttgttgctaccagatgaagaagctctacagttggcaagatgttgctaaaagaaccgagattgtgtatgaccgtgccttgaagtgttcaaataggagtcttctagaacgtctaatgcggtacattatatccttactcatatagattaataatgtaaaccccacccccttcattttctataccgatgaatatctgatcttttgtaggttcctctcgtgtggagcttgggcagggaagctattttgtatggttatgatcctcgattacttgctttggcggttacttcagttactgcaggtgatctatcattgattcatcttctctaatccttgttttttacaaaatgtaatatctctaaatataatggaatttgcctcagcctgatgaagatatcgaggaggcacccgatatctgtctttgccatcaccgaggggttgaggtatctgagggtctaaggaagaagataaagtgagaaatgggtgagtagagtttcatctccgtcgatatttggcattttgttccttgaaattatacaagtgagctcttgattcattgttttcgtaggacctaagtaacttcataaacttattatctatacagtttccagatatttcattacaagttattgtctttccgaaacagaaataactatggaaaagagagacgatgatgtagcaaagagttcagactcgccaggaataagtggttacttttgagtatcataacattactgagtttgttttactggaaattgtcgtgtaaaaattagttcaccattgcttgtacggtgacatgagccaatcctttcgagaataaatagcatgcatggtaattggtaaggcaaaacaaatagtaatgtattagagatttcgtcaaaatgggttaaaattgatgggccgatccaacccaatacgatccatcaattttattgaattgatgggttttgactataatggacttaggagtcaattcatgggttattaacttattatgagtaagaccataataattttaccctattgagtatggaacaacttgtatttttattgtatttgttttgtgcaaatttcctatataaaccaagtaaaagaaacatattctcactcctacatttacaaaagcaaaaaacagatttggaaaaaaacaaccatcagaattttattatttataaatcaacgtaattttaaattagtaatttttataatgtatataatacatattttcattctaaacgttatttgttccttttgtactatttgttcattttgtttaaacatttttgtctttgaaaaaaactttacaataccaaatatattatcttaattaattaaggattcttataaaaacaattcataacttagatgataattaaaaaaatataaagaaataaatttggagttatcatccatttctagaaaaagtcatgaactaattgagattcatatagaaatataaataaaataaggtgcatgaaaattgtgtgatataatgtattaattatattagctgtctttggtctgtaaaatttttagacaatttccttaaaattaccattagttagtggacctatcatttaaactttcctacataatttttgaactctgactattttttgcctttttcttatatatacaattaatacagatattatttatatttatgagttagttacacaattatttttgccatcttcgccgctacaggtcatggcgccaactctacctcgtataacacctcgaatgatttcatccactcatatatgaatattcataattcaagtaacatgaatcattttggtaatcattgtactaacacaagcggtgttgtttgtcataacaattacaactgtactattgataactctatccattatgcggatacacgtggtgttgttagccatcaccgagagaatattactggccatcatggactggtatttccggcggctacaatgaacggatatggtcctgcaactagttttccagatatgagggaaaatgggcacttgatggtgaatcaaaatagacctgtgacgctacgaccatcaatgtcccagcagcaaccacaaccacaaccactgtctgatgagtataataaggtggagacggggactgctgagcaagtctatgtcccctctcgagactaatgattggcgtcgcagatgtttctatgttcaactatatttggttttattttggttgctatttccattttgtttccatatgtttttcagtttaaggtgaataagagtaactaaatttattttcttttggattcagttaagtttcattttttttcttcatctctagactctagtccattaatttggaaagagtaaaggatgagaattcaaaatagttaaattaaagtatgattggagtataattgtagagactttaattcaaacattagagtgtagtttatatgcttatgttgtgttatagtttttggtggtttatattgctttcggtttttcctccttcttgtattctctgtaaattctgtcaaatatttatgaaaatggtatacatatataacattgatacaaaaaaaaagattagagtgtattttaatttaaaaggaaagaaatcctaatctatggaacaaaatctacaaaatttaagtcaaatgaatatccatttgtctagcaatttgtgctaaattatatatcttaaagtttaaagtgtgtgaaatgtaaaataatagagaaccaagaaacatgtcgtatctagtatatttttttttttcttctgatttagggatgtcaaaatcagttaaaatgcatgggccgactagatacaacccatcaattctaatggatttgatgggttaaatgagttttgattatctatatatttttgaaatacatttttaaaacaaacttttattttggtaaatacttacagagaatgcttttaattatattcatgtattcaaacaaccttacatttcattttctactatccatataaccaaacacaaataaaagatattaacattaaatataaaattagaaatatccatataatgttccattactaataaaatacatatttagatgactttggtaagattaaaataatggttcccttgaaaatggtgggtttatgtctaaaatgagccaatcaaaccctctaatattcattctgcacaatttaatataaaacaaaagtttgaaaccaaataaattgtttaaacttataccaattgaaacacaaactcaaaagacttcaaactacattgtgttgaagagacaagctttgaatccgctttaatgcattataaatcatcctctacttcgatgccttctaatttttttctcgtcatcaagttctatatatataaatcaaatttatttttttctgaattttgacatgtataaatcatataaaaaaatcctaaataaacctattaatttattttttgttcaaaacctttaaaaatattcagtaaatattttaatattgaggaaaaaaaaaaaaaactctatcttaccaagtctaaaagagaaacaaatattttcttaaaagacttttgggctggcccaagccctgtgaggctagaccccaagaatcctttaatcctttagactaaaatttcccaagaaatttcaaatttcatcactaaactttctaaatatattgtgacattcctcagtttattcgaataggaccattaaaaaattatattaggttttaagtcattaaattaactcatacttgtggactcgcaaatattatttaccaggatcatagaataattaaagatattacataaaaatgatttaaaataaaaagacaccctagaaatatactttaaaattcaaattattgtaattgtttttttttgtataatttctaagaatatttatattcacttatttttcaagaaaatagggaagaatttcaaaataaatatcaagatcaaaatgtatttcaaacaaagctcaaaaaattattatttccaactttactaaggataagagcaagaaattagtttatcaaaggataatcatggcattaccagtttctatgtgtatccgtttttatttgacaactatatacgcaaaagtaaaacaaaataagtgaaaaaagaaaagaaattttcacataagtggatgaaaaaagaattgctctcatggtttgtcaaagtcagatatggtctttaccgtttgtcttttcagttgttttcggaccaaaatatctttaatgggagcaaccaaactacacagcacttgattttggtttagtttctatgattcagttttttaaaaaaaaaagaaaaaaaaaactgaaacaaagaaatcaaagaagaagaaaaagagaaagagacggagagatttgagagacaagtagaaagaagttcaaaattcattattcactccttcatatttcgacatctctccattgaactccaaaattgagaaacaaatttcttgttttcagagatgaacaaaatgcaaaaaaaaagttcatagattcaaacactttagctttttaaactaaatatattctaggtttacaagatttatttataaatagtaatttttgagaaactgataaagatgaccgcaaaattaggtttgcagaaaaggatacacatgttggagatgactggaaaattacaattatacccttcatcgaattttttctgtgtacgtatattcaattacagtgtacgtacacgaaattatttattgggacgtatatgagacgatttctaataactcaagctattttattacgtattcttatatctcaataatctcaatacatacataataattaaataaaaatagatggtgaaataatgtttgttcctcatattgaacagttatatacgtatatgtgtaataatgtacgtacatttttgttggtaaatgaatgtatgtacatgtgtaataatatacgtacatctttgtttgtgaattgaattatcaagaaaaatttattgatacaatattaaaccaatattggtagtggctgagataagacattgtttgttgtatgacttttctgttcttaaaaacacttctcaatctatagtgtacgtacattggtacaaaccatgttgacacatacttcttagagtcatagctggtgtacggtcacccgagtgagaaatgttatctccgcgaggtacacgttgacttgtgtacgtacactctgccaatagacgactgaattcccctggtgtgagaatgacgttctcctcaacattccctattccatattcttctacaattacatcgttctacttgttataatcataatcttcgccactaatttcactaccgtcaatagtatgatcgagggtacttcccccaatagatccatcgtcaccctaataagcatcatacccatcaccatcttcgttgtccccctcctcttcatcctcatctgttttatcgtcttcaacgtcgtcttgctcatctacgacctcattattttcatcaacatttgaaacactatcacacacacagtcactttcagcatcgtcaccatgagttctagagacattatttccgagtgtcttgacggttgtaataaaagagacaaacaagttgagagaaggatactgaccacgaataaaaaagaacgtattcaaccccacttgactgtcaatgtagacaggagggcgtttagtatctatcatcactaacatctctcccggctagtgtacgtacaaattctgtgtacgtcatgttttccttaacacgtacacatcgaccaaacatgtcttcttttagttcaaatttccattctttttctttgcatctccactcaccgaccataataaatacgggaatatctattacccaacagcatcataaattcaggagaaacccattaaatgcaactgaaaacatgattatatctacaaaaacaaatagaatttcgatatacatatttataaacataaatatttacacatttagcattttcaaccaacaaaattaaaaataaaatatttctgggtttttctataaaaaaacaaagttgatttcgaacacaatgaagatcatagtatgttataacaaaaaaattctttaaaacttcattacttatacgataatgcttatcttggctccaaacttcgtaaataaacaagatcaacacttcttgagcatcaatgtacgttcgcaattaatgtttgttcctggattcatctttaactcaacaattattatcaataattttataatattataacatgtaatgatgattttgcattaattatgacaagagtcacgtctaaactttttgggtcattaaatgttgatgtcatttcgtttttaatggaaaagatctctcttctaactatatagtcgcgctcctcaacgtgaaacaaaaataacttcaattaaaccggaatagtgtacctaactaaacctgaataactaaaccgtacattaaacagtttctcagctgtagcagtaaggacaaaatggtcaaatttcagctgaaaagacaaaacgtgaaaaccacctttcactttgtcaatcattgaaaataaaacatggtcaaaaggtgtgacgcgcaaattacccaaaaaaaaactcttttaaaaaggttcaagggaatggagacgcgaaaagattaattattctcacaaagataaagatctgagttaacatagaaaaagataaagtctatactcacaaagacaacatgagtttgcggtattctccaagagcccaaatggggaatatgtttctataagctgagtaactgatcatacaattccgattaaagactcctagtatctcctgaacaaaaagtaagaagcaaatataatcaatgaggttagtgaaaacaaaacctgtctatgaatataaaacattttactcacttgttgtgggtaatctccatcttccatctgcgagttgatcagcgattttgccccgcgatgcaatggcatcggatctctactagccttcaaacccaaattatggattaagtaacaccttgcacctaagcaataagacattctatagagaaggatgaaactcacttgtcccgcttcaatgagagccaagagtgcccatgatgtgttcacaatatgcgatttattcccaggaagattggtgtatactttgttttggcaagaaaggtagctctctccccatccaccacaacaaagttgtttggagagcaagaaaccacaagcttttctaatacaaagactgctctcatatgttttgcctgaagccaacatgcctttaataccaaaccatgttgcataggtgaaacacactccccacgagccatacctaaaaatttatcagcataccgatagaaaaatcacaacatatatatatattaaagtaaaaaccaacttagtagcactgaccatgaaccatcaggaagttgtgttttttcaataaactcaactgctttgttgatgcttcctactatctccttcctcttgtagctcgaatttaacgttgtgaataacacgagaccttggatggcagctgacgtgcattctacgtatctgtggatttttaatccttcatcaacaagaaattgttgtttgaaatggaatttaggtaatactagttcgcatcttactgataatctatgatgatatccccaaaagtctctgatgggttgataacctgttatgtatatgcgcatacaacaaatgatatgagagtccactaatcttgtcttgaatataagcataacaagaagaaatggtttaacctctagctcgggatatgatctagttagctcatatgacgcaaatcccccattcttgttctggaagaagtaagcttatagaaaatgtatgttaaaaaatatatccgaaaatgcagaaagtatacctgtaatgataagataaagtttacagcatcaactaaatgctcttcaggcatgggttctccaactaaattaaccggcatttgtgacaatagcaacgccgcctataacaagaaatttcaacatctttagcttgttgagaaaaaaaaaacatatgaggagattaacaaaaaaacatgtaagagttgcatatttagttaagtaaccttcaaggcttcagcagtacaatcagagacaggccatggattgtctccagtggagaaaccccatcctcccttgcacgggtgtcggtaccacaaccccggatctccacttgtgtctttccttatctatttcaggttacgaaacaagagatcaatgaaataaatcagatcacaagagaatatatagtctatatgattaagtgaacaaagtacttgagtgttcttgatgtagttatgggctttcttaagcatcaaaccatagtcatcaaccaaattcgtcgccaagattgcttggaccgctaaagtcacgtcccacagctgagatccgttgtatccctatatggacattatatacttgtgaaatatggttcatatggaccaaaaaaaagaagaagaagaatgataatgtacctgcattttcattccatcctcagccacccacaaatagtctttaatccgcgagaggtgagatttaaatgcctcggaattcgaggactcgacccaacaacaaagcatattcaagaccttaaatcccacaccaacccaacatatatagtgttagccaaaattagtaatttaagtttactggtgcattgagatatatgtaacctactttgttgacaggaccgatacaaatatagtggctgttttggtcttcatagtgaatgtgttgcattactgtctgaagagcatggtttctgaggttattcaatggccatctttcaagaagaggctctccaaatttattcagacaactccaaaggacgtcttgaatctttggatgtggatagtacaagtcctcctacattgatatattaatggaccaaaatctaacaacaaaaacttttgaaaaaatcgctctaccttggcacattgattacgggcggtgtcccaatcgatatggtgataaggaatagtgtagagctctcgtcgaagcgataaaatagttccattagtacgacaaacaaatcttcttccatatagatatgacattggaagataaaccatcctacaatggcaccacattcggcccggatgaaaaggaagactatatggaaggagccatagctctggaggtaaaggattgttcccactccactcataagctccaagaacctgtttcatataaaatcaacaattcattatgtgattcgcgggtcgcggcaaaaccagtacaagattgtgttgttgttaacgtacggagagccagaacttgccccaggagggaataaaagtggcaccaccgtggtggtgaatccaacttctagctgattccatggctccatctccaccgtctaattcttcccccattagtctcagtgctacgtatgagagcactgtacaaaacatggtgctattcccttctacgtgtagtccccatcctccatccttgttctacacgttatatcttgttcaagttagggcttttttaccaacaaatagattggttctttcactacaaaaagattcaatatgttttcttgatctgaaacctgatggttatagagataacgacgaatctcgatttgatgttgcgcagttaaagttccatccaaaacttccgtcacatataagccgatcacctgcgacaaaaatcattaccggtgtatgttatgtaagaactttctttgaagcttttcaaaaccttgcactgtttagtgtacaatcgcattttttttgaggttattgttacaaatttcacatatatcatatctattttttgacaccacacatttttgtttaagaatttcaatttagagagaaagaataattaaagaattaccagagcaggcaagagaaacaaagggccaccataatcaccaggccaaaaaccatcttgtgattgaagtattgagtagaatctcaaacttcttcttaatgtaacattcaccacttcttcatttatcaatctttcttccccctcttttactttcacttgtggaagtctctccattccttttcctttctctttccaacactatacgttcaagttcatgtttatatttcaatccagtattggataaagattttcactttcttttaattaaaatctaattttctctaattatactttaataatctaatagccttggagattaagctaatttttgtcaccgttcatttttttttgttcttattaattaagctaatctcatagcccattttgtttttattcatagccaatcgtacatctttaaattcgtttaaaatcacaaccactattttaaagaacaaagtattatttgaaatagaaaaaattatactaattacgtgatattcacatttttttgttgtcaaacaattttcaaatcctatcttatcatatgttttgtccatatatgtctacataaatgacacgatcggatcttattttctgaaacccaaataagaagtaaagaacaatgactttgactaaaaaacgttaaatctcggccttacagaaatgttgtaaacatgaaagaacaaaataaggatgtgagtgtttttatgcagacttatatgactttaaaatcactaatgcatgatgggataaaatatcattttaaagaatttttttgtttcttaaagtcttcaaaaccttttaaagtcaatattctagtcactcccaaaattagctggcttaaaaaaaactaagacatatcaaaatataatcgtctcaaattttgaaatgttctatagcctttacagctttaataagtgaccttttacatgcaactgtggatcatgtgttgtaaaaaaagtaatctaaatttcacagttagaaatatgctagccatgatttataaaactaagtaataaaattatcaagttttgggtgcacaaaataaaataaaattttatcaagtttaaaatctgaatttaagatagttgctgctgtaccaatatgcgttataaggaaaatgaaaaaaaaaatgtacctgaaaacggtagagaagatcagaactatgcttagaagaaaaccgattgagagtaaagttgctacgaagatggttaatgtgatgtctctcttcagaggttccaaattggttatcatattcccaaaactgtcttccaacatgttgattcacgctctcttcgtctccttccgataactttaacctccacatctctttctttatctatctctccctcgatcttgaatgtgagattctttatattaatgtttaaaataaaaaagacagctcaagaaggcaaatctatatgtgttcaagagacgtaatggactcaccaatgccgtgaaaaatcttgttcacgttgaaagcaatgaagcatgcaagaaattatggatttattatttaatctaattttttacgtgtaacttataatgtatatatgaaattgttaaatcactgaaagtgtttttggtttatatatgtgttgtgattaccagattttatataagcaaatcaatgattaaaataacaatatgatcattttgttgacgtatcaatcacctattttttgacgttaagtgcgagattgacctaataaagacaaattagatttaaagggatctgtcacatggaagataaaagcatctgtctgtattcacatgaaataacattctcaattttttttttatgtcgtaactgaatagctgagtattctattcacataaattccagaattaggttagattaatattagtttgtcaccgacggttttcgagtaatgcaaacccgggagttcaaagtaggtcgagattaaaggctaaactgaagtttaaatatatagccacattgagaaatgaaatgaaaagaaaagaagcgtagtcctaattaggcaacttcatcgaaagaccgccatgtgaaaattggaggtcgtgaccgtctcatccggcttccggtgagttgtgcttcccaaatatttcaactgacacaaaaactcggtttcaagattgacagcaaaattgttggttgcctcttccacaatgcctagttggccatagaaattaaaatgatagctttctcgacattttagaagagggtcttactgttagttttgaagtcaagtttttttttgtcgactaaaataattgaaagcacagttaactggaaaccgaatacggctaccaagacaatccaaatttctcataacagtctttggatgaatttgtctttcgatgaacaaaactatgattattgtaaattttatttttctcaatcaatttttttggtctattgtttcttttgtaaatggatgtgaaaacatagttttcttttacttggtttgcatagaacatttacatataaaaaactactcgatttctctctacttactgatggtaagtttgtggaacttatccacaaacttcattgaccaaaaagatcataataacttcaaagtaagaacaagaagttatacaaacagctcatacagtattcatgcatcttatcttcttcttcttttttaaatgttatatcttacttaaaataaaataaaaattggttttttttacaaaaatagatgataacatcaagtttatttctgtataatattttgttaccatttagtgttactgattttctagtaataattatttattttttcaaatattttattctctctctattgttttgtttttgtaaatggatgtggacaaattattttccttgactttattgatatagaagatttacataccaaagatattaagtactccatttctttcctaaacttactgaccataaatattataataaattcaaagtaagtaaaaataagaatacaactaggtaatatgtttaatacattttatccaaagatattcatgaaatcttatcttatttttattttatattctatcttacttacaaaactatgacaaaatggactttcttacaagtatagatgataacaccaaactaggggataatcgggggtacgaccgggtaatatatgacagctaatatatttcggctatcaaaaaatcaacttatgtgtcatcaacttgttatgtgattataaatataataaaaactattgctttcaattaaacgatctcttacgtatttaactatttatacataattaaaattctcataatttttttcttttttagattagttcataatttttttgctttttagattagttcatgaacttataagttcttctcaaaagaattagtctaccaaaccaaatattcctaacttgtacttctttctgggacttaattggcatttctacgacacaccaatactctatgatttatataactctttgctttttattcttggaattaaacatggatcatcatttcctaaaattaataaaggcagataacgtacattttcctctgtgcaaaacgttttaattttgctatatacatatctacactattatttgagacgtacgttaagtgattctcaattaaaaaaattttttaccttaaaatcatatgtttaaaatattaatatcatggaaaaattacctttaattgagaatcacttaacttacgttataatcttggccattcgattgaattatttgtgtccgttcaatctctcgtcttcacttaaaaaacacgcagatccttttgacccggatttaaacttttgagtcatacgttataatcttggccattcgatttaattaattgtagccattgaatttttttcaataaatcctacaacaagatttttggagagaggatttttatttattttcaattattatattcccttattcaatactattcataattacgtgggtttaaaattggataactaattatactcatatatcaaaggaatttacaatattatattctaaaatattactaatccaattatttttttaaaaatattttctaatcaaatctgctttatttatagatataacattataaatatcgaattaatatgtttgaattcgaaattgggttaaatattctaaatttatttaaataactggaaaataatttaaactaaactattttttatgtttgatatttaaaatagaaaaaatatgtttaaacatttaaaaataagattaattacttttttggtttatattaatttttgttaattatattaattgaattcctttttcagcaactgaatcatattaatttaaaatattcaatgcgtatattcctttcttaaatttgaatatcaattttccataattataggtaatcaaatatttagttggatgtttatttttgaattaacataaagtttccaaacaatttccataattaaataactacttataagataattgttaaacattctcctataattttgggattcatcataatcattaaacttgacttccacgatttaatattttatgcatattgtttacctaaaaaattatatcttataaatactgtacgtctcatttcaaaaattcactcatcagttcctattttcttttaccctcccgcttctttttttattctagcagaagaaaacgagaccatgaagaaaacagaggttgtggatcgacgagaccatggagaaagcaatatatcgaggtgtcctcttacactctctgtttttctctatctttttcatgtttttctcatatctgtttttaaaaatatttatgcaggtaatgtgggagattaaaatgtatacgcacacatgattttgttaaagtatgtcttactttctaattatttatcttttatgcaaagtaataactaataagttaagctttttttacctctctatatatttataagatgagtaattctgattgaattttttgatagggattacggtctttttcttgttaatttgcataaacgcgatgatgatttataatttgactactatcttccaatgaacaacaaaattataaggtatgcaatattttttcttaaatctgatcgatagattctctttcactaatatattgagattgtgtaaatatttttgactgtagtttagcttttaatatattggtattgttaattaaattaattcaattttaatataagttcttattaataattcttttaattttttcttctataattctgattttgataaaatttatttttgtcttattaatttgtcaaatttgataattaatatatatattaataaaatacactaaaccccgacataccatgtatacaactacatatactaaatatacaattatgtattcaaagggatacatcaattctgtaataaattcaatagtatccatgtttcaatgataccaataataaattgagaaacttttaaaatttataaattatacaaataaacatttataaataaacagaatatattaaattcgtaatatatacagaagtgaaactgataaactaattaaagcatgactacgttaagtgattctgagttatttttttttgaagaaaacataatatattaaaagcatttcgtttttccatttacttaatgcaagcttttttaataccagtggagaattatgtaatctattctttttttttcttttttttctttagttatgagttttaagtatgaagaaagacattttccaattattatttgtcaaatttataattcacttacatgttaatgacatacacgaaaatatacaaatcttctatgtgtacaactacatatacaaaatatacaattacgtacccaaacgtacataccaactatagacatatattttccatgctacaaactgaggaaactacatataataaacaaaatatggtttgactagagtaaatatatttagttggtaccaataatacatgataaacatgtttaaagataatgaaaatatagtagagtttctgtaaaatacacataactaagatttgatgattgattaaaccaaatataccgtgcgtagcacgggtactgacctagttaactctctaataagtaaaccatatgatatcatttttctccttagtatgactaccacatagagtcagtttcttgttttctcagactataaccttgagttgcctgccccgttggatgtcttactcttctatgactatgtcatgaatatgagaatgtctttatgatcatgcttttttccacgtctttttccaatgatttgcctgaatgaaaataatttattatacacagaaatgtatttgatttcaaaattcaatttatgtgacctgaatgacaacaaaattcccgaaaacaaaaccaaaccatgagatgttttaaccgttctaagttttgtaacccagccggagcatgtccaatgctccaccttgttgaaaagatatattaatatcatttttttgggccaccttttttactgcaaattaacaattgtttggctatatactccaaaatatgaaaaacaatagttgttttaactacttacaaatttgaggtaactccatgtattagctattaggaggtcaaattattcaaaattataactcaaattttcacgtttgcaaattaattcctcaagttttcgctaccacgcaacatcatgctaaaaatagtcaacgttaacttctacgttttcttatttggcgttgacttttttcaattgtatagtcaatttaaacttcaaaaatttaatgtgcgcacacacagttgagaaattaataagtcaattgcaaatatttaaggaataatgaataatttccctatctatttggtggtttaatctccaacttatcttttggagaatcttgtttcacagttattaactttcactaaaacaaatgagttctttctaaaataaccttttaagttgtaacctaattatagtcatatacacatacaaaaaatctacaaaattctatattcatatacacgacttttgctttctttcttctctaaaaccatcatctttttgtgtagtgaatttgagtgaaattaactttgatacgtcaaaaataattttatttttattcttgagaatttgctaatcttgccattaaaagtatttttgggatatctaaaaactaaaaaaatgaagaatctaaaataatatttgttctacaatatagagtaatctctttttcataacatcttttacaaagaagttacaagcaaaacttgaaataaatatgtggaacagcgttatcaaaatacatggaatgcttatgatgtttgctacataataatttttgtttgttacacattacttgatgttttcatttttcaatgcaaaattaattattttatttgtttttaatcatttatattctgcgctttgttgtctaaatagtttttaattaaaaaacattatgttttaattttgtttttaaaaaaaaacacaattggtttcttaatctatttaatcatcactaatattgaaacttaagaagtaatgttaaaacaaagtagccctatagggtttttatagaaattaatgtaccgttaagtaatagatttcagacatcattgactatcaaaaactaaattttcggacaaaaagaatttcattactattttaaatttgttgatgttaaagagaatagattggctgaagtgattgatgttaagctgaaaaacaatcacaaccatggaaaagtcacatcagcggcaagactggctagtagttgtgtgaggatgaaaggtaaaaaatggccaacaatggcgaagtggctgtcgaattggagcacattcgctcattagcgtagtcgcgtttttttttgtatttttttttttgaagaaaagtaaacaggacctagtgtgactgtgtgaggtcattgattcatgctgatcttcaagaccgatcgaagtgtagcaaacaatcatcctgcatgcaggcatctggttccttgagcagtctccatagctttgatttgcgtttgctcttgatttcaatctattttcacttattatactttaaaagaccttgaaaactcgaaaccaggaatattgaactgatcagatcctggaccactgcaataactgagttcatgtacgtacaaaactaatatgtcacgactaggaatttagcgtcctcgtgagattgagagagacacgtatggtgtcaattgcccgaaggtacagtattagtttgaattgggcaacaacaacaaaaacgtgcgttctctaatactcacttctctagaaaacaacaaatatgataacgtaacctcctttgcttcttttcttattaattaagaccactcgtaactaataaagatgatagatcttttatataaaaaattgtattcgtcaatgctcttttatgaaaacaatagttcaactacccatacttgcatctattagctatctagtattctcatattattacaaacattatgcagattggagataattaccaacatttctatataaacaatccgaatttggtgattataaatacttaattaccattctggaagtaacaatataacaggtagtatctatgttattttggcatgaaaggaaatgatcttaacttctcaaagtatatttcccacttttctcaagaagatcattaataaactaatacctcttcttggacagacatttttgagttatcttgtttttgtttcggtcactagttaagaaaagagaagaaaactcaacataccattttatcacgttatagccatgttcgaattgaaaactaaccacctaaaactagaggatatgatttcttatctattttttggtttcattttaagcaggaccaaaacctaaatggccggttcctccaaaactagttatattttttttttgtataattgcaaattcataaagatgaaaagagctgcattcttgggtatatacatgttaacatatctttctttagatacagtggtcctcctatgcatcacatgcaatatcgggtaaggtcaaaaagatattgaattgtccacaacacataagaagttaagatgtcactcgtggacattaacgtcgtagagtacccatatattcccatggaaattattggtattcgtaactcttggatatttttaaacgttgttaatactttaataaaatatattatattgtctaccgaatcaaacacagctgtatcaacaaaaataatttgaaacttgtataaatagatgaagtggatatgagaggaatgtaagccttatagaagagaaaaaaaatatgtattgtagagagtccttgtcgagtctccagactttgaacgtagcaaagagtctcagctctttgttccctaaacaatcagctctcatcaacccgatctccgctggacgtcgaaacaacctgcctcgtccaaacctcagaagacgatgtaaggtcaccgcttcacgggctaatattgaacaagaaggtaacacagtgaaagaacccattcagaatattaaagtaaagggatacataacggcccaagaagagtttctggagggcataacttggtcgagaggtctcgatgacattgctgatatccgcggcagatcattgctcgtcgagcttattagcgccaagactgaccagcgtgagtacaccttttttttcctttaacgattttttcaatgaaatttaaaataaatagatacaaacatttgtaataaaactagaggccttagaaaagtccaaaaaagcaattgttaccgatctatgtgcttatcaaagagtattaaagacatggaatttttttggtttgtaaaacattacaagttgcgttagtacataaatttatcaaacattagcttatgaaataaaagaagctagctagcacatcaagagtctgtatataaatttatgaaatgatataaaagtaggttaaggctatcaataatgttaaccaatttatacatatttcagggattacggtagaagactacgcacaacgtgtatgggccgaagcccctgatgagaagtacgagtgcgagtttgagatgcctgaagactttggaccagtgggagccatcaagattcagaaccaataccatcgacagttgttcctcaagggggtagagcttaaattacccggcgggtcgataacgtttacatgtgagtcatgggtggcccccaagtccgttgacccaaccaagcggatattcttctccgacaagtcctacttgccttcccaaacaccagagcctcttaaaaagtatcgaaaagaggagctcgagaccttacaaggcaagaaccgcgaggaagttggtgaatttaccaagtttgagcgcatttacgactatgatgtgtacaacgatgttggtgaccctgacaatgatcctgaacttgctcgtccggtaattggaggcctcacacatccatatccaaggcgttgcaagaccggtcgaaaaccttgtgagactgacccctcttcagagcaacgctacgggggagagttctatgtaccaagagacgaggagttctctacagccaagggcacttcattcacaggcaaggccgtactggcagctcttccctccatcttccctcagatcgagtctgttctattgagtccccaagaaccttttccacacttcaaggccatacaaaatctctttgaagaaggcattcagcttcccaaggatgctggcctcttacctctgctccccagaatcatcaaagctcttggcgaagctcaagatgatattctccagtttgatgccccagttctcattaacagtacttacgaacctctatcctttttctcattttagtatttcaattttctgtactgttgagactacaactaaactcactttctaatatcattcacattgattcaggggatagattttcatggttacgagacgacgagtttgctcgccagacacttgccggccttaatccttatagcattcagctagttgaagtaagctacatactaatagtttatgttctgttttttccaataaagaaatatctcttaatgtctaaaagttgttgctagtaaaacatttggaaaaaaataaaaactggttttaaagttaaaaacccgaggtaacgttagggcctctccaacggtactctaaatcctactcgaagtaacattacttgttaatcttattttagagtatactttttcttaatatataaagtttaaaattcatttgtgggagaagtataagaatgatgatgatttaaataaatatgtattaaatcattggaaatggtttaaggatgtcaataatatttatttaattccaggagtggccgttaataagcaaactagacccggccgtttatggtgatcccacctcactcattacttgggaaattgtggaaagagaagttaaaggaaacatgacagttgatgaggtaagttaataataacatgtttttgaaaaaaaaacgcatatgacggattatttgcttaatgaattatattatatatttgtatgcaggctctaaagaataagagattgttcgtgttggattatcatgatttgcttctaccatatgtgaacaaagtgagagagttaaacaataccacattatatgcttctagaacactattcttcctcagcgatgatagcacattgaggcctgttgccattgagttgacttgtccaccaaatatcaacaagccccaatggaaacaagtcttcacgccaggctatgatgctacgtcatgctggctatggaatcttgctaagactcatgctatctctcatgacgccggttatcatcagcttatttcccattggtattggaaacacactctttatttcaaaatagatgatcctctcatatatggttttttcttgacagaaaaagtagtttaaatttttggtacctaatactttatacatgcatgtgaaatatcactaactaggaaagagatgtataaattttacaggttgaggactcatgcctgtacggagccatacataatagcggcaaatagacaactaagtgccatgcatcccatttataggcttttgcatcctcatttccgctacaccatggaaatcaacgctcgtgcacgccaaagtcttgtcaacggaggtggaatcattgagacttgtttctggcccgggaagtatgcattagagctaagttcagccgtctatggtaaactatggaggtttgaccaggaaggcttacccgcggatctcatcaaaaggtgtgtttgtgttttttttcctatatgtttaaatattacaaccacaattacattaaaaatctaatcaaatctttttccattaaaattttccgccataagggggttggctgaggaagataagaccgcagaacatggagtacgtctgacgataccagactatccatttgcaaatgatggtctaatattgtgggatgcaattaaagaatgggtgacagactatgtgaaacattactatcctgatgaagaactgatcacatcggacgaggaactccaaggatggtggagtgaagtgcggaacataggccacggagacaagaaagacgaaccttggtggcctgtcctcaaaacacaagatgacttgattggtgtggtaactacgattgcatgggtcacctcaggtcaccatgcagctgtaaactttggacagtacggatatggaggatactttcccaaccgaccaacgacaacaaggataagaatgccaacggaagatccgacagatgaagccttaaaagagttctatgagtcgccagaaaaagtgttgcttaagacatacccatcgcagaaacaggcgaccctagtgatggtcacgttggatcttttatcaacacattcacctgacgaagagtacattggagaacaacaagaagcatcttgggccaatgagcctgttatcaatgctgcatttgaaagattcaaaggcaagctccaatatctagaaggagtgatagatgagagaaacgtgaacattactctaaagaatagagctggagctggtgttgttaagtatgagcttttgaagcctacctctgagcatggtgttaccggaatgggtgttccttatagtatttctatttgatctatgcattttctttctcaaaaatgctttcattaattttctgtatctctgtcttcttgataaaatgaataaaacaaatgctcctttgtctcctatattaatctcaaacagataaagctgaaaatcccaaaaacctcttagtaattcaaaaaaaaaaaaaatagctgaaaagcaaatctctatttgatcaattaattcgaacgctcaatagtatgtaagaagtcatttacacagtacctcggtaagtgtttgagggttaaatatttgttgaatttttaacatcacactaatttagagtataatctaaattataaggtatacgtatgaaatcatagctcaatgatgatagaattcgttaattattctcgtaaaagtgaatatttgatttaaaatgagtcaaaatatatttgatttgacgaattctaaaagtgttccgcttgagttatagaaacatgctcaaaatgatggtgatgacttttttttagttctttatttgaaaagtcagtttggaaatgaaaacagtaaggctgaccaaacaatatacagtatgttatccaactcttatccgttttaagaaaacaaagtatgtgtaagagtcgggtaatatgatatcaggttatttctaaaccatctgtcttgtaacccatcattttacttggatatattttcttacatacaaataatttattataatagtttagacatgtcaattggactagtccagtctgacaaagtccagaaaattcgaatatattttatttagtctggttcggttagtaaaaattttgaaataaaaaaatttgaacttatatttcaagatctggtaataacagggacaagacttttccaggttttttatgtttttctttccagaaaaaaacaaatttataatttataatatttctgaaagatggatatatgaacaaaacaaatcagttgaaatttaaataaccatgaaagccagtttattttcaaaaaaaaaggtttaaaatcaaaaaaaataatctaatttttttatttaaactcataacaaataaaatataaaatcagaagattttaatctagacagtcgagccaagatttgttttttagatttatagtaaggcacaattgaaaaactaggtttagggttttcaatactattaaaaaaaacaaaaacaaatattccaattaaagaaaaatattaacaaaagaaaagtaaaaaaaaaaattaaaatttttttaggccggcttgaatctggtgggattaagcctcaaaaactttttatcccgaatgggttagcttaagggaattttctggatatatatttttaagtctgaatctctattttcagaattgatagtccggggaatttgaccctaaatgaaatatagtttgataaataaacaaatagacaatatctgaagaacaaattaaccgtccaaaaaaaaatatgcgaactcctatccaaacacctagtttaaaaataacaatataatattttaaataacaatgttggaatatcattaatttctaaggaaaaaaactaaaaccttaactttaaaaaaattaaaataggataaaataggactatacttgtacagttgtatcagtaaataataatttctgtaaactgccagaagaaaggtttattttcctttttttagtggacctatcaattaattattccaatataacttctttttttcaggtccactaaatatattttctatactacatattatattacatgataatatttcattctcaaatatacctatataaatttaagatttcttctatttaccaattagtttaattattagtttgttacaccattattgttttccatacataacataaatagaaatagagttttctgtaacgtttctatataatccaagtgaaacaaacatattttccacttccatttacaaaagaaaaagaaaaaaaaaacagagaaaaatggattcgaaaaatggaattaacaacagccaaaaggcaagaaggactccaaaagaccgccatttgaaaattggtggccgtgatcgtcgcattcggatcccgccgagtgttgctccccaactatttagattgacaaaagaactcggctttaaaaccgatggtgaaactgtcagttggctcctccagaatgccgagcctgccattttcgcagccacgggacatggtgtcaccaccacctccaatgaagatatccagccaaataggaattttcctagttacacctttaatggtgataatattagtaataacgttttcccttgtacggttgtaaatactggtcatcgtcagatggtgtttccggtttctacaatgacagatcatgcaccttcaactaattacagtactattagtgataattacaattccacctttaatggtaatgctaccgccagtgatacaacatcagcagcaacaacaacagccacaaccacagtttgagcttgtgaaggaggagacggcgtcgctgagaaggccaatttggagtctttaaaataaatattggagatttaagagtgttcagttctggacgttttagttcgtttctgtttgctttttctttcctcttcatgtttttcagtttgagagttgaactagggtttgttttagttcgatcggtatccatttgtctttttttcttgtatgctcatgtttttttaagatgaataataatacctaaaattaattatagatgtaatttaaaactgtttgtccatgtttgaagtttagtagagaatttgatttcaacaatggattaaattaaactcttcacaacaaatttgattcattttttcttttttggacacgaacaatttcgttggtattctagaataaataattctgtcataatatttaccgaaacataacttttatgtacagttatttatttccgttttctaatttgtcaaaattcgtttgtctttcgaacctaaaggttccaacggttatgaaaacattaattaaaaacggatatcaaaaactataatataaataaattaaagagataataaaaggaacaattgagtaagaatgtggttttatatctgttaaagaaatttccagctcacacttagctggacaataattatttaagatttgtttctgtatttagcttcatacatctattttaatatttcttaatacacagatatatattttaatatatatatatatatattattttcaagattctcaaggaaaaaaaaagaaaaaaaaaaggaaggaaaactaaatctaaagaataagaaactaatttttgtgtaaataaaaattactttaataaacttttaatagttttcccttaaattcttttactttatagattggttaatatgtatttagagaaaaatactatttaacctttatttagattaaaaaaaaaaacttgagtaagaaaatggtttaaaattcttaaagaaaattccagctcactttaagctagaaaaagagattatatagtttatagtataaaaataaatttaatcataccatgtttaataaaatttgaagaaaaacttattttctttttccatgaataacaagatttttcttaacaattaaaatttcttttagcaacatatattaatactttagttttctgtttttttgttggacatgggttccgccccattccaaaaagcccggcccaaatatagttaggcccataagaaagagacttgcgtttggtccgttacacaagctcagcccattaagtatcgtcaatttgctgggagcagaaaagaaaaatcatcccgagttcatgaccgcatatatcttccctataaaagcggaaaaacactgtcgagaaaggatcccgaatttcacgctgacacatatgtagagagtacatgtaatctccttcgtacaagtttccccattgagttcctaggaagcctttttttaatcgttagtacgtacgaacatctttcgaaccaaacgccttgtccgtcattcttgcacctttattcaaacgagttggatacattgtcttctcggattgtccttgtaaactcgtaccttcaccttgtataatcttgtattcgccaaacctaattcgtcttataagagattatccgtccttctccttaaacctttacatgaattgtatgatttgagtatcaacagtttttgtttagggaactacggtttcagcttcaagcaactctgacggttctaatggtcatcgatggccaaaaaagtgcaagaaagtatttttcaaaatagaattactcagttatacatagggaacaaaaaaaagataatacaataatcgaacataattagacattcttaataaagcattaagaggttcagatttatagaaggattgcctcatattcataggttttatttttataattttttttttctttaacatctatatattcatattgatatcgttttcgcgatttcttttgagttatccaccaccaccacctcctccattattttcgcctccaggtccatagttgtagaaatcttgtcttgggatataatggtgattctccacgctgcttcttgggtgctctattttctcagtagagtcttcttctttccctatgatcatctctcgggacactttttcgctttcttgattagtttcccggggaattatattccttgcagccaaacatgagcttataatgaccatcatcaccataataacaaccacaacatgcttagagtttatccccatattggttttattatgagctgcaaaagaaagaaagaatagtctttacataaacagaaccttgaagatcttagtatattgacatgaaatgagtataacttacctttgcaactaatcgtaacaagcgttgatgggtttagttaagtacccttaaagggaaaaagataagagtttaagacattgatatttatacatgcaggagaatagggtttttgttatggtgggttgactatttgagatcatattttaaaattatacgatttaggtacgatgtgacccccggtgcctagtggtgagacaatcacaagtgggagaggcctcttattggagaattaaattttttcttaagaaggaaagaattgtgatgacaaaatgatgaagttggttgaaaaagggttgtctattattggcactacgaatagggaaaacccacgttactttatggattagcattgtattaagtggtgcttttacaaaagtgtaaaagtaactagattttatcccgcggtatacaatttatctttttaaagttagtataatattttttttgcaaattgtatctatttataatatatttttattttatagtttacaattgttattaagtaacgtcctgccaaacccgtcccgccaaatccgtcccgtaaaaaaaccatttatttatattaatgttgatcttattaaagatatgtttataaatcattgtctaaatatttttgtcgatgcgggacgttgaacccacacattttttgctaattggttaatatatgttcatttttaaaattttgaatcataaaatatgacggaaaaattaagatttttttaaactctatatattatataatgatgttaaaaaattgtaatatatcaaactttttataagtttaaatattaataatgttttataaattttaaatatataaataataatatttaaaaaaataatatttttgtttataaggtaatgacataataactctaaaagcaaggatttagaagatttaaatctttaattaaatattttcattaataaataattaatgtcagtgacatgacattgtaaataaattcaaatacaaaatttatttatttaaacaaaaaaacgtttagtaagaataatatttatttaacaaaaaactttattttaaaatattgttaacaaatatgtttatgctaattttaagggattgatttgaagtttggtaggattaaatttgattcataatatgattgacaatttaaatcaaaaatttaaagtaaaattaattattttggaaaaaagatttaatgctaatggcattagattgtaaataagtccaagtgcaggatttatttgctaaaatggctgcaaaaatgtatatatagattaaaacttttctaaaacacctgagtgattactattcgtgcataggatacttttcgaattgattttttgagatttgctcggactaataggtcgtcaaaggaggcattatttcccatattccacctcccaaagaacatattctagtacgacatttgttaccgatcatcggaggattaaaatccatttgttctctggttgatataatcgctaccctaattggttcactaaatatccagcaaaacgacattttcaccaacacgagttgaagatgtgtttttgtatactagaaatgtctatgaagaccaagtgtcgttagctaaattggtaaaaaccctgggcgaaacttagaggtcgctggttcgagtgacgcttgggacaaaattaatattacatgtcgtggtttcgggcctaggaggattacgggtttcggcccaaaacctcttagtattcgaaaaagaaaaaaaaattgtctatgaaatgactttgagttttgcccctaagagacactataatgcggatccaatgggcgggactaacaatgtattggtcctttcgagcggtcgataaattttaacgtcttgatcatagagtaattttggtgagacttgtctacatgttgcttctagattggaaagaggaaaatcactcacataattacgatgaaatagattagatattcgttttcagaagtttactttgttttagtgcaaagagaaagtaaatgttagcacagtgatctttcttccactacaaaaagttggaatccaattgattcattaataattaacccttgaaggaataaattataaagtataacaaattaataacagattcctggcttttggttagtatcaatgggtggcaacttacattaatttatattagtaggacagtaaataatccgaccatgctgtaaacatttcaccatttgtcatcatttcagggttctatttaactttgtgaataacaaagtggattcaatttatatggtagaatgaatcatcaacttcataatcctcttgccacttcggataaaattatatacaatacaaataaaatacaaaatcatctgaaatagaagcatttagatatacattaaaacacttttcaccctctatttcgtcaaggatgacgttttactgattttctaaatacttgacagcgtttctaatttggttacaagaattattactctttttctgtcaacaaatataaagcatatatacaaaaattgagaaagatttgttgccgagaggatagtgaagtacatcgtaagttaaaacagaaaaagaggtttctatggattaatcaagattcaagattcaacaaatatgaactttctaagttagttcacaaattgctgcaaaaaaataaaaaagttagttcacaaatcaattatgatagataccaaagagctaaagacatatgatgttttagagagttttttttttttcattagatgggatgttttaccgccttttatgcaatgtttattatctcttttaacgtaaaaaacaaatataatctctttctttgcatgtaaatttcattaaataacaacacgataattctgtttatattacatatacattcgaatcaaatactaaattcttatctgtgagaataaagaatctatgtttccatattattcattgtccattaatttcgttttttgcttaggatagtattagtacaataattgttctgaataatgtatatttttatttttaaaaaaggataatataaaaattagatagattgtgtcaaatatttttttatccaaaattcttaggatcggacctaaccggatgaaatttgattaaatcaaaacacgaatagaagccgagccaaatcaaaccattctcacaccccaaacaccgtgaaggcgtgaaccaacctaaagtttgattaactccgacccaaatccgaaaacactctgagagcaagcccttctaaccgtctctagcttcgcccctttgtgtaactcggtttaaattcaccaagccgatcgtaaacaaaccttgttaaccgaaaccaatcatagaaagagtatctgaaatatgccatgcatgcatattagttttattaccttttttattttattattttggttaaaatctttcgaccggagaattctaaggcaaagaaactatccacttcccttataactttatttaaattctatttttgaggatatatatatgagctatatgcatataaagtcaacttttctttaagaaaagaatgtcgggtcgtgaagatgaagaagaagatcttggaactgccatgcagaaaattcccatccctgtcaacgtattcgataaagaacccatggatttggatacggttttcggttttgctgatggagtaagagagatcatagaagattccaatttactagtgagtttccttcaactctccaaaacatgttttggttttgaataaaaataaaactcatcaatgttctttttaccatgtagcttgaggaatctcgagagtttgatacaaacgattccaaaccgtctcgaaacttctcaaatctgccaaccgcgacaagaggtcgtcttcatgcaccaaaacgatctggaaacaagcgaggaagacaaaaaagactgtctttcaagagtccatcagatctttttgattctaaatttggcattaccgacaagagttgttcacattgcgggacgagaaagactccgctatggagagaaggaccgagaggagcgggaacgctatgtaacgcgtgcgggatgcgatacaggacaggtcggctacttcccgagtaccgccctgcttcaagtccggatttcaaacctaacgttcactccaactttcatcgaaaggttatggaaatcagaagggagaggaagtcatctcctccgaatagcttcggtttctcggagtcgtatcattcaactaggaaattagggttttgaactactttgtttttcttttataagtgtatagataaaacatgatattttatgtaaatgagtttttttttttttaccatctaaatttattatatattgcaaattatgagaactgttatataaacgattttatcacggacaattcctttcgactctcattagatccacgacagacgacacctccttctcctttttcttctccatgctcttgatgaacacttcaatatcttttctgcgtagaatcctcgcgaattgatataattgtacatcgtgtgaaatctccttcacacttgcctccattaatttatagttttacttttagatgagtttaaagacaaaacaccaaatcatatagtacaagtttgaacgataattattttacactttatagcaatcgtcttttcattattgaatagaatttgatgccttgaatctagttctgttcttcaatcttaaattatgaattcctttttctattatttcctttacaaatgtaaaaacctacaatttcagccactacaattcacatgatgaaacaattttaagaaaaacaagtaatcttataactaaagaaaacaagtacatatgaagaaacaatttcaatttcaatttcaatttcaatcttataattcttttaaacaaactaaaaaggataaaaagcaagtaatcttataaatcagataatctcaaattccggaagcatcatgccctaaatctcaagtctcattaaataagacacataaaatcacgtaccagaggatttagttgtagtagagctcgagacccatgccgtcatggatttcgtagtccttgagagggatatgatccttgtagatgttgtaccatttttggatccgaatcttttcgggtcgggttccagtttgggccgccacaagcttcttgagatctccgatggtgtcttcctcgttgcacttcactctcaccttcttcccaagccgatcattaagcaccacctctatcatctttacgattcttcttctataaccaccaagacaaatattctttctttcttctactccagctagggtttggttttatggcccatgggccaaaagaattttggataataatatatttttttgttttgatatgaatatagtaaatttagaaagacatcagataatacaaattgcacaatatattattgggaaaaatgtcataaaaatcatcggtttgccaaaagtggtgaaacaaagcactaactttgggtctcctgaattaaattatcaactttagttgactttcctattaaatcattaactttcgttgactttgccaaataaggcatgtcgttaagtcaactggcggaccaatttaacagaactaagtcaacgtttacattttttatttaattctaaaattttttatttaattctaaaaacgacttcgttttatgttttttataaaaaataataattccaactgcaacattggaaagaatcgaaccagtgaactcgcaaacatataacgttgtactcaaccatcaagctgaagtttttattgctcaatcaacacagacaaatacatatatcctctacagacagacgaattaaataaaatttactcatattcgaactacaaagcttggattcgaactatacttaactctcaaagaaaaacatgctatttaaccaactaaactaaagaatttagcatgaaaaacacaaacaatttttccattttggcagagaaaccgtggatctagaacttgagaatcgatagtgatggtaaatacgtctcgatcttcaagcttgagaagcgtaaatctcgatcccaagccaacgcaacaattccaattccaattctcagtacgtaacaatctgacgggctccgttctattcaatggttaaatctttaactattggtgtatgttatatatttttctgtgtattaaattatgtaagtgtacttccgcttggtggtttagtaattgatgtaatgtttacgatatctcgggtttgaatcctaatggtgtcttttcttgaattgatttttgtcttttttgtaaagacaaaacgacgtcgtttttagaacttaataaaaatgtaaacgttgactaactctgttaaattggtctgtcagttgacttaacgacgtgtcttatttggtaaagtcaacgaaagttcacgatttaatcgaaaagtcaactaaagttgagaatttaattcaccagacacaaaattggtgttttgtttcaccacttttggcaaactgatgatttttatgacaattttctcatatattattacgggaaaactctcaagaaaactccaattacttttactttggatgtttaatacaaactttttcggttagaaaaaaataatacatattctaattatagaatgtgatttaatatctaaaccattaaatgttgttatttaattatttttttactcactattatatttcataacatacaaaatatcaattctactcttaccatcttaattaattattaatatttaaatgacatggcattaatttgtatttttatttgaattatttctttttggtaatatttttatttttaaacaattactttgtttttaaattcaaattaaatataaaaatagaagaaaatcttttaaaacaatattcttcaattttccttttgaaaaaccttattttatctcttaggtgtgttttgttttaaaggaaagtcaaagaaaaataattttaaatattttcttctaatttttgtattttatctcttctagatatgatatgaaggataaaaattagaatttttgaaaaggaaagttaagggaaattatttttttgaagattttcttccaatttaatctcttctagatatatctcaacgatataaagatatagagtttttgaaaaggaaagttgaaaaaatttaattattttttgaagattttcttccaatttaatctcttctagatatatctcaatgatataaagatatagagtttttgaaaaggaaagttgaaaaaaaatagttttttaaggattctcttctaatttttgtattttatctcttctgattatctcttaatgatatgaaagagatcaaattagagcttttgaaaaggaaagttaagaaaataattttttttattggattttttaccatagctattgtttagataaattttcatagaattgtattcagacaacaacacagattgacgagagaaagaaaaaatactatattgatcaacaaccttcagctacaaccatcttggacgacaatgcgtgtttaaatcatattgtttctagcaaggtctaggtaatacgaattagttggtgaaacacgacccgacccatacccaactcaaaaaatgggtacccttttgaagaaaacaaatacccgtcagataggattcttttgctaatgtagatgacattgagacgagtaacggatatagcttcaaaaaccatatccgttagacattaaattcagagtttttattatccacgaacgtgcaaccctcacgaaagtctttacaacaagagtcccaataatcaaacgtaataagaaaaagtgagtaaaataaatccttgataggcataacaaaagcatccataagaaacctaaatgagcaaatcagtcacttggtaaaatatgcaaaacaacaaaagatgacttagacttgaagacttagtagtagtactgtacattcacacgtaccttcccttccctgtctgtctctgttcgggaatcagtgatgtcccacgtcatcaatcattcagacaacgactgtgccacgtcattcaactacagtcacctcctgatcaaccttccagtagttagtgtcgttgtactcctgcatactatcatcagggctctcctttcccggtgaggctgtggtggtgttcctcttcatcggtcctgcttctcccactatgccttccttgagagcttgatccattgccctttcagttccttctggctcaactcccacaaactcaacatcttttccaaacaatgaaggtacaggcggtgatctcgggctaatctcaccttctgaggatgaagaaccgtttgggattctcacatcaggcatcttcacatcatctgtacttcccggtgcaatggctgaagatgaatcattacgttcaacccattcaggtgacaattcatctgtacccacatcttcatcaatctcgatatcagcgtctacagagactgcttctgaggttgaggctgtggctgcagttgagtcaacaaaagggttcttgctttctgtaatcaaacagtcttcgtcttcgtcttcttcatctccgccatcggaagtttcattcaagcttacatcttccattgcttcctcggaagaaatcgctcctgttcctgtgttttcgcctaattcatctccttggaacgtgaaccagttcgagttggtgaataaattgctgcatcaagaaaaaaacatttcattggtttttggagccctttgttcttttctacctaatacatggatttgataaactagccctgaaagcttacttcgcttgttcatcaccaagccttagagatgatataacaacttcagcagattcatcatcaaaatagacatcctacagaatatgttacagtcaggtctgttgtagacgatgttttctataaacgtagaacataatatataactataatgaatacctcttcatctctgtcattagaaccatgctcctggaacgagaaacatggaatttagattcagccaaaattttaagaaataaatcagagagattaacaactacctctccagcaccattgttctcttgcatgttgtatctgaactggttcaagttattagctaaaccagcaagatcataatccctatcatggacttcgtcatcatcactgtccctagtcctatcatgtaatgcagtcgggcgtctgcatgcgatataaagtgaattatcattaagagacaaaatcggaactagatactgtgccaactattgtcaaacctgaaagtgtttggaccaagtttcctattatatttctatgcttttactaagacaacctagcaaatatattctgaaagtgtaaatactcgactgatagttgcatcaatagtgtgacaagaagccataaatgtttgatcagaggtgtacccgcaaacccagcgatacacattctcaactgcatttcgatcatgcaacgtattagcttcccactcaccccaatcgttattttcctaacaaagaaaaacagaacgtatcagaatgttgtatgtaccaaacaaaatgcagctatacacgtacacaacatttgacgtaaaaccatgcctaaatattagaaagaaaattagttagacataggatatttcattatggacacatcttgatgggttctgtaaagagaatacaaagtaatttacactgtttttactccaacgagtacataacagagtgatacaatagagtagatattgacaaacaccaataatcacaactcaaatcaatttatgtagaaagatggtatactgcagataacagtaaatctgcaatcattgttacaataaaaggttactgttactgaaaaacgaacctcaagtaaagtctttatctggttactgttagttgacagctgaacaagcttgtttgagattcttgagatatgaccaacattccccacccgtggagcctgctttccagcagcagctaatgttggctgcatgaaagcagaatcaattatatctataactcagtacaccttatccttaagaaaagtcgagaagtggatataacaggccatttctgaatctgattttaaaaacaaaaagaaggtataacgataactataattgctttgcaaaccacagaatccaaatcttgcctcacagaactgatgacagaagtagttcaacatcatgtctcacagaacatggtaaattgtgtattatctctctagacaaactttactcataagcatgcgcaaaacaattcatacctgcttatcaccagaaagaattggctgtttctctgttttaataatttttccaatcaaatcacactctcggagaagatggtcaactatctcatcgttcttgctttctaaacacgataaaattatactctccacctgatgatgcagagcattattatacgggtacctgcatagttggaatgaacaattgaaagatgaatttagccaagcgcggaataacaaagaatttaaaattttgtaatcgatccagggagtggagtgtatttactcaaagaacagatcaaggactcttctaatagctcctgagctagctagttcttttcctgttgcttcacttcgagttttcagcaagacagcaatgaactccacaatctaagcaagccatcagcaacaaaaacgaaatcagaataatattacacaacagaaaacacacacaagagtatatgtgtagatccaagatccaccttataactaaaccatcttccagttgacaataactaaaatttcaaaatgaaacctgaccttcagacgatgactgccaagaggaggcctcaactgcccataggttgtaggtaaaatcttttcatcagaggtcacatttaaaagtgcgacaaagtcacctgcaccacagatgaaagccaggtacgaaattcaagtcagtggtccaatcacataaagaagtggagtcaaattttaaattatatatgttcaacaagaatgaaagctgaaatatatccagctagaaagatcaaataatatacgcagaaactactattaagaaaatggaatgatgcacgaaattgcagcaatacaataataaagtagaagataatcattgatttgcaaacatttattgacagtacagaatcagacattaatcaatgttaggatgaaccaaaaagatagaatcgaatcctagcaatcagtaaaagagctaatacaagtgttctgatgaaaaatattcagcagcaaaaacaagaatgatatgatcatatgcactcatgtacagaacacaatgtgtcattttgttacactgaccaagtctaggcagcatggtggcaatagtctccggattcacagaaattggagactcgaagatttgttgtcccctgaatgaatacataaagggggaagaaactacagatcttcttgggctcaacaatgaaatgcacaccgaaagtgtgtggacaaggctagatttggactgaggatcttcgaaagcatgaccaaatatccttgcaacaaaactgcaaacaaaaaggtcactgaatcatcatacaatttaaacatgttttagcatatttaagacaataagacatcctacaaaccttgaactagaaagtttggtagccaacggtgacggtgcattttgagcgatagtgcacagtgtttcagcagcatttgcatgaacttcaagagagttctgatccaagccaaaaataaaaacaaaactttcagaatattcatatctgaactattcaaaattagaaaatgtaagtcttattgtttgaccgaaataataaccacacatgcagagaagcctctcaacactacatttacgaatttggtagtagggaatcaaaaaccgcatcacgaataaaacagagatggcaaatgcaggagagtctctccaactattctctactagtctcttgtcttataaaggtaaaacaatgtgctttttcgacatgaagaaccaacagatcccagttaatagtaaaacaataataacgagaagaacagaagtggctcaaaaaagctcattcttcctatatttcaatcatttgatgaatagacgctttaacaaattacttactgatgggctaagcttatccacaatcatttcaagcagattgctatcagctaaccattgcatcacatctaggtggttaggatacacatgatcatccgcaccaaccaaccggataagaacctatataaatcacatgcataagcttacaagtgattaccagaatcaaatataaggataagaggagagagaaggtttacctccataatggacgtgatccctatcaaatcaaccagttgctggaaaacattctgatgggcctgtatatggtattgtaaaacattatttgcttcttttctattgactgcacaccacataattcactgagtaacaagtataaaaaaaaaaaggtgcacctcaataatatgtcaaactattcaaggattttctacctaaaccacaacgtcatttatatcgacatagtataattatcattaacagtaggtcgaagaaaaatttattgagcacaaaaaattacaaggactgggaacatcccacttaatatgctttctgccacacaaattttattttcaatcagagcttcgcatgatcgttgtgctatttgcaagattttcaaatgaacatccaaatagagaactcacttttacatagttcatcagcgggaccgtcttcctcaacatgaggcatatgacaacctattcccagaagagacaagatacattggtggtaagtaacaaacatgtggagacataatatctaaaaagtaagaactaaaattctaaaatgaactattgaaagtgaccaatgaaaacattaccttgctgaaatacccagctagcattacactgtgggaacggttgggttccaaaaaggagaaaagtaggttcattagctgcaacaagaagtatgaaccattaagtgagaccagagtaaaagacacatctaactcaaaataacaaggttctgcattcatcataataaaggaagaagaaaactaggacaatacctcctcctcgtccactaaagtcttgagaattacatcaatttcacaggtcaagacttcagaggagatgaaaggaaacctaatagaaaaatatgctttaaagttcatgaaagttcccagaaatattccaaaaaatcaggtcaactgtacgtctggataaagctaatcagcaaaagaaaggaggcacatacttgaaagcgcgcttgctgtctgcatcttcaggagattcttcaacaataaaacgtaataactgttccacttgggctctttctctcagactgcaaatgagcatataaaataaaagcataaaaggccaacattgcaatccttgctactactatgagaaactaaaacttgcatagcataacagggtcatcctgcaaagaaaacatgaatctaactacttttcgtgcaatatctgctggattgcatatcctcttcaatctttttaaggaatggttaatatagagagaagacacatgtcatagtacaaactaaaaagcataccaaatctacacataaactacaacaaggttaaaaaaagaggacgcctaaaatgaattacaaatttatgagccggctgttcaaagctctgcattcttggattatgtcttcctcatccaaaagttcttccaaagtgaaatcttccttgtctaatatggattcaacctgtcaatcgcaagtaaaagataaggaactacatcattcctatttagtttctctcttctctaaactacacattaccagcttccaagaacaatttccatcaaaacatcaattacaaatgaagtttataagagatgattacaaattctagctcccgccactatattgaacaatgaaaccacacgaaccaaacatcaccatgactatgaaactattggaagacaaaaatcaatgatacacaataacagtggcgtgaagaaaacaacaaattcgaagcagtaaataacatccgaaatcaaattcagtatcagtatcgaaacaattaacctccacacaattaatttacaggcgaaatcaatcagttcaataacaaacgaaatctaaaacatttcagaaatcttcactttgcgtaagaacaaagcagattcagaaagaaacaatcgattcagaataaaacgatactaagtacgaattcatgagtagagaagactttgtatactcaccggtgaagcagcagagagagcagtcaacttccaaaacatggtgaggatgatgatgaagaagaagaagaagaagaagaagacgagctaattagatctcttatcagagcgaaactcaatcactaaatcttagagcactcgtcaaaaaaactcgcctggaaaaaaaaaaaaaaaccctaatttgatgctggtggtgaagaagaagaggcacgaaatgagaaatcacataatgttagaaagcatccaaaaaaaaaaaaaaaaaaaaaaactaatctcagcaaataaatatatttaaaataaaactatatgaaagaaatattatttgttttagagtatgatgcttgtgactactagttgcacgattggttcgtatttgagagagatacgagtgattagaagcttggtttagtttggattagtgtaaaccgattttgaggttctaatgatgtagtatattttcttggtttaaagtactcgctcctatttcttttttatcaaaaagttctatattgctaacaagtgtaacatcttttataatcccttcaaattgaagcagccaaacgtggttgggcttacatatgatctttaataattatatatagactacaacataagataaataattttaacattacaattacaaatgtgtcgaaacgaaaaataaaatcttcttttagctttgatcgatcaattaggtaagtttgtccctcactccctcttatcatacttacgagcccaaatgttctttccgtaaatcataagctcttttttctgctcgtcatcgagtacgcggtccacggtagtaaccgagtccaagacaagcctcgcaaatagtgattgttgctcgcagctcctatttgcgtttgcattgaaagatcttttgttgtcatgttgcatgtaaactccctcaacacaattttctccatactccttggtaaagagctcaattatctcagcatgagtcactggataaccacgagaaaatgttaaaaacaaggtccgatcgttctcagtggcgatgcaattagcgttccagccccatagaccatttgggatgaaaaataagttgttgttcttgttggagaaattatccctatcaacttcattaggcatcacattgatgcttccaaaaatcggatgagggaacccggggatttgaagaggttggcgaagtcttgcgtcaaaggaagacattgaagaaggtggaagaactcgtagaaggatgtcggtgaagattctggtacaaacagtggttaagaagtttttgattcctgtgatagcactatatcgatttttgtagatcatttggagtgatatattctttttcagatattttgtggtgagagggattcggccaattgggggattgtttaaagaaaggcactgaaagcatgagacagcttcgtaagcaagaccggcaatgagtggatctgtgagagtgaggatgattgagaaaatgttttcaaagccaaagtcctcgagccaaagccatgtggccatgacaagaagtgactcagctggaggccttgagaatttgaggaccaatttagagaatatctctctgtcttgagcatggaaaacatgtagttcttgtgcgttgagaagagacataatcgaatttgactgtagaaagtttggtgaatgtgaaagaaatctagaagttgttggaatgcattttattatctaatcgcctcgttttatacacctaaaagcccgtgtttttaggggtttttgcaaaaagaacataaaaaaagaccctccaacttgtcatttttcgcatcttaacccttatctccaaaatgtgcaggtcaatccctttaagttaaaagtaatacgcaatataactcgttcgttaataaatacaagaatttgattgtttttatctaagcacaaactagatattttatgattacttataagtaacagttagttatgaacatctttttaagttagttttgttcacttacatgtaatgtggactattacatattcaactcagaactaaaacaaaattcttttcatgtgatgtgaactattatatatacaactcataactaaacaaatttgaggacaaaaaatattattttctactttagttattagcattgagttttaaggactaaaccataaataaaataaaatttaatatatatatatatatatatcattcttactaaaatcttatataccatacaccaaaaaaaattcttaattaaggtggtcaataagattttgtcatgcctatatacattgtatgcaatgataagattttgtcatgcctctaaagaaaattgtcctttctcattccattttctttctttataattgattatgaaaaataggaaaatggtaaatatatatttgactaattttgaaaaaaaagaaataaccaaatttagataagtaattaatctggtaatataagatattttctttatatcttctatattacccttttggtatatttcttactatgtgtattattctttttttttttttatcaaactatgtgtattcttgaaattgatgaaaatcttgtcttaaatttctcaaaaatacaatatttaccaatttttgttttctatccccgtttagtatagtttgatgttcatggtgcgctaagttgcaataaaatatgaaaatcatgctatcttgaatcttgtcattgatacatcgttggctctatatgcttagagtatatacatcgttaagctctaatgtaaaaggcaaagataagctatgaaaaatatatagcttgttagtattgtggtatatagaagtttatttcaaataaaatagcggatatatatgtattatgacaattatatgagaatgtatgaagctgatcaagaagatgtagtagttaaactaaacgaaactaatgttgatgaaacagaaaaaccgaaaatgtctactaatgttggtgatcaaagtctttgaagaattgatatactcgtattttttaatcggttattttttgttttataagatcgatgtgtttacatatttttaggtcgtcgtataatgagttacgttcattttttattttttttgaataccagaaggttctgggccgaatcccataatcccccaaacccgaaaccacagtatgtaatattagtttcgtcctaagcgtcactcgaaccgacgacctctagacgaacgcctagaatctttactaattgagctaacgatacttagtgttacgttacgttcatttttactggttccaaatatggaaacattctttatcgacaaagacttgtacgtaattgtgtaaaaattttatattggtcattgtaatattcatttttggagtttagatgtcacagttagattgatcaatgaaagtttcaaaatttggactttcggtctaaaagatcaatacagccggagaaattctcaaatctctcaatcatatatttcaattttcactaaaatttgtatttgggctatattgtaagttgggttgggcttttataagtgtaaacattttcaccttttcctaataggttttcttacagacgtgagagctcgctcactcatcttccaacaggccacatacattagagattttgcggtttctttaacaacaacttggacgctatatgaacagacgtactaatggtgggaaaataaccaaaatcaattcggactattttctggtgattttttaatacccaaactacgatactcggaaaatatcaatgtaaactcactaaaaatttaaatttccaacctaacctatatgaaaatagccaaaatcaacatatgtcaaaacggtgttagttaatcacttaacggcgatgaatcagccgacatcgtggcaatgacaaggcatcgtagttgagtaatacgactttgtttcgtgagtttagggttcttgaatcaaagaatcgataaagtaatcgccaatgaatcttcgattcgagaaccctaagctcacgaaacgacattgttttactgaacttcgatgccccgtcattgccacagtattggctgactcatcgtcttaagcggtcaactaacatcgtttcagcatatgttgactttggctatttaaatatagtgtagattgagaatttgaatttttaatgagtttaggttgatatatactcaatattatagtttaggtatgaaaaaatcgccaacaaataatctaggttgattttgaccattttccctactaatagtgatatattcttttgcaaaaatcttacaaaaacatttctgaaaaagtaaaatgatcgtaacgtcgattagcttaagttaacgatgttagtattgattcgaaaatattatatggtaaaaaccttcgaaatgtgattttttcttttatggataactgagagaatctcaaaccaaacttcagcctatgtggaatccaatcattgtacaaaatattagcccattagcctatgtggtgagttttcatgaagatagattcatatataaattcgtctagtgagaagaagagaagtattttctccatcttatatgaaattattctaagaatccatttgtgttttcagtgataaggtaaatctctttaatcttttacattttttgcacaataacttttttatgagctattcaatttctaattaattttatctattttagtaaactttcggattctcccactctaacagcagtagagaacttttgcttgtattttttgtatagttacttcaaagatttgaacatttagggacaaagtctaggccctcttaaaaggcttaaagcctcaaggattcagttttctttatgcttttgagactctttggttatatataattttgaagaaccaaaagaacttgagttcttgaactagttggtcttgagttcgaatccttggatggccataaagtttatttatttatttaataaatatgtttgttaatgggcttaatttgctttagataacaaaacactttgagcggtcctgcataatggaagtgaaaacaataaaatagacgacaatcaacttcatgttttatttgtaattaattttttccaacttgtatttttcacttaatattatagcaagaccatgtataaagttctaatgatttataagatcagattattaaaatgaaatttgtattaataatatgcaaatttcctaacggacgaatttcaaaactagtcataattggatgttaaaattcggttctattttaagaactgatatggaccgttgatctaacgacgttgtgtatatacacagagatacatctacatatacatttttgcagccattttagcaaataattccttaagttggaacttatttacaatgtcatgccactaacatttaatgttttaacaaacttatttttaaatctaaatataaaatcgattatgttactaaaatttaggaaactaaaagaaaaaatcacaaaaataattaaatctttccaaatctaaactacaatatactacacactaacattccttttaagggatcaattagcaataatcacgaaaatttttccttttaaatcatttattttcagttaataaaataaatcaaaccttatattacaatatatgcgtcaatattttcttttgaaaaattaattacgtaacattttaaaattttgaaacaataattatttccaaatccacatgtttcgttttaaatttgcaattgtacaaaataattatcactacctaaaattttcttttcttatttttattaaattttgttctttttttggtaaaataaattggacatgtattaagctgatattgctgactcaaataatgttaacaaaatgcccaaatttaggctattaaaataataaaaaagttagtaaaaaacacaagtatatcaatcccaaattatgattaaactaaatatttatatataataactatcaaaaaatagcattatatacatattaaaaaattaaagtacctttttaaaatacttttgtgttataaagtaagaatttacaaaaaatgtcatcacattaaagtcaaaaacaatttttatttttaaatattattgatatattttaactttataaaaaattattaatatttaaacttattaaaaattaaaatatcatgaaatgaaaaatatagcgagacgggtttggattgatatgaaatatagcgagacgggtttagattgatataacacatgttaaatatttattttcttattctatcatcaccaatttttttagtcacaatataaatataaaattatataactttaatactaaattaaaaacaataaaatttaatattattatataaatatatatatatataaataaaacatttgccccgtggtgtaccatgggttaaatcctagtacatattttatttcatcaaactgtgaattgttcttatcagaaaaccagtttatgtgaaattgttagaattatgtatcaagatatggttgttatactgaggaccaaagcattgaccatacccataatgtcctttaaactaaaaaagtggcctctcggtattctaagagtcgatctttgtccagtgaaaaccaaagcaaataatgctttcagtttcattcatcattggaagttgaagctgacatgactaagtctaagtcatgagaaacaaatgatacgtatttttatcaaagtgtggtaactagtttaatttctatactattatccactttatttctatgacctatccctaatggtttatactgagtgtcaattttatttgtaacctatagcgtgttcggtggaacaacgttcaacgatcaacatgatgaagcatagaaactagacattggtcaatgtcgagtcgatgattgttttgatgtcgtgttaatatgtgaatcagtaagatcataaaaagatttgtagtgaaggttttgagaatccaaatcttgtggaattgtgtttgtctctacattctaacatatttttaaaaatataatatgcaagattctatcaaacaaaacattggatcaattgtctacaaatatatacgtacaatatcgattctatattatagtttaaaaatctattaacatcaatattctatttttgaatagtttatttgatcaaaaatttatttatgttttatttttgggagggtctcactttggaccattctatatagaatttataactaggtcgaaccatggatgttcaagatatcaacttatgtaataacactaggctatttgcaactatcgacagaagttgaagaccgtttaactataagaaatttgtttttgctacatgtgatataagaaatttctctatatttgtgttatatagagaaatattataatatgatttatatggataatggaagggtgcttacgcagcactttagcaccaaaaattaatctttgattgttagtgaaagtggttagtggccacatctaaaagcaatgatttgttttgttgtacattgaataatggggacatagttacaaaatggaattggacatttaaaaaaactatatatatgtataatatcgtcaagttgacaaattgagttttttcctcccaaaacatgtttggacgctcaatttagaagatatcaacatgagtagatagaagtcgaggtttcgaagaaatgttggagttctaagtcttagccaagatgatttatttgaaggtgcaatctatttcgtatgatggcattatttggaagagacaatataaatgaaattctctaaagaaaaaggaggattggatgttgtttttggtcggaaaaggcgtgattagatattgattatatggcctaaaacataatatgcatagtaaattactaacatgcaaaaaaaaaaaaaaaatatattacaaacatgtaaaaaaaaggaaaaaaaattacaaacatgtaaattttttgttaattcatcttcatttcttatattttataatttagtcaaagcaataatagtttcttttcgacgaaaaagaacgaaacttgggttcactcctttattcacctccttttgcattaatcaataaaacatgccatgtcaaatcctacttaaattacataataaattaaagctataattataaatttaaaccgatatataaccttgtttaattacaaaatataaaccctaattctcctttgtaaacataaaccgccatttaaactcgtttaatcgtaaaaaaaaactaaaccctaatcgtatttctaaacccaaactgacatttaacctcgttaattgtaaaatctaaatctgtttataaacctaaaccaattttaacccgtttaatcataaaatctaaaccctaatcgtactttctaaacccaaaccgatatttaacctcgtttaatcataaaatctaaaccttgacattttctaaaaaatccaaaccgatacataattttgttttaatggcaaattagattttataattaaattaaattctttttattattattaggtgttagattttaattgggtaaaataaaagagataaatataagggttcaccactagggggtgaaccaaatatttttcgaggaaaaaagaacttttatgatttattcaattaaacttttttaatctttaccctttatttagcccctcactttttttttttaattaagtggaaatatatcctatacaaaaagtagaaacactagcttgagtattttctctaatgtaatcataaatcctcaaaatcacataaattgcatgcccctttgctacctcaacaacaaacccatgatcacatcatttctattccacaacttttggttctcaaattaaatactcaatttcatttacatccacacttcttatcaatttcaatatatacatacaaaaatatgcaaaattgagaaaatggtcaacattcaattttaaatgctctcactcgtggacaatgcagatgtcaaacaaactttgatgaaattgtctgctctaaattattaattttgtttatcacagaaaaatgcataaaatatcttaaatttttattaattgagaataaatcatgaacaaaaataaatcagtcactttcatgtaattgtaacctctactttgcttaccaaccccacccacatcaaacccaaaaaccccaccaataatcaatctgtttgtccctatttcctattatattccaattttacccacaagttttctttgttactaaagtaaccccacaacttttgttaagtacaaattttcccgatttggaatttggtagcagtacaatagttagttacagtactaattttataatctcaaatgctcaacattaaaactttatttagtaaaagaaggcataatctagaaaatattatatgcttcttcttctcaaaagttatttagtaaaaattgttattataagaaaactaaacccccccaaaaaaaagagaattatactttttaaaaattaatctaagaacccagtcttttccaaaattgcatttctcaccctactcatatctcttcctttcaatgtcctcccaattccttcatgcacagagaacgaagccattctcgtcttcgccaaatactcatgcggcggcaattttccttcgccgccatcgtcatcgttttcgatgcttttccgattctctttcccgagaatcttagaccagttctgtacgttcatcggaagtgaagaagctactgtagtggtggttacggttgccggagacgatttacggtttgatgtgatgagtttccgacgaaattcaggcgaatcggagcggttagagtatagatcagactcgtcgaactcgaattctgaatctccggtgacgttgtaagtccgatctgttggaaggaagcgatgactcgggcgttggtaatagctctttctcgtcgctgtcgccattgaaggagaagaagtatttttttttgttttgtttggagttttggttttatgagagaagtctttgaagagtctctctgcttttataaatgttctcgtcgattatttctctctttgttaacttctagtttgtgtcagatgaaatgacataaatgcccttttgtttgtggttgaggaatattacatgcgtcaatgtataattgttgtagcatattctaaaaaaactcaaaaacttttgttttacggtttagttttaaattaaaagatttcatttttaatgaataatttataaattcaattaaataatttgtgtgaaagattgaacaaaaccgtaaaacctacactgtagtcgttataaatttactttagtttgcttagttgcttttagtgaaagtttctatacgttttttttaagtaaaatatctttctttttatggtaaaacttttagtaatattatcttcctaaactttagtatttatttttgtagattcctaaataatatggagaatattctaggttaaaataaagttcggttgtcctagatttttgtttaagatttgtttcttttatctttggcgtgtaagtttcaaatatatgaagattataagaaaagaaaaaaatgattgagaagatatcattcaaaatctttgttctaaaaatccgattaattgtccgcctaagcactcatcggagcacttctgcagcgatttgaacaatttgctctaaatattaattttgttttaaactcactttaaaaattctaaatcgatatttaagttatagatatatcacatttgagttaaaattactgaaaaatacaagagaaactgttaacaatatgttgcgataaaaagatgcaaccatttaaatgcgaaagatataaaagtagctgagaaagataattgtctaaaaaaataataataaatattttaaccaaaaaatgtgataaaaatacacaaccgtaaatattttaatgaaaagttgagataaaaatgcaatcgtttataaatacaaaaacacatttattcagattgttattattattagattatgtgataattgataagattcaaattttggtaaagaaattttatagtaatggatggttaactacttaacttaaagataccttcttcgtttgttatttaaataatacataatttaaagaattatacttttgctcaaaaaaaaattatttactttgttccattttgttattaaaccaagtaattcagtctacattttcaacaaaataaatgtgacgctagcatcttaattgtatatttcttgtcataccgtctactgtttattatcatttattctgttaaaatgtcttttcagtataaatatgaactaatgttttcatttaaaaaaacattcctaccaactatcttttttcttttctttataacttgaaaatttgtgtctggcataaatctttcggaacaaaattatctttctcaatgcgaaatcagattttatgttatttttataatcgattttcgattgaaaacattgagaacaaagttattacaaagtaaattattgtccaactatctaactagttaggccaacccatataagaaaaaaataaccgactttgaattgaatatatagtaagtatgatgatggcccaataaggattccaaccttcgtatttcgaagtgaagtaatctttcaaaagttccaatgtgagaaagcccaatctcaactacagcatcaacgaagcccatttaaaacatatccacccatgcaatcggatccgcgaagatttgttaccaaaatccgcgtgttttaccggaatacatgtatatcttgatccaaccgggctaaccaggatccgcattcttagtgagattttgaaaactaccctatttttgagtttttatttgaaaatacacttttcctattttaaatcaattttgtctagatttaaaataaaagatgtttttttaataaattaaaacaaaatttgaaatttagaaaaaaaaaaagtaataagaataatttcgtgctcttaattcttattatgttttcatttcaactatttttgagataaagacttatttattttagatattaaaatttaacaaaataatatctaaaaattttcgaaagtctatcacttaataaagtttatttatttatttttttggagaaattgtttttaaaaatatcgagataagaattcttaattgtttttttcaactatttctgagataaagattttatttatttttatttaatatttaaaatagtatttaaaatattttaaactctatcacttaataaagtttatttttttttttacttttttgacaaaatttttttataaatatttaagataacaattatctttaaaattattagttacatcaaatttttatttatggattttttgttgtgattttaagtttaaaatcattttagttattcttaaattttttttagtgagactatttattaattttttttattcaaaattattttttatttttttaaaagaatagggtatttttcaaatgaaaactcaaaataaggcattttttcaaaattactcttctttttatatgtgaagctgccaaattacccttgtacgttttttattatgttgtctttgaatggaaaaattgcaatggcttacatcgtaattaatctaccagaataaggttttttattttgaggatttccaattaataatatagatagtgttttcaaactgaatcatttattttattttatacccttctaaaaaattataagacatcaactatttttatttttattttaattacattcacattcattctgcgagagcattcaataaacaatgtaaatattttaactaaaaatatgtatagttttagcgtaaaatgattttacatctaaaaacagtttacgaagttaaaccaacgatataccaactactattaaagatttactaataattttggaatccttagtaatttcaaacatgtataaatccttatctttataagtgcatgaaatacttatcttttaatcggagggatcctcttaaagagtctgaaacggagatgatgtagttggtaataattatttgcattgtcctttttataatcctttgtttcaaagaattaagaatcgtttagtcaatcatcaaataagatttaacaccaaagttcactgttaattaaagttcatatagcaaacatgtaaattactaaaccaacaaatacattaaggggctaattaacaataatgaagcatgagatgatatgttctgaagcatgcgttaataattataatcaaattgaatttgtaatagagcatgtggtgattataatgaatcaatcgatctaaccaacaaattataaagcataaattatcaacgccatgaattaagagaatacgcaaaagcaatggatcactctaatagatcatgataatgaaataatataacatagatctccacttaccaaacaaactcaaactatcgtcgtaccaactaaaccaaataatagaataatggatagtaaatttccaccatataaatttgttaataacaaacatcgaataaagcaactgaactgaagcaataaatcatattcacaccatgtttatgatacgataacataaaaaataaagtaataattgataacaaacaaatctccatgctatcattgaattagtacatcgaataattaattatagcataaacgattataagcataagcattaggcgataatcctactatattatttgggaagtacattttaaatgtaaccttaatttttgtaagtaattacataggtatgccattagaaataaaattttaaagagtaaattaatttatcttttcaaggattaaaaagtcaaatactaatttaaataattaaaattaattaaaaaacgaaattattattaatttctaaaaataataaccaatcaaaatcaacatataagatttgatatctaaattttatttaatttaatttaattagaaaaacgaaatacattattaatttccaaaaagtaaccaattaaaatcaacaaattatatttgatatctaaattatcatattaatgttttattaattattatagttcacttatcatctttatatgattctatttttgcggaaaaataatattaagaaaactttctactgagtaacgggtcataatttgaaatatttctattcaatttcatacatattatattgaaaatttataatcttatatactacaataattaataacatattagatgtgattcaatttttaatacaagctggaaaatcttagaattgacgggttcagatcgatattaatacaagatggtatactacacatgaaactcttaaattaagaatcaaactacaagtgtataattctaaacactaaacaatatagataatatcaacaaaacatatacaactcacagtttactatacatttaaaatcaaataaaataatatcatatatttttaaatcatctttacaataaaagtttttagtttaactaaaatataagcgtacttgcggtatactgcaggttaatatctagattatagggcttattggatctaaagacggatcatcaaagatttcctaaactgaagcaaaatatactgaatattcaaatatctatctgttaccaaattataaacaaataagtcaatttaatattttatatacgaaatcaattaaatcttaatcacataaaaattagcacaaaaaaaaagtattcaacaattacaaaattatcaaatctttgtattatataagttttgatactatattcgaataaaatgtaatatactttttcaatttgaattctttaactaatttaagctaactaatatatttgctaatcttatacctataaaaaccgactatagtttcttatctctatagtatttttgcaagacttttttggtggatttggataaaagtgcattcgggtcatatggtacattcccctattaaataaatatggtgcactcctatgttattagctaaaaattttagattataattcagagtcatatcataaataaaattaatattaataaaataaatgactttttagcaagacggatttggagggacgggttttttgaatcaacattaataaaaaagtaaaatataataaataactttaaattattatttttaagaccattaatattaaacatatcaaatcatcctaatttagaaaaggttatataaaaccaaaaagttatgtaatatgtataatgttactatatataaaattaaactataaaatataaatgtattagagaatgatacaatttgcaaaaaattttatatataataaataattcttacattttaaaaattaatactttaaaaaaaaatcacgggacgggtaaagaaattacagaacgggttttattttggaattgagttatatggtggttgtatttgaatcaatatttataaaattttaaaatattattaatatgttgttttaataagggttaaaacttcagatttttaacaattatctcatggattcgtggtataccgttacttaataacaattataaattgtaaaatataaatattttataaaaataaaatttgcaagttttaataaatattacttaaaaaaaataaatagtcccgcggtataccgcgggttaaaatctagttataaagtatatagcaaaacttatctctagaataatccgtgagtgtgatgtgtgatcggaaaacgtaaacgttagaaaaagggagacaatgtttatctagacaagtgatcggagatcagagataacgtccgctaatgattttttattcagtcctcttctacaaacctcgaagacggtggttttctatcgatgggaagagtgaagctgtaagtccgagacatcgtcaaagaaagaatacggcattgatttaggaactcatggcttagtcttagaactttgtttactagatctggtagggtttggtcagattttcttttagttcaagcggctagctaacgtgttgtgaacaattaggttttagggagttgttttctctgttactaatctattcactaggttgatgacgtgagtctaaaatatatgaagattataagaaaagaaaaactgattgagaagataacattcaaaacccttgttctaaaaatcgtccgcctaggcgctcatcggagcacatgcgcggtgatttgaccaatttgctcaacaaatcagattttttttaaaaactcacttttaaagttctaaatctatattttagttatagatctatcacatttgacttaaaatcattaaaaatataagagaaactgttaataatcttgagtaagagagaaaacggcgaaaattaggtttactatcgcccaaaaattagagaaaaagacgaaggtaattaggtaatttcgtatttcattaaatcaaaaatcaaaaagaaggcaaaacacagcgttttgaggttcaaaccgtgttgggccgagtttaatagatgcaaataaccattagaccaaatcatttctttggaatatggttgaatattcagtatatatacatatatgaatatagaatattaaaaactattcccgattaatttccgtttaatttccgatttttttgccagacactaggcccaccccaaaggcatatttgaatcgatcgatccgtatgacatgatcttgtgtgatacggttgtgtataagagttagatatgcattcatatttcaaaaacgtagagccgtacggatttttctagaaggttcaaagtagtctaactcgaaaaagtaggtatacggaaattatgaagagatacacatgatagttgttgatacgcttatatagacatttaccatccatgagtcaaatatcagttttattcaaagacaccaaaagacgaatttcagtggctgatttacgaacctaattccatcaaaccaaacacaaaaatacaacaaataaatccaattaatgtattgaaggatcaagaacttgacccatgaacaaaatcactccactcttctcttctctcactgtgaatagaaatggatgatcagctacgaaatctcccatcaacaacatgtcctttgtcatgctggcaacagaaacggctgcagcttcagttccctcttcatccacctcaatgcaagctttgtgaaaaacatttgagacgaacaaattctcagcgacgcatagattctcgggaatggaaggcgactcaaccatctcggttagactaccatgtgtaaatggtaaagtcagccccatttccttcaaaacatctgaagctttaaactcgaaagagaacttaaactttggaatcttgaaagcttccgttaatatacgttggcgcggaatatggttatcaagaaatcggggtttggagcttatttcctcaagaagagtaggtaatccatctctatcattaggaagataaatgtacatggcgaattgacgttgatcttctacataaggaagacgcaaaactttgaaaccatcataatattctaggtattgcttcttgtaattggtcatgaaggggactttcaccatggtgccgtcaagaagatgaaaatcgtaactttttgttaactttgcatcaaattttttgctccaagctcctttgaagtacactgcattagcaagtattagcatactttcacggatagtcttgatagaatcgtctgaaagaatctctttgatgagtccattggtgtggacttcagcccatgcattcacttcattaatcacttcagcaggcttcaacataagtgaacaacaaattaccaatcacaatgaggaaattggaacattactcttaggtatctcacatctaaattaagatggaacctaaaaaaaaaatatatgttatagacctaattcgatcatgattttttttttttttttgacaaggttatgcaattgctaattaaattaaagttggaaactcatgaaaccttgtcacctaataattgatttgaggcaaagaaaagttcaataagaattgcgaagaacatagaggagttaccttggttgcgaagtcaacttgattacaagtagcgttataggagttctccaaaagatctttaaaggaaggtttgaaggataaagatttgtcaatccatacaccataagccgtagataagtgcaagtcacttctctccattccatcatttaaggcaacagatacggttttcgctaagactgcgttgaggtaatccgatgagggtaacatgatgaatgataagatttgttctttggtgacgcagttggaaccagcggcaatcaggcagagcaaaacgttgattgacattggtgagaagacaaggttggagccgttggcaacggtagggatgacatgctttgctagtaataccatgacgtcggtttgattctccattgattttcccaactccatggtttgttctttcttttttcttttccaaacgagaaagacgtggggacgaatggtgatgaatatcatatatatcttgtttcaaaataaatttgaatagtcatcgaactcatcaccttggccacgattacaaagtaaatcttatttaaagtcgaaaacaaagatttgtggggttagaaagccaataagatggcaaaacaaatatttttctaaatgtttcttcatagtatttgccattttactaaatcgaaaacacaaaaactatttaaaaataaatcagtagctaatatatgcggtatgttctttgatttgaccccatgatttgatttggttgagatcttggaccaaactcctaccaatgaagaagaagaggaggaagaagaagaggaagaggaagagtattgattacctcatgcatttcagtgcatcttatatcgtgtatgcttttctctacttaacaacattagtattatcatatcttatggtttgtgtgactaatcagacataacatttagtataagcaattcatatccatctcaaattgattcatcatgatcatgtcaaattatctgttgacattcataagttggggaattttggagatcaatagtaaaaactagatcatagacacacggcactgttggaatattgagagagaatgaagaaaaacagagcaagagacatttgtcttgtaaacaagactttcttttattaaaactgaagcttgttattttctcgactgtttttacataagacaacatacacacttatatagatgtatacataactaactacataaccaactacataaccgttggtaacagttttaacttctccgataagttatgtctcttactcacacccattcgtagtgtatgatatgtaacacataacatccattgcctttaaatataaactatagcatatatgatattttaatcatggactcaattctaacagaaacatctttgcaattgaactaaataagaaggtacgattttgacatcgctagcttcagattatggtgtttcatagactgctgttcttagttagataatcaaatttttgtaaccggcattattcagttcacagttaataaatatgcatccagaatcacttattgaaaaataagagtaaccacataaagatggaaatacagtattaaaattaagaataccagaactatgtggttatctaagatgcatgtaaacggaaacagatttgcagaagtgaaacattcaaaacgatgaaacgatttaaaaaaaaagaaatgggaaacatctagaaacgtagttcctaatttttgtgacatattttcgtcagggccggctcttgaggagagcaagaggagcaaatgttctatgtccaaatttttgtggataaatttaaaggtccaaatgtattatttaatacgaagaaatgatcattttaaagattttttagcatgaaaaaagttcaaaacattttttagtacgaaaaaaaagccaatgattaaaattttaaatatttttttagcatgaaaaattgtttaattttttttttagtatgcaaaaattcattttaaagaattataccagaactcttaatttattgaacaagccctgattttcgtgcttcaaaatggattctatatctgtattatgcatttttcctacctcgaaaactaaggatatctttactttcgtttcgaagctacgaaaagttaacttcgtggtgaggagaagcaagatcatataaactttatatgctgctaaatgaattttgttaaccaaaaagtttttttctgttaaaaaagtttgagaaatgcaaatagcattgttctttgttactttctcttaatcgtccaaactaggcttgggcattcggttaaccattcggtttcggttcagttgcgcatggtttcggttattttagttatagtaatataagaaccatttggatatttgaggaattttggttcggttcggttcggatatctttcggttcggtttgaatattaaacttggtaaccataaataaaccaaaaccaaaataaccgactaaaaaccgaaacaaccaaaaaaattgaccaataaccgatatagaacgtctgtaaaaaaaacctattcacaactcataaagatgcaaatatggtccatactctccataatattaaaatacatgattcacaaaactaataaagagaagaacatagttaagtgtcaatacatacaatatatgtgatatattatctatcatacatatatgctttggttatcctttggttatcggttactaacctaaccgaaaccgaaaccggaatctaagacatataatatccagccggtttattttaagctatccaaactcgaaccgaactatgtttttcggttcggttcggttcggttaatcggttagcggtttttttcccaggcctagcccaaaccattgcgagtgccggtgaataaagataccgtgaaggtcagctcttcacgtgaaccgcacgtgccggtttcacgctacggttcacattttttactacgcgaaaatcctctttctccatattttcaaatttaaaaaaaccaacctggcaagatcaagtgtttcgcacctttctctatttccatacgtttcctacgtgtcacaatctcattagtcgtacacttttcgtagccgcaaatctagcgatcgtaataatattcattaattctctcttcttctctttcactcctaaaaccaacttctccagatctctcttcttctacttactcatcatcacaacttctcagagaaagatctcagaaaaaaacttgaaaatgaagctcgaattcattattgttgctatgatgctaagtctcgtactcgtctccggtgagattttaactaaatcctcaccggctccgtcaccggatctagcagattcgcctttaatccacgcatcaccaccatcgaaactcggatctcataattctccagcggaatctccaattgaatactcttctcctccagagcctgaaacagaacactctccatctccttctccggcgaattctccatcggtttctccaccattaccgaatgattctcaatctccttcttcgtctgcttctccgtctccgtcaccggaagctagcgatgtgaatcacagtgatattactgggatcgaaggggagaagttgccgtcgggaagcggtggaggaatgagcggcgggaagaaagttggagttgcttttggagcgattgcggcggtttgtgtggttggagtcgccggatttgtgtacaagaaacggcaagagaatattcgcaggtctcgttacggttacgccgccagagagattctgtaattagagagagagagagagatccagcgaggatagattgatttaattttgaattttttgttactctaaaattcgaaaacatttattgataattattatttcttttgtatcgtgtaatcaatatttggaatttttcttcagatgtttaataatcatgctaatataattaagttaatgatatttgaaattattttaaagtaaattattattcagttcaaaaatctttgtaatctatattttatatgaattaaatattgagttcaaaaatattgtttgtaatctttgtaaattattattgagttcaaaaatattgtttgatatgaattaaatgtacattttatctaattcttgttaataaatttaatatttttattttttaatgtatgttttgaatgatttttatttataataatatatttataatattttatgctataaacgcctaaaccgcctaaattcgtctagagcccgattaggcgttctaagtgttaggcattgggtcaccgtccgattagcgcctaacgttttcttgaacactgcgatttccaaataacaaacctaaaacatatgaccgttagccaatttcagcatataccttttatatttttaatgtcgattggaattcttgagtcaatattatcagttatttgtatctgaatcattcatttttattaaattggttaacgattacataattcaaatttgtaacattatttataatggatatatgttgaaattggctaccggttacatattaaggtttgttatttgaaaactatgtgaattcaagttgataaatacagggaatcagagtttggattgaaaaaagtagcataaaaatagttggagttgattttggccgttttaccccactcttttacgaattatctttgaaattaacagtacaatcacaacaagtgaagaaaacaaagagaaaaaagactatcaagagtcttctcaatacatgaccgacagaccgagacacacaatcaagagaggctcaaaacaacggtattgcgtcaaataccaaaaaacttataacaaacttcaaacgcaaacgcttctaatcgccaacatgcaacgagatgattgctatgttcaatcaagtatatacccgtactagctttcagctatggttttgatcttcttcttcttcagctttgcgtttgcaccaacaacagtattccgaaatagccccgtcttctcctgtgatccatggatgctccgccacagctttcaacgtcatcctctggtttggatctgccacgagtgtatagcatgagccacattatacacaaaagacgatatcttttacaaaacaactgataagaactcacctttgcaaaggagaccttcgatcaagtcccttagacgaggattgagtccttccggtattatcaacgggttgtgaacaatctgcgatgttggtaaaagataaaacacgaactaattgcgttattcaaattgtttctagagagatgtctttcaataaaaagatcagtggagcgagagagaagcggaaccttgtcataagtatcttgaagtgtatcacccagaaatgggtattgtcctaaaatcatacaatacaaagtaactcctactgcccacgtatctgcagatcttccactgtatgttatacctaaacaacattctggggcagtaaagacaggagtgccgggtgatctacggagttgatcatcatcatccttcatcaaatgtatcatgttttagcagatcaaattacacattacagagattaacggagaagaaaaagaagaaaagaaatggtatcatcagtactttgaatacttggctgacactgaaatctcctattttcactctcccggtactagtaaccagtaaattgtcaggtttgatgtcaccatgaattacattctgtttcatccaaaagacaaagagaaaatcatgagtatctatcatataaactttcagtgtggatgatgaagtattatataatgcagagcatacatgagcatgaaggtacatgaggccggcaactacatcgcgcaagtactttctagcagtaatttctccgagagcacccggtggtccagaatcatcataggcccattttccatcaacatattcgagaactatacaagaaacaacacaatataagatgacagacaaagagaaagacttgaggtaacgatatacaaagcagagggaaagaaatacccatgtaaaaatcatcaaactcagggtcatcaatcacctcaatgagattaacgatattaggatgctccagggttttcataatcataacctacaacgatgagatacaaaaaacatgtacataagttttctgaaatgaaacctaaagtctatctgcattgtactggaaaaagccaacttgggacgttagttaaatgttgttcagaaatgatacctcacgaagaacatcacccatagcagtttctgaaggtgcaacccgtagcctcgataaatgtgacttgtgaaaagcctggaaatccaaaaatataatcaccacaggtccagaaattttaatcccattatgtgatcaacttaagaaacatttatataatctgtactatggtgatccaatttccaatgagcagattcatagaagaccaggaaaacaaaataagcttttgagtggtgccatggaaataaaaaataagagcataccttaatagcataatgcttgtcatcgacagtgcttcgatagagaacctgttatacatacaaaacaacaacccttatttaagatgttctcaagagcgaccggaagaccatgtaacattgaaatttgatttcacacttaccactttcccataactaccagatccaattttacgctcacgaacaaactcatttattgtcttgtttccatcttcatcctagaaatcaaataagaaacaagctagtataagaacaccattcggcaaagcacattcgacatgagcacaagaagtcgcatacctctccgcgtgtaagtttattagtttccttgactggaaactgcctgcagactagtccattttgtagtttacatttcaaaatttcttcagatcgtttggaacgacttagctcctctacttcctcttcctcttctccttcttcatcatctcctcccggattgctggtttcaccactatcatgggaatatgtatcatcatcatatggatttggtgaatgtcttgatctctcagagccaccaaaacacccgaagcaactcatcacttgggcaaatgcaaaactatcacaaaacattatctactccaaaatttatgaatttctcaagtagaccacaagctaacaataacgaaacctacaagaaacattgaaccaataatcaaaatccaaactcaagagtaccaaatctacttccctaaagatcaaaacgaaaccaaatcattactctgcaaaaagaggggcttcaaagcccggtaagcttcgttattccaaaggatgccattcagcaagatgaataaaacaacttgagatatcaaaaccactacaactgaatcgcaacatgtcgaaactccactttatactataagataagatagctttaacatccaacaataaagtcaaagataaactccaagctt

SEQ ID NO: 79 - DNA, 91274 bp, Arabidopsis thaliana
gaattctccatcggtttctccaccattaccgaatgattctcaatctccttcttcgtctgcttctccgtctccgtcaccggaagctagcgatgtgaatcacagtgatattactgggatcgaaggggagaagttgccgtcgggaagcggtggaggaatgagcggcgggaagaaagttggagttgcttttggagcgattgcggcggtttgtgtggttggagtcgccggatttgtgtacaagaaacggcaagagaatattcgcaggtctcgttacggttacgccgccagagagattctgtaattagagagagagagagagatccagcgaggatagattgatttaattttgaattttttgttactctaaaattcgaaaacatttattgataattattatttcttttgtatcgtgtaatcaatatttggaatttttcttcagatgtttaataatcatgctaatataattaagttaatgatatttgaaattattttaaagtaaattattattcagttcaaaaatctttgtaatctatattttatatgaattaaatattgagttcaaaaatattgtttgtaatctttgtaaattattattgagttcaaaaatattgtttgatatgaattaaatgtacattttatctaattcttgttaataaatttaatatttttattttttaatgtatgttttgaatgatttttatttataataatatatttataatattttatgctataaacgcctaaaccgcctaaattcgtctagagcccgattaggcgttctaagtgttaggcattgggtcaccgtccgattagcgcctaacgttttcttgaacactgcgatttccaaataacaaacctaaaacatatgaccgttagccaatttcagcatataccttttatatttttaatgtcgattggaattcttgagtcaatattatcagttatttgtatctgaatcattcatttttattaaattggttaacgattacataattcaaatttgtaacattatttataatggatatatgttgaaattggctaccggttacatattaaggtttgttatttgaaaactatgtgaattcaagttgataaatacagggaatcagagtttggattgaaaaaagtagcataaaaatagttggagttgattttggccgttttaccccactcttttacgaattatctttgaaattaacagtacaatcacaacaagtgaagaaaacaaagagaaaaaagactatcaagagtcttctcaatacatgaccgacagaccgagacacacaatcaagagaggctcaaaacaacggtattgcgtcaaataccaaaaaacttataacaaacttcaaacgcaaacgcttctaatcgccaacatgcaacgagatgattgctatgttcaatcaagtatatacccgtactagctttcagctatggttttgatcttcttcttcttcagctttgcgtttgcaccaacaacagtattccgaaatagccccgtcttctcctgtgatccatggatgctccgccacagctttcaacgtcatcctctggtttggatctgccacgagtgtatagcatgagccacattatacacaaaagacgatatcttttacaaaacaactgataagaactcacctttgcaaaggagaccttcgatcaagtcccttagacgaggattgagtccttccggtattatcaacgggttgtgaacaatctgcgatgttggtaaaagataaaacacgaactaattgcgttattcaaattgtttctagagagatgtctttcaataaaaagatcagtggagcgagagagaagcggaaccttgtcataagtatcttgaagtgtatcacccagaaatgggtattgtcctaaaatcatacaatacaaagtaactcctactgcccacgtatctgcagatcttccactgtatgttatacctaaacaacattctggggcagtaaagacaggagtgccgggtgatctacggagttgatcatcatcatccttcatcaaatgtatcatgttttagcagatcaaattacacattacagagattaacggagaagaaaaagaagaaaagaaatggtatcatcagtactttgaatacttggctgacactgaaatctcctattttcactctcccggtactagtaaccagtaaattgtcaggtttgatgtcaccatgaattacattctgtttcatccaaaagacaaagagaaaatcatgagtatctatcatataaactttcagtgtggatgatgaagtattatataatgcagagcatacatgagcatgaaggtacatgaggccggcaactacatcgcgcaagtactttctagcagtaatttctccgagagcacccggtggtccagaatcatcataggcccattttccatcaacatattcgagaactatacaagaaacaacacaatataagatgacagacaaagagaaagacttgaggtaacgatatacaaagcagagggaaagaaatacccatgtaaaaatcatcaaactcagggtcatcaatcacctcaatgagattaacgatattaggatgctccagggttttcataatcataacctacaacgatgagatacaaaaaacatgtacataagttttctgaaatgaaacctaaagtctatctgcattgtactggaaaaagccaacttgggacgttagttaaatgttgttcagaaatgatacctcacgaagaacatcacccatagcagtttctgaaggtgcaacccgtagcctcgataaatgtgacttgtgaaaagcctggaaatccaaaaatataatcaccacaggtccagaaattttaatcccattatgtgatcaacttaagaaacatttatataatctgtactatggtgatccaatttccaatgagcagattcatagaagaccaggaaaacaaaataagcttttgagtggtgccatggaaataaaaaataagagcataccttaatagcataatgcttgtcatcgacagtgcttcgatagagaacctgttatacatacaaaacaacaacccttatttaagatgttctcaagagcgaccggaagaccatgtaacattgaaatttgatttcacacttaccactttcccataactaccagatccaattttacgctcacgaacaaactcatttattgtcttgtttccatcttcatcctagaaatcaaataagaaacaagctagtataagaacaccattcggcaaagcacattcgacatgagcacaagaagtcgcatacctctccgcgtgtaagtttattagtttccttgactggaaactgcctgcagactagtccattttgtagtttacatttcaaaatttcttcagatcgtttggaacgacttagctcctctacttcctcttcctcttctccttcttcatcatctcctcccggattgctggtttcaccactatcatgggaatatgtatcatcatcatatggatttggtgaatgtcttgatctctcagagccaccaaaacacccgaagcaactcatcacttgggcaaatgcaaaactatcacaaaacattatctactccaaaatttatgaatttctcaagtagaccacaagctaacaataacgaaacctacaagaaacattgaaccaataatcaaaatccaaactcaagagtaccaaatctacttccctaaagatcaaaacgaaaccaaatcattactctgcaaaaagaggggcttcaaagcccggtaagcttcgttattccaaaggatgccattcagcaagatgaataaaacaacttgagatatcaaaaccactacaactgaatcgcaacatgtcgaaactccactttatactataagataagatagctttaacatccaacaataaagtcaaagataaactccaagcttctgcaaaacagggtaatgtaacaaaagtcagcaaacaagaattgatacacattaaagatcaaatctttcgaagaaagggataaactttacataatccatatgatcaatccacatagaaatcaacatttgtatccaaaaccctcacaaaaatcgtaaatttgaactgatgaagaacatcaaaagacgaagactttaagaaacccaataacggcaatttcgagtaaaccccaataaatcacaaacccaattgactctagacgtaaaaaaaaaccctaatttcaatatccatggcacatgagaagaaatgagtaccacgattcaccaactggaagaaatctaacaaaaactcatatgaataagaatgaaaatctcacatataaaattgaatttgattcgaaatgaagcaaaaggaaatgaagaaaagagaaaaaaaaggattcgccggacgctagggctcagagacgtcgtgcgtgagaactgagaaatgtggaatttgtagtttcttttctattggggaaggcaacttatttttgttgttttctaatgaccaaaaaaataaaagacagttaaaaaagaagtatcaattatcaaacaacaaacatcaccagctaatgtgagttcgtttcctaaatattttctgtcatttctagaatttaattcaaatggaataaattattattttacttgtttatctttaatgagctaaattaatttgatctctgcaattttattatcaatgtcatttctgaataactatttcaaaagggtaaggttattttcataaacatatttccaaaacaatagtataagatgatatttattccaaactaaaagtatcgatttagaaccgaatcaaaaccgaataaaaattctagaatactctagtgtatctttaacttgagaactgaaaaaacttaaaaccaagtcgctgttaaatttaaatattttagatacttaaaaatatccaaaatacaattacatactaaacattataagttactattttaaagtgaataaataaaaatatccaagattaccaaaaaaatacctaaataattatccaataatatccaaaatatttgaatggatcatatgtttccaaaaggtaaaactttccccttcctttctaggtatgtgggtgttagcgtgccagatataactcaatcgatgtggttcatcatcttctttcaatacttctggatgaccctttgtacctgtattcaggaacataaacttcataaacaaagaaaccgagttcgaactgaattttgttttgtacccatatgaatcctaaactttacaactaaatgaaatcataataaaataaaaccgaaccgaaaccgatataaatatgtgaacatctaaatctatctatcgttggtaaattgtaaactgattttttataactaactcatgtttatattgtcttctatgtagtctttttttagattataaacacacatatcttaatataattataaacaaatttaaagatctcgtgtagttttttaaacaaattaatcaaagctaccaaaatatatataaacaatccaaaaattagtagcattactaatctcgagtacctagaataagaaaactattttttttgaaaacctatttaaaatatagattttttttaagaaataccccttttacggtatttgttttttaaatgcaatctagtaaagctattttcaaaaatactctttgccaaaaatgtttcttaattaatgtatagggggcgtgtacggctgctgaactccaaatcaacttttgaaaacctttaaaatatttttaagctcataaaccgtgtaaaacaatacgaaatgagttttatataatctttataaaaccttgtaaaaaggggtataattaaaaattgacagtatttaagggcatttttgaaaaagaggtattgtaagtggacatttttgaattttctccaatatatacgacaacaattagggtgaaacaaaatataaaataaaaaagaattactatacagaaggtatatttattatagtaactttagaagatctaaaatacaatttttgaataggaaaatacgataatatggtattacactctctgatatatagaattttaaaatgatatattctgaaaatatctcatagttttgatatcattgatggagtaaaataaaattgaaaaaataaaattttaatatgaattatatttcccaattatgtatttttttttaatttgtatgaatccttacattaattaagtgaagtagtactaagctaatttataattaagtttgaataattaatttctgtacatattatcattttagttgttttagttaatgaaaataattggttcaaactaatataaattttgagtaagttaaatttaatcgtttagattttgtttgcaagataagatatatgaatattggacaaatattatgtggctgtaccaaaatgtaatgaataaacagtatagatttcatagcaaaataatcaaccatccaagaaatataaataccaaaagaaatgttatatttttttgagataagcacaaagctatacaaacactaaacaacaagtggaaaaatgcaaagaatgtgggtgacgatcatgttagctttgatagtactatcaatatctatacaaacaaagggaaatgagaaagtaaatgatcttgctcgtgctccctcgttgacactagcacctcaatcagagaatggagtattgcctaagcctctaccttgtttaaacgactttaaactaatttcaaattgtacaaaagcagtgaagcatttccaaatcaaaagggtcacaaaaaactgttgtatcatcctactcaatcttccagaagattgttttggtcgtttattcgccatgaagtggatctatcgtactgtccttacgattgcttgcaaagcactaggttacattaaataaattttctgcattttttgcttcaaacgatcgatgtcgataatttgtactaattattcggatataatatttacaatacttcatcatctatgaaatttattttttttgttattaatttctccaaatctgtttttgatccaattatcaattatggctatacaatattagttttaaagcttgacatgcatctagatgaatccagacttccttaaaaaaaaatatgtatttggagaaccttttgggatgcaatatgaatttttttttaatgagaaatggttgaatatgactattactgagaggtagaaatgatgtatacatagaacaaatgttgtcaaaataaacatattggttacataagataactcggttagagttggaggttaattcagagttggtggtaagtttattcacaacagagattagttattttcatctgttgtcgttcctaatacatttgtgctatgactttttatcgatggactggatagtcgatatttttcatatgtataaagagattaaccgtctagccggcggattaactaactatgtattttctttattgcttagtttttattcttttattgtatgtccggatatcatgcacccgattatgttggaggatataagcgtaccttcgtaatcttcgtttgtaagtttcccttttaactaaataaagcataggagagatcgattaccaaaaaataaataaacatattattatgccttcaaaggcagatatatttataagaaaaaatatgaacgattgggttggtctctcatttgtctatttatccgcctcaaatgattcgcaggtttctcgtcagtgtaacgaataattttttttttttttttttttttttttttttttttttgtaacgaatagtttcgatctgttattctagtttcacaagcatgtcgggtggtactgtggtagagatatcagttccttaatgcaatcatggaaacaaaaataatctatcaatcgttattaagtaaaagatagactaaagaaattgcctatcattgtatcattatgaaatgttgatcttgatacaatgtcacaatgatgaaaagatgttgatcttcatagaaatgagactttttatctagttcacgagtaagaatgtgaagtgactattttcttatatttaaacaatttgcaaagaacaaaaaaaaaaactgtagattggacgatttatttaggtcccaagttattggtttaattattgatttgaaaaagctaataaaataagtgcaaaaacttatgaacgtttatatatcaaaatatacaatttgatgtttgtcatatatctttttccaaattagtatagtttacatgaaataaaagtatatttttgtcacaaaaatataatgatatttcttacttatgaatttgtgagtaaacgttttgaatagtataatatttttaacccttttaaagaatttttaagagatattaggtaggaatctcatagagttatttaagaatattcgaaaaagttctatttttttcgaattaatttttcttattttattatttaaaatatgttacttttcgtctgaaatttttagatgaataatttgttttgaaaactgtattataaaaaattctaatatttcatttggcatccaaaatataattttatgcacttaactggaatacctaaataattggtgtatttttaaggaatttctcaaaaagaaaacatgaaatgtggttttacaaaattgtgcgtaatcttactttttcacattacattctctgaaatctgaaattttataaatggcaagttaagaaagtatactaaatgtttaattataagatgaaaatattttcttaatgaattaattagtatatgtagtaaatgaaaggttatttaggtaatgtatatttaggcttgactaataatatttgtgtgttgttaagtttagtcattgtacttaatgaaaaagaattgacttcccctatatttaaacttccaataagcatatttgtataattttcaaatttcttgcatctttctcaaaaagataagaagatatacaagaatcagggacaatattacatgcatgcactaaaatgtaatgaataaaaaatatgagattttctacccaaagaaaaaacagccatatatgaactataaatacagtatattatttttttctttgagataaacacaaagttatacaaacactaaaaaacaagcagaatcatggaaagaatgtgggcgacgttcatgctagctttgataattttactaacaacatccatacaagcaaagggtaatgagaaaggaaatgatattgccggtgctccatcgcctacattagcacctcaatcagagaatggattattacctaatcctgcatcttgtttggccgacgtaaaaacaattccgaattgtgtaaaagcagtgaagcgcttcaaactcagaaatgtcacaaagaaatgttgtgtcatcctactttatcttccggaagattgtttcggatatttgtttcctgttcgttggatctatcgtattctgcttaagattgcctgcaaaatactaggtcacatttgataagatttttgtattctttgctttaattaatgtcaacaatatgtaattgtaagtttgtataaattttatataatccatggacttttttgtaagatgatttatgaaatagttaataagaagatgttctgtgaattatagtttttaatctttatgatgataatgtgtataattcatgtaaatttttgataagttgtggttgataggtgaatgatttattaagagccccatatctttacaggtcggcataatcaaaatttatatttcttggcagagatttgaaggtagatataattctacttatgtttctttcatgggaaaatcaagtttgaaaagtttgtttttataacatttctaataattaacagttcctacttaaaacattccctttagtaagttcacaaccattgaatattgaatgtccattagtcaaaacttgctactttatgttttgtttctttttgataatgtggatacgagatccatatttgcttctttttctgatttttttttttttgggtttgtaattgtaagtgaattcagtgggtgaattggttagacataagttttagattatttgctatagaatattatgtgtaagtgtttaagttgtagctgtaactttttggttttgtagatttaaagaatatatgatttttacaataaatttattagttgtaactaaaaattatgattaataaatatttgaattttgtatttataaatgacatttttaaaattataaaattatatatcataataactaaaattatttaataaaacttatataataaaaacacaaatggaattatgaaaatctaggtaaatggaatttatataaattatttgtctaaatgtaatttatatgttattcaattttagattattagttgaaaataatcgtgacaaaaaaaattagaggagagaggaaaaatgaaaaacaacatatagcacaaaataataggacgtagaaaattaaagatttacagtcaaaataaaaagatttttttttttttagtgtaccttaaaaaaaaacctactacataactggcaacaatttggtctttataaaaatattatagctgtaaagagacttagaccccaaccaatcaatcactcagagtttagatatgaacaatccaaacagataaaaacaaaattgaaataacgctttattccatttgaaagaaaaaatgtgttgagtgtcgcttatagtatgcctttagcaaagaaaaaatggatatttatgctctcaagatcttctatttatatatatacactcctaaatctcaacacttcttgcattaaacgtcaaactagtctccttgcattcaatgtgattatttcgtgttgatacgatattttattccattagtttcagctgttttgggccaccgttggaacgaaagtgaagagttcggctctcctagttttgctttgcacagaaagacttgttgctctcaaagtgagcatgaattacttgaaatgaaatgatttattttcttctccaagtgaaatgaatgttattaagtcgtgggctcattaccattagtgatggggttttgccttcgagtcggatcgccgagtcgagttccgacaccaacatatgtatgaatattattatttatgaaagattttacctttcgagtcgagatccaacaccaacatatgtgaatatgaagatatatttctaactacaggaactatcagctatcctacgtcaccccacaaactataaaaactatagaattagctatgcaaactataataaggtattgcatattaatatgcatatacttggtatataacatgtataccaaaaaaatgtaaaactatatcattttcaagtctttatgaagtctaactacataagcaaatacaattaatgcacatattccaccataacgtctatttttgaagaaaaacttaaataaataagatttcaccaatctgttgattaccattagtggtccatcaaagtgtaattcgtggtaaatgacatgatacttaaaaaatagcaaaaatataaatataattttagtttaacaaatcaaaactcaatatggtttcgtaagaaccaaaactaacaaaatatttttttatgtcccttaattgttttgatcatttttgttttcgtagttactcttgatcaacatcatctccatatttcgtgtaatctccttcaactttggtatgcttttcaatggattcattggagaggacgaagcatctctatcaatgactgagattttgggtatgtatcttcttggtttaaactttatcctcttatgactagcttttaaaaaatacaaaatactagcagttagcgagatatgtacaatattatcatgttcaccttcaatagtgtttacaaagcttttcatgttatcatgtaaaatttggaaaatcagacactcgataacgtttaagtactggaagacttgtatataggtaaataattcttttatttcgtaaagaagatttgttttggaaattaaccttttcaatataggaagacttttattagtaaaatacatgtgttttttgaaagagaactcaaagctttttcggttacaaaacatatgtaatcgacatattaattttgtctttacttttgttcaaataaaggtaatggcatttttcataacatagatttttttcagtcaaagcatatatttccactagaataatagaggaggattttaatgtattcagattttatgagaagttacatggtccattatagacttatagtttattactcccttcatatcaagataatacattgttctaatttatatactttcatatctcataatgaatcgttatattaaataaaaagggcattaataagttaatgtctcttgaataataaatttgtatattttaattgtagttgatcttttttgttttttgtctaaaattgtagttgatatataagaaatcagttcctctatacaaaaacaagtttgggtaagcaaaatatatattaatatggggaaaactattttaagcatatatatactaaatgttatgaataaacatagattgcctttttaaaaaaggaaaagagaaaggagaaataatacagaatgcatatccaaaaagaacaatcatagaagattattaatattaagggaaaacttttattttagatgagaaataaattagacaaacatcaaacaactagcaaaaatatgcaaaaaatgttgaatacgatcatgatacctttgattatcatgctttcaatatttatacaaacaaaaggaaatgatcttgcaccaattccatcgtcggtatcaccagaacctcaatcagagaaccaattctttcttgacccactaacttgtattcacgatgtgaaaaaggttccaaagtgtatggacgcagtgttgcacttccgattcaaacaggtcacaaagaagtgttgttatgtcatattctctcttcccgaaagttgctttgggtttttgtttcctattccttatctctaccatcctcttcttaaggctgcttgcaaattacttactcaccatggataagatttttgtaattctttaataatgtcaataatctgcagtgataacatctatagaaaatattataacttatgtatagccataatttaacctgtatttttgaaatatttttatacaccaattttgatatcatgctcatttataatctgaacaaaatatgttttcgattaaactacaactccgattagtaatcatatattagcagaataaagtcttttaatgcgatttgtaaaaagtttacctttgcataatcacgttaaaaagagaagtgatacctcatttcaataatggttttgtttttataattttacctatacaaaatattagcaattagaaaaataagaaataattgtttccaatgaaacttacaccattttttgaatgatattaaaaattccacaacgttttaaaataattgatatttatatatttttattatcaaatatcacttaaaatttattaaaatattattttatttattaaataatattatattctgccaaaactattacacaaaatgtctccaatcaacatacgtttataagtaacgttattctgcaatgtttcatcttacaagttttcattttgcaggttttcgttctgcaacttaattatgtagttatgtgattatgtattgttaccaatagaaaccatagcatttgtcaaccatgatgaggcatatatgacatgtctaattttcttttctacccttataaaactgggaatactgctgagaaaaatgattccaaaatttatgttgacacatatacagagagtacacgtcgccttgctcgtaagagttccctctttcagctcgtctatcaaaccccttttaatcatcaatactttgtttgaacatgcattttgttcgaacttcttgtttgtcactttcccatttttgaacatcttaccgaatcacttgaaatatttgtcttttattcaccaaactcaaaacactgatataaattctattgtgtaatttgaatatcaacaccaacagcgtgttcgtttttaacccatacctgataagatgcactgcattaggtctttccgaaaggaggaggattcgaccacgattcagaaatatcaatttcattacaaaacggggacaagtacttgacattgaagttattggaagtgcgtaaatggtcatgtaaacgcacaggataagcgttaggatttctgcactcaaaaccctagacctcaccaattttaatggacttaattaggtttggtatactcgtgaagtggcagtcggtccttagtgagcttaaccatacaaaattaccatgctcaaaaacaacctctcgatgttttaaattggttgcgcgtttccaaatatgattgtgcttaagggtggaagatttgaaggtcatcaagaaagttcatagatgtaccatgatgtcaagtcttatctacaagtgtggaaaattccaaaatgaaatgaggtacatggccatatacgacatggaattggttgaatccgaggctgtgatcgtgagcatggttatgtgctaaatcggcttgacaaagtttagaatcccaactttaatatgatctccagctagataacgtaacatatgaacaagcgctttgttagtgactttgatctagccatccacttgagaatgatacacgaaactgatattgagactcatcctaagaagcttccaaagagatctctaaaactggctaaagaatcgcgtatcgcgatattacacgatgaaggatgaaatgcaatatgtaaatttctcaaaagggtaacagatcaacacttatcgtgtttgtcggtttcctacagaaaatgaaatgtgctattttcgaaaaatgatccaggtcgacaaagacagaatcattacgattttgtttatgaggaagcgccaacaaaactccatacttaagtacgtccaaagttgtgtgagaatttgtaaatctgccaatgctagaccaagtttttagggggcttttgtacatatgggcaaatttggatccaaaaatttgaagaaaagcacattccacttgggcttataagcctgggtacttcttgattcgagaaatgacgattttaccctaaatgtgttgatgagaaatcaattcgtcttctccgtcctgagaacaacaatcctcacggtttccaccttctgcaatcctctccgtcgtgataatcaaatttgtttattaacacggactccacactcaatcaaaatcattacttttgactccatcaatatcatttcgttttcctccgatgattcacacaacgtttctatgaccctttttcgatgaatccaatgaaattaattaaataagttttgatgcaagatatctaaaccctaagggatgatgtttaggcaacccaatggctttaattatagacacagattcatcaattgtgaatcgattgtgaataactgaaaacttattcaaaacaatcatgtacgcaataactaaaagcaatataattgtgaatcatgagcaaatcctaagtcatcttcatcgcatctcaagacccaaaatcttgaagaaggaagaatgaagaaggaagaatgaagaaagcataaggagagcaaaaatcgacgtctctgcttggtttttttttttccaacaaattgaaggttaatatggtaaaaagagaagagatagaagtacttgattttgggaataatgtgaaatgttcctaaaataacaaaggcatacacttttaagtgctaatcccataattgatccaagtttttagcatgcaaagtttggaaaatctgtcacccaggaaatgtttttagcattggaaaacttgtagtagtatataactatttttttcttatgaaaaacttgttttgcaaagcaactttctaatctacaaagattgtatcagtaaagtattttttttataagactacttctgaagagtagatttcttttacttgaagcatattttatacaaattataggttgtttgtcactactgccgtgcaaataataaaaagtaatgatttttcttacgtatttttttcaaagcattaaaaagagaagttttataaattaagagatttataattaatgtatcaaaatttttaattgtagttattttaattaatgtaaaagaaatttataatgtaaccaaaataataagtgtagttatttataaattatgtgttttcatatctataaagaatccttatattaaaaaagagaaataagttaatgtcccttgaataataaaacttgagtattaaaaaatatagttattttaattaatgaaaaagtaattgattaagtccctcaatattaaaaactttgggtaagaaaagtttatttagtatgtctctttaactttaaagtgatgttttaaatattttgttttgtgtcatttaagttttattttcaagttcctatgtaaacattaaatgtttttgattttcttaactatttctattttaaaattttttttattggttgaattagttttagttaatgatatatttgtgtaaaatatgcaagctaaataaaatctatatcatttttaatatatgttaaaaaaccttaaacatcaattaaaattaaacagagaaagtatatattaatggcaagagaactattctaagcatgtagtacttaattgtagtggataaacatagattgccttatctaaaaagaatagagaaatcatatagaatgctacgtgataattgaagattattaatactattttttttttgttaagagattattaatactattaaccattgttttttttttttaagatgagaaacaaactatacaaacatcaaacagcgagcaaaaacatgcaaagaaagttggcaatgaacatgatagctttgattatcatgctatcaatatttacacaaacaacaggaaatgatcttgcacctgctccacacccgacaataccttgtcttgacaacgtgaaaacaattccaaattgtgtaaaagctgtgtttcacttcaagttcaaagagatcacagagacgtgttgcactattctacttactcttcccgatgattgttttgggcttttgtttcctattcctcgtgtgtaccattttcttcttagttctgcttgcaaaaatatataaacaccattgataaagttttgttgatattttctttaatcaatgtcaacaaaatttactaataatatttgtacaaaaatctatataatatatggactattttaaaagatgacttgtgaattagaaacatttctcttactatggctacacagcgcaagatttatgattttaaagtctcgaaaacatcacaaatcttcaacaacatcactttttgttaattcgttttttttgtctgtctaaaagaacaatgtgaatatggattcttattagtttttataatgacttgatcttaagttgttgtgggatctgtagaaaatcatgatcaaccatgtaggtaacaagaaagtgtgggatcttaagttttctttgttatgtagtcgcaaaataaaaaatgatataaataattaacattgatacaaaaaacaattcaatgagaaaattgaaaaaccagcgtagtgatcatgtgagctcaatagttgttggaatagagtattaatgattaaaatttgaaaagtgattatagaattattggattataagagcgatggatttcttgatagtagctctataactagaaattaatatttctattttgttgtctaaatatcacaaattggaaaaatagaaaagagcctcatattggaactgtgaaacatggaaaatatcataatattcgtgtctagttttaaaagtcttgataccaaattatgatgtaaagcaaagaaacatgtccgtactaaaatggactagactcaggttttgggtataggtacaatgggcagtggttcatactctctccatttcacaaagagtctcagtttggagttcgatttttctttttgacaaaaactgtcattttacattttttatgcaactttttgaattttaaattcataatttacatttaactcaaaactatgttttctttaaatttcagtcattttcaattaaataattagagatatttgtctacaatgcctaaaaaacttaaaaacttataagattaggtactttcacaatgacttacgaaatcaggtacttttacttatttgcagttacgttactaccctcgcctcatcatctttctacaaatctacattgaagcatcttaccattatcaattacaattgaatgaagatttcggaaatgacaaatccacactcttattgttgttaatgctgttccgatcggcatcaatagccatctcgaagggctttgaatcagacgtgaaagtgtaatcattgcctctgtcgtaagagaaactgaatctatcgtaagagaaattgattctgttgtaagagaaactgattctgaagggattggtgtgaggatttggtcggagatggtgcgatgatattataaatggggaagaagaataacggccgctagaattggaacgattatcaatttgggtttttcaaaaagaaaccccaattcaagatttgatatttgggttccatatatactccttagggtttagatttttttaattagcaacagtttaaattttctggaaactgaaaattaagaagtcatgaagaagaagaagatccacgaaagttgaaaacaaaaagaaatctcaatcaaagatttggtgtttggattccctatacactatcattccttagggttttagatttctttaattagcaacagtttaaattttatggaaattgaattaaaaagctatgaagaagaagaacagtaatccacgaaattgaatcaaaaagaaaaacaaaatccacgaacaagagaggagaagaacagtaagggcaaatcgtcattttcaagggcccaaaattcctttttccaaagcccaaatagaaagtacctaaaatcaaattttttgtccaaaaagttcctaaattgacaataaccccaaataattagtattaattagggacacatatttatttatttttaaaaatttgtgttagatgtgtcaaaatgacatttgtgtgaaacataagaacaactccaattgagagtgatctcaagaaaaagtgtgagttttcttgttaaaattgccaaaaaataatgctaaactaaaaataaatgagagcgacaactctccagagagtttattttgtttgagagagcctgccatgtgtcgctttttgattgatcgtgtgttcttgacaaaaaaaaaaagaaggagagattatgttcagttattctttttgaaattagttttaaatctgtatttaaggaaatgaaatatgcatggtgatacatataagggaattattactatttgttgccttacatataggaagtttgatagaagatttcgtttaaaaatattaataaagacaaataataattaaatctattattatcaattttctttttaaaataaatctgatgatgttttattttctaaaaacataatattttgacaaaaaataatatgttttttgtatattttcttttcataataagtttttagtacatttagaacatctaaggtatacaacaatatatatatatatatatatatatatatatatatataatacacccttccaacacatacatatttcttaattaaaaactcgcttcgatattttcaaacgctaccgtttccacatactcgtttctgcatacccgttttcaattccatacagtttaggtggtaatccggtgagtcatagccacgttattttaagttattgtgatatgttattccattattccggttttttcacatctattttaaaatatttcaaaataatgatgtctaatgttttatactttgtaataattattaagttgtatgaaataaaaaattttgtattaatatttaacttttgtaaaagagtctatcactggaatatgaaaaactgaaaaaaaaaagaagctatctttttttttttggtaggaaacgggaggtaagccctcccgtgatttattacagaaaaattaaagattacaaccgaacttgtcttggacactctgttccagactcatcctctctaaacaccgagactaaagagctcggtaaaacatcaaaaacatgaaaacctaacggtaaagaaaacgcatagttagccaacccatctacaagacgattagcttccctatacacatgagaaatacggacaatccagtcccttacgagaaagccatggcacatgcgtaccaggaaagacaacggatgggccgccccaatccctgtctttagaaaccccaccacaacttctgaatctacttcaagctctatacatgtaagcttccgctcccatgccatatacagcccgtagtaactccccacaaccccgctaacggtgctgaacaacgccctatgttcaacgcaaagccaccacaccaaataccattctcatccctcaagacaccacccgctgttgccggacccgggttccccctcgaagcgccatcagtatttagtttgaaccaacccacacttggttctttccaccttatcattctctccactctggcccctgcgatagctctccctccaaaagccacattcgccttagtaacctctgccgcaatgtccttaacaaatttgacacgatctcggcaaactctgttctccccaaacacgttacaacaacgccatttccaaccccaccataaagccatagcgaaggttgtggcccaagagatcccatcaatgacgatcccttcccgcagattagcataaatccattccagcaaagtctgagtaaagaacttgtgacgtctctgcggagggacaatccgttgccaaattcccgacatcgccggacaatcccgaagcacatgaatgatggtctctatcccacctttgcaaaccgtacaaatatctgaatcacagatgtgtcttcgtgctctctccgaattagtcataattatctgcttgctcaccatccacaagaaagtcctaacccgttccggagcgaccactttccacacccggcgatagaaactctccatgtcctgccgcgggcataagtcttgcgtcacaaacgaatacgcagaagagactgtgaacttgccatctggactctcaccccatgaaagtctatcacgtgcccctgtgaagttatcaactacgattgctgccagttccatccttttttcctctgaaacccacagagctattcttgtcagatcccagcctgcctcttcccgccacagatcccgtacaaagagttgctcaaaacccaacggtaatgcacccacaacgtcatcaatcaaagatttactcgacaaccacttatctgtccagaatcttatagatctcccatcaccaacttaattgtactcatagaatgaacggaaattgaatttagcaccgccttagtaagagtaagtcttcctgcgaagcttaaactcccacctttccaacctgccaacttcgacgatactctctcaagcacctctttgaacgtgtctttatttatccgtttctgaaggaccggcatcccaagatatttacctagatcccgtgtcgattttatcccactctctgtagatatcaaaccttctagatcccgagacacgttcctagaaaagaagattttcgatttctctaagctgactttttggcctgacgccaaacagaatctttccaacacccctcggataatcctgatttgagctactgacgcctctgctagcaaaataaggtcatcagcaaagcaaatgtgagagagcttcggtccgccttgagacaggctgatcggcttccattttttctccatcaccgcattgtcaatcaagtgacatagtctctccatgcacaaaacaaagagatacggtgataaaggatccccttgtcgaagtcctcttaacggcgtgaaagattcagtcttctcaccattccatagcaaactcatagaaggaccagacacacactgcataatccaattcacccaatctccggataaaccagccgccaataacgtatcctctaagaaatcccaacgaattctgtcataggctttctctaggtcaagtttaagaagcatccatcccttcctgcccttctttcgttgcattgaatggactgcctcttgaacaaccacaatgttatctgtgctcaaccttccgggaataaagcttgattgagctggccctactagttttgaaataactcctttcaacctccccaccattgtcttagtaatgattttgaaaagcacattacacaaacttataggccgaaactgagtgattttttctggtttcaagacctttgctatgagcaccacaatcacatcattagccttagcaggtagctgtcctgtttcaaaaaaatccagagcaaacttactcaccaactctcctacgacatcccagcaagtttgatagaaaattggctgataaccatcaggacctggggccttgaatttacccatactacgcagcacctgttctacctctcccacagagaactgcttgttcagattaacatgatcagtagtagatagcctcgcaaacccttcttttggcaatctgtcaacaaccggatccacatcatccagcgaatagagtcgtctatagtattcaagagctaacttctccagttccgccttatccacaacccatctatcctcttcgtcctttaacatatcaattcgatttctcctgcgttgaatgatagcaaaggtatgaaagaagctcgtgttcttgtcaccatgaaccacccacttctcacgtgacttttgataccacaacatctcctcttgctcaagcaccatgtctagctccttaattaactcagcttcttgcttcaacagatcatcagtttgcgcttgttccagcaaatcctggatgatggttatatgcttcagtagcttctccttcttcaaatggatatccccaaaaacctctttattccatctttaaagagtaattctcagtttattcaacgcttcttgagttctcagctctctatcccaagatgtcaaaagcaactctttgaaaccctcatgttgtaaccaagccgcttcgaaacgaaaaggtcttctagaaggatcacatcccgtcttcggcagcaactgaagatacaggggagcatgataagaagccaaacaagggagatgtgtcaccgtagcctcctgccatttcagcctaaagtgagcacaacatagaatccgatccaatcttttagcaatgtaaaactgttgggatttccctctcttccatgtgaatcgatttcctttaaatcccatatctatcagggacaactcgtttatccaatctccaaatgctacagaatccggggacaaacaaccattaccgcccgttctttcatcaagtcggactattgtgttgaaatctccacctatcaccactggtccatctattcccctgattacttcacgaagcttctcccacaaaccactccttcggctaaccgtaggagcagcgtacacaactatcaaattaagtatctcgaactcattctctatacgcgcatagacgaactgctctgaagactccttaatctcaactttcccaatttccgacctccatagtacccaaatgccacccctctggccaactgcgtcgattctgaaactattttcaaaccccaaaccatgacaaatccgatctgctctcgcccctcctgcgtgcgtctcaaacaccgccaacaaatctgtcttgtatttcttcaaaagataacaaactgatcttcgaaagttaggtttattcgccccccggcaattccacataatgcaattcatcattaataatcgataaagaaaaagaataaccggggcaacccgtcacagaagagtgagctccgtcgataacgctggcgcggccccctgagtccctcccgccacaaccactacattatcctccaaactcggcctaatctcctccgccacttccatgccgaccaaatcgggtttctcatgtccaggttctccgtcaactccattgaagaatgaccctcctggtcgacccagacttatctcttctatcctcacacgtttaccgttggccgaaagctcattactctcatgggctttatgactccaggcccgcctatcccgtagcccttctctaattactcctttcccttttccctccgttgtagcgacaaatttggtaaccttaacttgctccccactcctatcttggaccactgaattcatgggatattcattctccttattatccgtaacaccaataatttctttccttctcccctctgtttccacatcctctcccaacttaccaaatgagttcgacgtcacaaccaactcatttccttttttcctcacatgatcccttgatttgcgattcacattaactctagccccaccttgtgcattcacattccggttaacctgagccaccgtcttcctttgtcttaccggggtgaatccatccccatcatgtgtaggaacaaccggattctgaacatttttggtcacttccacactcatgctctcctcccctattccatgcgagacccccctaggacacttatgaacaaggtgcccatacataccacactgtgagcagatgttcgctaacccctcgtatgagacatagaatctctccccgttaaccaccactgttcctttaagaggtttctgcagatttacttctacacaaatcctggcaaaacgtcccctttcaaaactgagtgtgtttaagtccaccttaataggtttccccaagctattagcaatccctagtaggatgtacttatgatacagattccatggaaagtttgaaatccgcacccacaccggcgtcgtaacaatctcatcccgcaagggatcaaaatcaggcgaccaagcttgtgcgatgagatagttcccaaacgccttccacgggcccccagtaagcgctgccagatactcctcttccatctcaaaacgaatcatgaaaaattgtcgtggaagatccatgacgtacattgcaccgcaaggcttccacaattctcttaactttcgattcaacaccggcaacgaaatatgacgacccaacactttcactaccatacaccttttccacagaccattcatcgcatccaccacttcttgaccaatcgtaatgaccggctcaccatcctcaccattaggaaactccacccgtagtctctctgcaacaaactcctctgagatgacttcttctgggatcgggactcctcccacactagtccccttaactttctgcacccatactcccggatcatctggtggtgctcccggtggacgagacttcacaccaatatccaccatggtagcatcccgctcccctgcgctcgaaaccctagactcgcccattctcaatccagtacccgtaaaaaaaaaaaaaaaaaaaaaaaaaaaaaaaaaaagaagctatcttacaactatttttttgaattttaatcataaaaaaatatattaagagcccatagaaaaactgtctccagtggaatacttttgttaagctcttaagcaggtttggcccttacggagtttccaatatactaaaagctcgtaagcaggtttgacccttatataaaattcagcaaactggtgctctatgcatcaattatgataagtcttatggtgcagtggtttatgtcacaaatgttgggtctatccttgagcactctttttttttgaataaaaaatattttaattatataagtaggacatatatacataagagactttgggctggacatactcataaaaagccatgcgaattggcctggcacaactcgtaattttatctgcacaaaacagatagaccaactctgctctgctttcttatggtcgggacccgctctcagccaaaaaaaagcaaaagtagcctggcaagatgtttgcacacctaaagagcagggaggtttaggcctacgatcgatcaatgaggcaaataaggtcagctgctataaactaatctggaggttactatcatcaaactctctttgggcgagatggatacacatttatcttatcaagagggcttctttctggtcaataagcgaaactactacactgggatcttggatgtggaaaaagttgcttaagtatcgtgattcagcggctggttttgttagagtaacagtgaagaatggacttggcacctctttctggtttgacaattggtccctacttgggaaactaattgacattgcgggacatagaggatgcatagatatggggataagccttcactcctcggtggcagatgcatttgaatgtcatcgaagaaggcgacacagacttggttatttgaatgatattgagactgcgttgcaggaaacacgacaaaaaagagtcgctggagaaaatgatgtagtactctggaaagggagagacgaccggtttaaaccggtttttagtacgagagaaacttgggacgcaatccgagaagccaagccacgaacagaatggtataagggtatatggttcgcccattcaaccccaaaatactcttttatctcatggcttgcaacaaggaacagattggccacaggtgacagaatgctacgttggcggactggagtgcccattatgcgttctctgtcaagcaccattagaagaccgagatcatcttttctttagatgcaagaactctgaggaggtgtggtccgggctaagtcgtactcttcttggcacaaaattcacaacaagatggagtgaagtccacaagacactcatagacaaaaccattggaaaaatcaacctcttcttaataaggtatgtctttcagttggcgatttactcaatttggaaagaaagaaattgtcgaaaacatggtgaagctgaaacaccatcagtccatctagtccgaaatcttggcaagcaagttcaaaaccgcatctcatcaataagagagcaagggaatcgcacctacgatgcatgcatgagcgtatggttctcctcaagataaatcataatagagtcgtagctcattagtctctattcttttgatttctatgttttaaatacaaactttctactcaaacgatgcacttgttgtacaaaagtttttcgaataaattttaaattttattaaaaaaaaaaaaaaaaaaattttagatatcaaagtttcaaaaaaaagtttaacctttctacgatgaaaaaataaaaagtaacaaactacgaacttttcatagtttcttttagggtctttcaaaattaaaacatgaaataattacaagaaaaagaaaaagaagaataagaagaataagaaaagacatagcgtatgttttgctgtgcatgcatggtcagaggtttcgtcatgcatgcagaagtggacccgaatagcttcccatcttcatcaaccgagtggacccatctgcaacaccgagttgactcagagattctctcctgagtcaaaagtctcatatttcaccgttttcttcgccgtgcttaaaccatcctctcgtcacttgaatctcatacttcacgtctctgcacttagagaatatcataaacagaggaatctcgatatttctcaaaactcatataacataatgtaatttaccttatagtatacatgaacaatacaagattactggttcatgtcggcggttggtgtgccgtccgtggaggccggaggagacgagtctggaagattatggttgaccatcaataacggccaagaacggtgttgacttcccacaccaagaaagtctctcgtgaaacctctttcatcaacttccttagttttgatattctctgcttgtttgttgttgaagatagaggtcattagaccaaaagtcttgctattgcttgagcttgatgatgatctctttgatcccatttgagctgccttttgtagcaatgccgtggctgacattgatgctatttgtccaccgttttggttataattattagtgttgtttcgtgcttccgaagagaacaaagaaccattactaatcacattcttcatctcatgttcttcttgatttttggagattcccctttggagaatgttgttgttgttgttgttgttttcgttgagaagccattggtgagatgattgtccttgtaaatgccatagattttgaagggagtcggatgcactacgaggtgatggagatgatgaggacgcaaaaacgttggttggtaaggtttgtcccaaaaaggcaatgttattgcgattggtattaaaaccaggttggtccaattgtgacgaagtagtattaagctgtcgttgttgatgattttggttgatatttccatggttgacttccacatccagggcattgttcaaatatgcgggtgctggtggaactgagacaaatctagcactctcttcagctaaagcgtcacagaatgctctatgtgtgatgaaactatctttcctgttccaatccaatcatccaatatatactaattcaataaagagatcttagctgattttagttaaagccaattgaatttaaattaaactaaatgttgtatgacattgtttttcatgaaatttaaatttcgctctttaacaaaaaaatttgacttaaaaaagggtgttgtaatacatacctggaaaagagggtaccacagtcacatctgtattctttagtaccacaaatcttgctatgagctttccaatcggacatgacagcatatttcttggaacacttgtcacatttccacttcttttcaccatgtttcctgctgaaatgcttcttaattccagttaagtcaccaagggctcgggccgggtcatggtgtacgcaagtcttctctggacagatgtacacttttttcttcacttgctccttgtttgtcctttgctttagcttccatggaaggttatggcctctccggtgaagctgaaggttctggtctctcttaaatcctttgttgcaaacctcgcagatgaatcgattagttgtcatgagggagtttggtgatagagcgatgacttctgcatctggatctggtgtttaaatttcatttaccaaataagaaccaatgaattaatttatgataaataaaaaagagatccaaagctggaacaagaatattgttcttgatcgaaaaaaaaaaaacaaattagcaagaaattcatctattttatatgacaagtcctagatttagattaagtatttatatacatgcctggatttcccgggagatttctcttcctcttggctgagttagaggaggtaggattagggttagggttaggatttggagcgatgtgttcttggtgaaggacatagctgggaaatgagaggggatgatgatcatctggcatcatcatgctgatattggtttagttgaaagacagagaaagagagagtttctaagtaagaagacaaaacaggtggacagagagatatacagaaaaactctttaattcgtcaatacagttctctactaaatcaagtaaaattctgagagctagcaagaagacagagagagttatgaagaagaaaacaagtaagaatgtaactaattatatatttccattatactatatagagagagttatttttatatacacctaattttttaaaaaatatataaaatttatgattttatttgatttcccattataatataggttttgtaagctgactattatattttcttatggctgttagcgtacaagaagttcaactattgctaatagtccttgtttttttatatatcagaaattcttatttcaattaattgatgaatgttttacactagtttcttaataaaaacaatcccacaagacttatagagaagtaagcactagatatttctaaaagtttgatgacttgaaaaatagggatgcccattttttccaagaaaatttcaaaaagaattttgtttttgattgtttttggggtcgtcggtacaaatttttattataatagaattttgttttattatttgtgatagtaagcttttggacacttgcaaagagtcctgtagcataaaaccaaaaagaaagctggcgaagagggaatctctctctcttcacacacgactgttcttcttacaagtcggtcagcgatagactcaaactggaccactttctatctctctaattctctatatactctcccatctacgtaacgcaaagtatacatacgtactcaagtcaagtgtatacgtacaatacaatctacaaatacataaatacatatagggtgcataatttatctatgaggtgtgtaaactttatgacatttctaactgtaggctctttggatttttcggagtctcttttcatcccatatatatatacaatgaattcatttatatatataacaaatcagttcgataagtatatatgtaaagccgaggagaaaagtataaataaaaaacatatagctaggttaaaccaaggccatgtacgacgactacaaacaacataagtggttttattcagacttgaaaacaaatctttttggtaattaaccaaaataaaaataaaaaattgagttggaaggttttgttatcctctttgttattttaaagctaacaattttaagatactaactaataactcagaattccttaactaattctgtacagtgtgtgttttagcttagataaatttcttttacatcaattaacctgctctagtctcccacacgaggatattatgagatttagatccattaatcaaaaaaaaaattaatttacattttgaatttttaggtaattatatcttgagatcaatctcaatatctcatgattctttcttataatatctagagtctctaagaacctaagttcctaatcataaatcctaactacttcttgggtaagaaagaataaaatccaaaagaagtgatgtagagttctaaaatagacacaagggtcgacaaggtttggatgggtcccatggaaaaggaagatagatctcatctgcttgttcagccaaagagatactgttccttctccctatccaaaatctgctctgaattttcttattcactttagttttcctttagaaaaccagaaatgattttgatcattttgaatagatcataaataaggtaatcttgtgctagaaaaaaggaggaattcttaaacatagttaatgatcatgcaggttgatgatctccctagtctagaatttgaagggcatcattaatagattaggataaatggtgatatattatatatccaagacaagtccattgattctgccaaccaaaataatttttggattttgtttgtcttattggaaaatacaaaccataatataatgacaaacaaatctttaaacttatatgtctactttgtttatgtactctctcaaagcaataggaagttcaaagtgtctgaccaaaataatatcagctaggactaaactagttcgtcttgggcttttcaaatttttgtagaataaatcattttaatcaaaaacataaaagtggctaaaacataattgatttgggaaaacaaattcctacttcactaatacaatggtggttttttctaggtctgggcgttcggttatcgaatcggatttggtttggttgtttcggatttcggttattttggatttagattctaatatccatatggataattataaaattcggatcggtttcggtttagatattttggattttggatcggtatgaatatgatatttaacatccgattgaacccgaataaccgatattaatccgaacttaaaccgaaaaaacgagctatgcaaaaaatgagtagatgaaatgaaaccatagcaaagcaaaccataaagtttttgaaaccaaagtgaggcataaactatgccaatacatcaaagttttgaaagaaaagtaaaccataacatcttaaagagtgaagaagtagcagaattcaattggaaagtagtaaaaaaaaaagtgaaagagagtgaaaacaagccaacaacagcaacctcaagcttcttctttgccgcattctcaaacttcaccatgttcttgaaccttgatacaacaaaatacttaacttcttaatctatgaaatacatgaatcaaaaacatcaagtttaaaacaatttaccttatagccgattaaaaagtttgaggataagagtcttctaagcagagttgccatcaaactctgtaatcaagaaaaacaagaaattaaaactgtgaacaattaaaactattaagagagaattgaaatagagcataagggatgaatttacctttttcaatgttatctagctcaacaatgtcggcaagcaactctttaatggtaacaacagatttattacctaagtgattcacattcttcatccactgctctgtgcacaacaacactttaaccatataatgagttaaacaactcctatgtggctctatgactcgaccactgttactaaaagcactttcagatgcaaccgatgacacttgcattgcaaggacatccttagttattgcagacaaaacaggaaacctaccacaattgagcttccaccaagaaagtacttcccactctaatccaatgatagttttaggattctccactttctccttcaaatacacatctaactcgtccctaccatcatcaaccccaatctcatcaaccaactccttataagcaaagtccatcctctcataccccatactatcagacatcaaatcagagggctcaccttggctagcagtaatcgaagtctgagtggactgtgatgatggaccactaccacttgatgttttctgaaaacgactactatactccttaaacaaggaagtcaaaacattgttgaccttttcagccatctctttagcatcagtagtatctttcccataaagctttgcaaaacacatattagcaaactgcattttcttccttggatcaaagacacttgcaactatcagataaacattaatgtttcttgttccatcccaatacttaacaaattttcctaacatagctttagccttaattttcagatccctgtcaaaattattgcctagtgacaccaaattcgtctctatagtcactatctcaccatagcacttataagaagctactgaattagaagcagacacgaccaaagtggagttgtagaatatgatcagaaatctcactaacctctcgactgcattccaatcagctcttgtaggtggcccgatcttgcttttccatcgtctacttcattgaagtagtcattatacaacttatcttcagcttccattttatcaaatgccaacctgaactccatagcccttttcagcatcaagtaagtagagttccaccttgttttgatgtccaacggtaaactccctctagtcatcttgcctgagacaactttctggtcaaatgaatcacaccttgaagtagaagacctcacatactgcactgaattgcgtatggctgccacatgatcacccaattcaaccaaaccctccttgacaattaaattgattatgtgagcagcacacctcacatgcataccttcgccttctaaaacaaatgcttcattactccttaagctgaatgtttcttgaaatttcttcaaagcagaagtgtttgttgtttcattgtccactgtgatagtgaaaatcttctctattccacactcagccaaacactcaagaagaatccttgctattgttgcacctttgtgatccgtaatgtacttaaacccaatgattagcttccttaatttccaagcagaatcaacaaagtgagcagtaatcaccatgtaactagcaactgtagctttagctgtccagatgtctgttgtcaaagagactcttggattagtagtcgcaatccaagtcttcagagatgctttcattcccacatacattttaacaatgtctttcatacaagttctcctagaatgtggcgcatagaggtttaccttttcacataaatgtttccaagccgcgctttcaatgaaagaaagtggtaattctcccagcacaagcatctcatttgaagcttctcttaaaatctcctatgtaactttcccactctgaagatgtccctgattgttgaaaacagtttgttttgctttctgactccatgcttgataatgcttgcagattcgaagatgattcttcaagtttgaagtcccatctttagaatcacatccgtaggttctgtgacaatagttgcacttgcatctcttaggattatcttcaaatctcgtgtaatggtcccagacaaacgacctttgacttggtttctttgtcttaggtggttttgaagtagctccactatcttcctgaacatccttccttttgttagcagcatcactttcaggttcagtcactttctcattccccacatcactgttgcttggaaatggtgatgaatccatctaaacataagaataatgagaagttttaacataagaataatgagaatccatctaaatatacgttcactactcaaaactatactctcacaatcaaaaatatactcttgctactcaacaaacatccattgacacaacaagaggattagaatcgactaagaatttaactccaacatacacaaatttttaaaatccaaacaaagaatttatcattagctatatgactaaatcaatttaaatgagtttcaattttttttctaatgaagaagaagaatcaaagaacaaagacgatagctaatgaagaagaagaattgaagttcaaacacatacccgagatcgattgcttgatgcttctgatggaggcgattgtgacgaaagagagcttaagaattccatattgaaagagcttagggttttatggttataatctagaggaagtggatcccgtattgctaggaaaatcaagaagattagggaagtggatcgaatcatattgtttgataatcatcataagggaagtggatccagacttcgaaggctaaagagtagtgtatagaagaagttcttcggttggtttcggatagccatattatttcggttcggatcggataaaatccgataaccgtggatatagaaatcaataaccgaacggttaattgagcggattcggttcggtttttaatccgattttcccagttcggatgcggttcggtttatcggattcggattaaacgcccaggcttagttttttcagtattgggattttgaaggtattatagaatgaatgaatattttttgtttatgaactaacttgacatattattttattaataacttagttgaggggtattttcatgagaagaaattatctgagggatttttctgttgaggtttaaaatagaccagccaatacttgagagagtttttaccaatatccttatttaaaatttatttgaagattttatatcttttgctattttaatagacttactgataatggtaaatttatgaaagacaaaaaagattttttttcaaagtttttgttaatatttttcttaaaaagaggtctcacacaagctgacaccatccgacgccataatagcaaccattgtacatgtcttccttctttattggctgaggactggaaaccagcaaaataggcagcttattgtacaagtcaatctaaacattgaccactaaatatttttgatttttatttgtagttttttggatcgacaaaactcaacgaatataccgataaattctacaacgcatggtaatgagactgaaccgctgtaaaaataacatttaaccattagattaaaataaatttctcatgaaagttgttctgggttcttattatgttttgtgtatccttgtaatatttttataagtaatttgcatggatttctttgtttgaaatattatttacacaagatttcttttagtggacttaaacttttattggtatgtgacaagttatggtccaatgtgagcaaacagataggcttcttcagtgtccgatccgtagagcatcttttctcagttcgattaaaagacgcaagagagaaagcaaaaaaataattctggttatagattccacaaaaatcattaagaactaattcataagtttactgttctaaaatactattattatctctaatttaatgaacaaaaagatattgtttctctccacactctagcactttctttttcgtaatctctttacttgtatcaaaacacttttttcttttttttttaatcattttcagtatcataagatatattgttttcttccatgttttcttcatgataatgtcaaatatgaggtttgtaatttgagcgacaatgcttacaaagaaaataagccaccactaattatgaaagtttcttgtaaggaaatcttttttgtaaaattttatatagatatgtgactatatatatttgttcttagcatataatttcacattattttactctaaaacggtatctatttttaaaacaaagataaattttttactagttgagaaaatgaataactttattttcaggaaaaaaaaaacaaagataataatacaatgtgaaaaaatctaatcgattagtttcttttatataatgaaacatatcacaaatggttaataaaatacaatgtattcgttttctcccaaaggtaagatgtcctagtaaaattaacacatgtatgcacaaaatccaagaaaaaaacaatatagatcgtctactaaaagggtcataattatacactattataaatactatgaaagatgttacgattaccatcacaagacagactagaaattctataaacacttgaaatgagtgggaacaagcgagtgtctgtgtccatcttagtagtgatgataatgatgctatccatttcccaaattacgaaaggtaataatgattttgcctttgctccaatgtcaaaaaaaggattgttgccaaaaccattgtcttgtgcgacagacgcaggaaaaattccggattgtgtagaagcagtgaagcatttcaaatttaaaaatgtcaaaaaagaatgttgctttatactactcggtcttaccgaagactgttttggaattttgtttcctatgcgttttgcgtatcgtgaaatgcttaagattacatgtaaattgataggctttaagccaccttcttattaatttgttgttctcttttttttttcaatgtaacacaagtttaatttatgatattaatatttataataataatcatgggcatatttatttataatgatggactgatacttgctcttgggtgtgtcaaaatggataatccaactgaatctaaccaatgatcaattggaatgagacacaaatagtttatgagtttactaatgaggttgaattaacctgtgagcccatttaattttatgggcaaatactaagaatctatatcaatgtacccaataaaataataataactaactaaacaattttcataaacataaaaaaattaattaagagttatgaatataatatattattattttaccatttttattatcatcatcataccatcatcatattatcatcatcacatctttatctatctatcataacgcgatatgattgattatataacttaattacgtttttgtttaaatgtttggtgaaaaatctccaaattcccgtgtttagagattttaaagaatcatagtgtacaaattttggagtctcactattctactcggtctttccgaagattgttttgggattttatttcatttgtgtttctattatcatatcgtacttaaggtgacatgaaaattaatagacatcttttaatcattttttttaatctttaaatattttttcatgtaacagtaattcatattattaatatttataataaaattatcgttcttttagtgatttgttaataaatatctaaaagatattaatgatttgttagatgatcatgttgtaacttgtaagcacacaataagatatattaaatattgttttgctcctttatcgaattactagattctgacccgcacgttcgtgcggggtaaacgttttaacaaatgtctttatataaaactcgtgttaatatattttgtttgttgggttagtgaatctatatataccatcaacttagcataataattataaaatattgttctgtgtgtttaaaaatagtgtggtgcatcagtttgtattttctatttaataagtcttaactctttaagtttagaattgaaagttgagagttttaaaaataaattagtaatacaagtgttatttttgtctctgtttatattattgcaaaattgtgaattctttaaagaagtaaggttattattgaatgagatttatagttttactgattctttatatgtcagttcaattcccaagctgtgaatttgatgtttgaatagagatctttgtccaagtattgtcaagactcaagaagccagatcgtctatatgtaattattgtcaattggatatccaaatttttgttttcactgaattttatcaaccgaatttgatttttttaagtttttctcattagctacagaagcaagatgaacattaaaattatagtttagctagctatattttttaaacccataaatattattacctgaaaagaattctacttaatttagcttctgaatatatttcaatatactacaaatataatgatgttcatggaagaagaggattagcaaagaaataaaaactgatacgtacaatgattagaaaacaatagctattgccaaaacattaaacatgttataaacaaaataagaaaaggttataaacatgttctaggcatcaatgatttgaaaacaatagctattacaattaataatatgaaggaggcatcacatattgtcaataggagctattcaaaaatctatatgttaaaggttagtgagatcataatttatatacttttgtttattagatttgtatatttacatacggttattaagtcgaattgtggttacttcatatagaaaacattgttattccttagtatgttaaaatgaaagtaacaaataatcacctttactcaaatgaacgattttcacttgtgatgttagcaagattggtgatacgaagatttcatccattgttagaaatgagaaacgaagtagcaagatttgtcttttgcagccaattttaaaaaatgagtagcaaaagattagagaggttgttaatgacattatttgcagccatttttttgtagtagtagaaaaagtggagaggttgtttgaagagaccccttgtttgaaagcttaataattcttcgaaatggtattagagacattttatatttatagaaaacagaggtcggctagggttaacttttttagattaataatacttgatttaagaattaatcaatatatagttattgttatatttgcatcttttggtaattgttacgaatcatagtgaaatcaatctttaaatttggatttttaatatttagttattgttacaattacaatatattctaatttactattcggatttcgtaattaaagggatatgtttgttttggtaatatcttttaattttgttaagattaccaaatctcaaccgtatcgatatacaaaattgctaaattctgtttcgtctgggtctagcccatgatccgcgcgtcgatccaccaaagaagtccaggatccgcgtcttaattcgatccagttgcccatgactcgtgattttttttaatttgtaattatatttttacttttgaacgattttttttctttactctttaaatgtaatatttccaatggcattctttgtaatatcttacaactaaaagatcttttcttattcagcgatttttgaattttaaaaaaaaaatcccgcatatataacccaaaattctaaaattgaatttaattatcaattgcaaattatgatttttattaatagtatcaagcaagttttaagcttttttataataaaaattagttttcaaaatgttaattaaatctcatggtataactataattggatatcaaataaaaattagttttcaaaatgttaatttcaaattttcgtccataattaataagagagagaaactgattttttttttggaaactaataattacttaaaagtattttctgtttttatttaaatatataaattttgtgattactattacgtctttaatgaattaatttaaaaatacttggaaccaatagcattttttgtaatatcttaccttttataagattatattatatccaatgcttcccaattaatagtatagatttagatcaatacattgtcaacctaaatactcttatttagagtcaattcattggacaaaaaatctatagtaagaagatgttcgccagatgacaatatttaacccaaacaaaaattcttgagagtctctatgagtctcgatcaatgttgagttctaatggaccattgaccaattttatagaaaactaatccattagtttctttcgatacaaataaacttatcataaattaaaatatggataataatttacttctaacccaaccaacaatggttaatgtaatacattgtattctctttctccgaactatatgatgttcgaaggcaattaggtaactaacacatgcatctacacaatccaaaaaaatgcaataaatataagaaaatatgacatcctaatagcaataatggccacaagataaaatacaaattttataaacattaaataatgagtgggcatgagaaaatagtgtatgtccatcttaatagtgattccgtcattttctaaaaataaaaaaaggaaataatgatctttcaattgatccaatatcagagaaaggattgctatcaaattcagtatactgtgtcgtagatggaagcaaaaattcaagattatgtagaggtagtacaacggtaattctatttattgataatacgaccatatgtttttctttctgtattaaccattaaattaaacacgaactaacattgttttggcctttcaaacgtatcatactttaagacttcttgcaaaataaccacaagtaattttcaagagatattgtggtttaatatatgaaaactttcaatatataaatataaaaaaaaaacttttagatttattttatagtaaattaaataaatataaatgtagtatatttgagactatctttaccaatatactgactaaataatcgcagtagttatttttaaactcattataatttaaaattattataagtggtaattatgtcatatacgatcatatggtattggatatatttggaagttaaactaaccctctactctacctacgtatctgggatggttgattatatgtataaataaactataaaactgtgtatatatgaaagggactgaagagaaatgaggaatatcatgttctcttaaccaacaacgatccaacagcttccttccaaaagtggttatcgaatataaagtaaagaacatagaaaattatgttattttcagtaaatgtacatatgtttgtgtgacttgtgtctctctccgtttatatgcatggattgtgtaagaaaaagattaaaagtgagaatttaatacaaactattgtctttatatatatggaacatatatttgggctctaaaagtactaaattttgtgtgttctttaatctaaggttttgttataaacgaatctcctttttgctactcttaatgaatctcttttactataagtctataacactgcccttcaaatacatcttttaaggcaaaccatgtcacttttaaatatcaaacacaacaatagacgaaacacataggaaataaaatttttaaaaataaaaaacaatattcgcaaatatcgcgtagaacaatacaacattcttttgtgatatatattttaatagaatcacttcactggctccacacattccaaaacttttcttaagtccatcacataagaaattagatttgacagcaatcatatatctccaaccttggagcaagtgcaaaatcattattatctttcctagtttgagaaattgatagcattaccatcaccattaatatggagacacactttttgcatgttttcactcatatttatatttatcttgtgatgactactattactctgatattgtttctattactgtatttgtattatgttttttttttaatagactataatagtaatgtaaaagtatatcacaattacaagagcgtcaattttgcaaataaattctctttctttttttagcaagaacaatccgttaaatacacatggttaaagtttaggaactatcttgctttcgaagaaagtaactttatcagtttagttaagaacttaccataaaggttcacaaagccagaagaatttcggagtgggacatccccaagttagtttagagcactgaaattgagaaacaaatcgagttttgaaaatttagagaaacgatattggtttcgaggtatataaatagtagagaacgaaactgagacaccaaacttacttgtaaatgtaagagacaattccaaggatcacacagagaagaataatgtcgatgcagaagtttcggctggatcgcatctgaaatcccccacccgattttagtaattaatttcaagaaccagtttctattataattttacctgcacaagctgtttcttgagccgaacgttggtattcttcaaatccgaagtggctccatcgacctacaacaatcatggaatcattatatctctagcgttttgataacaccacctaatgataaagatcaaatttaaaactaagggaagagacaaacaccaaatattttttatcgtaatcatcaaaggaaaaaagaatctcacctttgtttccatttcttccatcaatgggacttgcttgtcaagttcctgaaatcgaaaaacgtaaattataaatctccatcggatagggaaaaactcggttacatagggcatgagtaaacaacaaacctcgttcatgtcacgcgctaagttctttagtgcatccaaaccttctgatatgatatcaagaccctcatcctaaagtaaagacagaggttaagctaattcgaaatctcgttgtcgaaaggcaaaataaaagctagtctataaaattcatgtacctgtttctttcttctcatctcatattcttgtcgaaactggctggattcttcactttgctggaaaaatccatcatccatgtcttcctctaatagtaacaagagaataaaacaaaactcatttatatgtactgtcttatggtaagataaaaacatgaaaggaaaaaagaaacattcactaccagacatatcaaacttgatgttcttgttaggtgcagaagcacctccccaatcactatttgcttgttttgctccatgttcatttccatcaggtatcgcttgaagcctatcggctaaagcgataactagatcgcaccgagattctcgttcctctctcgtgagccctttaatctatatacaatgcaaattaaacaaagtttgaacacaaccattgatattcctttcactcatagttaaccaacaataagtaattaagttaaaccttcttaacagcgagtttctgaagcttaacaacatcttcagctaatcgcgcttttgtccttcgaacctcagcattcatagccaccgcggcagctctattcttctccgttgatgccaactccgctttctacatagtttaatacaaaatttaaacttaataacgttaagagtcactgaaaatgaagcaatattatttagattctattggttacaacactaaatatatcttctaagatacggtcgataaaatctaaagagcaaaaaatatttcatattctatcaattctcaaatcttttttttatatctcaaaatctttcttaacgagaaaaaaataaaaaaaaatcatcaacagaaatgattaaagattttatatatttcaaagtctagaacagaaaaacccaaaaatatattaaaatattcctcaaatagcgatcaaatgagaaaatcaagaacaatctagggttttgtttttttggttttaatgaacgatctagtgttttaaaaaaagagagagtgagagagaaggagacaaacacgaagaactgcttcgatgtcggaatcaatggaggtgaagaggcgagagaaggcatcgtcgccggaagcgccgatctcacggtgtttgtcgatgtcgtacttgtcgtactttttgcaaatctcgtcgactctgaagatgatatcaatgaccggcatatctacaagcttcttcttcttcttgtggaatgtctccgatttggttctctgtttcttcgttcttctccgttgtccttttttggagtctctcttcagaaacgagacgcttagcgtaaacggcgggattagaagtattaatagttagaatttttttctgtttttttatatagcttttcaaaccagttttagactacaatatctttaagcataaaatatttaataaattgattatctctaactaacaaaaagattttagtgggcttgtaaacttgcatatgaatatatttgaataaaactcagttcacttgtgaaaaaaaaaaaaaagattctgcaaaaaatccgtttggtcagtttacgaaaacgtttaatagtactatttcagtattttgggtatagcttacccgaaagtttaaataaaaattatattcgatctatggatcatatgggtatagcttacccatatgggcctaggttttattaacatgttaacacaaaaaaaaaatatttcgaaataaaagagtcatttgggtatagcttacccggaagtgaactatacttaaattgatgcattcagatagactaggagtttaagcttggaataatcaataatgcatcgagtgagaatctagttatttcttttttattttaaaaatataatttggatagtgtttttgtaaaatgtgattttatcgcatctaaaattcttttatttaattttatatttctttgttaaaatatttctaatcttcttttttttgttgccaactaaacatatctcagaccatgtgcttataaataatatacagtttttatttttatctttttaattgaaaaacatagttgaagaaacatatctatttaaaaaatatagtatatctttcattacttgaaaacattttaatatgaatttaagaataaataggaaaatgtatttcgtaaaaaaatcttaatcgaatatatagtttcctttaatatataaacttgacataatgagtaatgcagtacttttgactctatacattgtattaaaaaagttgatgcaatacattgtattcttctacttttttattaaatacattgtattctttttttctcgagcatacgatgttcgaagacaactaacacattatacataatctgcgaaaaaggcaatatatctcatttactaaaagtttcataaccatacaatatatataaatactataaacaatgccgtagtagtgatcacaagataaaatacaagttatacaaatatttaacaatgagtgagaatatgcaaagagtgtgtgtgtctatcttaacagtgatggttttgatgctatcaatttctaaagttacgaaaggtaataatgatcatgcgccggctccaatgtcagagaaagggttgctgccaaatccaatatcatgtgtagcggacgcaagaaaaattccagattgtgtagaggcaataaaacagggccatttgaaaattataaaaaaagaatgttgtatcattctactcagtcttcccgaagattgttttgggattttatttcctatacgtttctactatcgtatcatacttaagattacatgcaaattaattggcatcttttaatcacaatttttttttaatctttagatattttttcatgtaacggtattcatattatttcataataaaaccatttttctttcagtgatttgttaataattacctaaatgattatgttaaatataaaataatgggttttctatactaactaagaattaggctagtgttcgtgagacccttcgtttggagctagaagattaatccctagttcggttattggttgggaaggatttcatattccgggccaggagatatatgagtctcacctggtaattccttagagttgtagttaattaacgaatcaaaaagaacatgcattgattattttattggccctttgttatatgttttcttaaaaatgtgtaacgcttaaaatttcttgcaaattacttgtagtttcaatagtttaaaaattttaaagacttattgaatgactttgtatcacttcattttatattcaaagactctgtatcaatatgagattattattttttctttattttgtggtgtctaaagaatcacttcaaatagatcttcattgtaaatattcataggtgaaaagttagacatgctcgagcaccactgaattattttaagatcatatccatgtacttttaatttgcaatataaaaggaaaaatattagttaaaaaaaaggaaaaagtatttctataagtcttcaaatgcacaagattttctgaattgaatgttttatgattagagtttttctcccattttatcatatatactgataatattaataacaaaatgatttgaaccccttacatgtgctcgaggagctgatgcacatggtccatccaacatttttttttataagtaaatctgttacaattagggtccaaatttttattaaaaaataaaatataggaaatgatgaccaattcttttttttagcacatgatttttaattattttgagccagccctaagtaaaaaacgtataggcttttgtcgacgattatgttataaacttataactagataagaactcgcatctagtgtgggatgaaacgattaaaataaattatttgataaaattattgatatttaatatttgtctgtatataataaaacatgtaattaatgtttttattttattttaatttatgtttgttttgtgtaaaaatacgtttcacccgtgattgttaaagctctaattcttgagtgggtcggaacttggtttaatttgcaacataatacaaacatcgatatatcagatcttttttagtttgtgttatagtgtgctcagtggggcggctgttgtacggatagatttgaaaggattctttgttatgattccaacgtttttgcaatcactagagaaaaccaatgagattgtaaaagaaaaacggaaacaaaacaaaacaaaagagaagaaagctagagaacaaaaaaatgatattcactagacatggtttcgacgaagaaactggaaaccagccatcaaacaaatacaacaaagatgatctgagcttagtcgagaaaaaaggatcctgaattgctcggatgataaaatcagacgtggttgggatttctctctaaaatgttctcatcatttaatttggccatttggatatgatttaaatcctaatttctagctttagtttcttgtttttttttttaaattaatcaagcacaataaaaaccttagacttagaaccctccattttttttccaacaattttgaaaactatataagttcattatttttatctctatatatatatataagcttaagaaaatgtacgtataattatgtttgttcaaatgttcatccagaatattttacgatgtcatattggttttgttttgttatcatgttgtgaagtaagtaatcattttttttattgtcatttccgttcttgtattaaaaattatatattgatgtggttgttaaaccgaaaaagaaggtgaatttggtagatcgcaatatttattgatgaaattaagaaaatatcaataatatgatttgggttcattacatagtttttttttttacatgtgtaaccccttctcacggccacggtgaaattttcataatatacacaaaaagggcaacaaataagaaattttcattacatagtatattccttaattttgtttttattctcatttagtttttactagaaacattaaaatgaacttatatttgtaacgtgctattttgttttctgaactatcaaatgaacgtctaacaaaatcaaactcaaaaacttataatttataactctaatttccatttaataaataatatacccactaaattaaaagttaaaagttaactagtaaaatcgactataattgcagaaaattagaaactgttttatcctttctttacattgtcggttttcaccgtccaatactccaatccatttttagtttactaactaaaatttttttattttaatttacttatcaagtttacccaagaataatattaagtcttaccaagtcaagacagggcagtacgtatgaagtgggacttgggatttaatgtcacatttaaagcttaaacgtcagtgtttactagaaactttgacaagttcttgattgcaacacaacaatgattgcgacaatattaatagatatatagttatattttccaccacatatctaattcttcatcttctcaactaaacaaatcagtcaccgggaaaaatataaagagatgacggataaagaagaaagcaaccactcctcggaggttggcgccgtccgatccctccaagaaactcccacttgggctctggccaccgtttgtttcttcttcatcgctgtttccatttgcctcgagcgtctcatcaatcttctatccactgtaagtacaaatatgtatattataggatcatatatactttcttctatacactgtttaaattttgactaatctctttaagttttttttataaattttttgttcttggaaaagtagagtttggtttacacttgcaagaatttaaattggatatatttatattttattaaattagatatataggtgaagtagtaaatatgtatgttaataaaaatgtattttaatattttaaccattttcgaaaaatatcagctagataacatgagttgaaatttcaacaaaaaataaaaagcgagtcgaaagttcaagacaaaactgtattatatatatattgtctcttttcttgcagagacttaagaaaaatagaaaaacgtcgctacttgaagctgtagagaagctcaaatcaggtaaaaaactgtcccattcgtagaaaagttcattggtcatcaatctttgtttaatttaaaaagctcaaacatcttatagtaaaaaaaaatcctaaatttttggatatgaaaatcaattgaaatatctcttccaattttattaatctctgaatttttaatgttctgtaagggcagttctaatggtgctaggattcatgtcactaatgctaaatgtaactgaaggagaagtttcgaagatatgcattcctataaagtatgccaatcgaatgttgccatgccgtaaaaccataaaatcacataatgatgttagtgaagatgatgatgatgatgatggtgataatcatgacaacagcttctttcatcaatgctcttccaaggttctttttgaccctttgatctttaattaaaatcattttacagttttattttcatttatctttaaatccaaggtggacatatatataatgtataaaagtagtatacaaaggttttaacttagaaaaacaaaagttttgatgaccagtgaaactgtagatagaaattatgcagcaattttgttttcttaatcaatcacacaatttagtttttgatttatgaattttcgttaaatgattttccagttttcataaccttttattgcttactattctacaatatgattatttaaataagagatttaatcatatacatttttatatgcttaacttatgaaacttctgaatccaaaagttttaagatatcttcttgaaatccaagatggagggagagaggaccgcaaaatccaaaaatgtcaactagtttactttgacgttgacttggagtcttggacattgtcgttagctagagtccactaatcaagaaaattacgtccaaataaaaaagaaaacaaaaaaaaaattgttgagttatgaacaaaatatcaagagtatgactttttctttgcttactaaagtaaattttatttcgaagtaactaatccgatttaataaaataaaatttgcagggtaagacttcactaatatcagaagaagggttgactcagttgagttacttcttctttgtgttggcatgcatgcatattctctgcaatcttgctattcttctccttggaatggccaaggtactacatatatacactatgcaatcaaatattataacattacaattgtttaataaagacttcaataatttgtgacatggttttttactattgtttacatacaaagttttttgtgtacgtaatacatatagatgagaaaatggaattcgtgggagaaagagacccaaacagtggagtatctagcagcaaacggtaagatttttgtatttttctactacgaaattacatgcaatgtcaattatttcttagtcgataagttaattaatattttatgaaaatttaaagatccgaataggtttagaataacaagagatacaacatttgctcgacgacacctgagttcatggactgaaacatcatttcaactttggattgtaagttcgtacctattattaatctttaattaatttgttaattaacatttatctcaaatatataggtttaactatattaataattaagtttttttcttcttagaaatgtttcttcaggcaattttacaactcagtggcgaaagtagattacctcacacttcggcatgggttcatctttgttagtacctcattttttgtcaatgaataattatttaaaaataaataaattttaaatttaatgtgttattttgattattgatgcaggctcatgtatcgtcaaataatgctttcaacttccaaaactatatacagagatctttacatgaagattttaaaactgtggttggtataaggtagtcatatttgtgtattttacatgaatcttaagtaacaaagttaaatcaaataaactttttaattttgttacagtcctttaatgtggctaactgtggtcatctttatgctcctcgacgtttctggtaacttaatttatatatttgttagcttaaatagttaaattaaaataattattagtgattactcgtttttatcttatcttcttctttttttcttaatcatcaggttggagagtatatttttatatgtcatttgtgccactcattgtaagagctaatttaatctagttaagactaattaactatatgtgtaactcaaattattgacgaactaatattgttacgtagatagttttagtgatcgggacgaaactagagatgatagtagcgaaaatggcggtcacaattaaggagaataacagtgtaattagaggaacccctctcgttgagtcaaacgacacgcatttctggttttccaatcctcgttttctcttaagcattctacactacacgctgtttctggtaatcttttataaactacatgtcgtttttcctaatgcttcatcataatgccaacattaatttttctaatacagaacaccttcgagatggcatttattgtgtggatcactgtaagttctaatttcttatagggattttaatatttggatttataagaaagggaaaaataatataggaaattgttatatgtgatgtatctataattttaattatgaaattagtggcaatttgggattaactcttgctaccatgataaccaagggatcataatcacacgacttgtattagcgtaagcactacaatttatttattttatcccacaaattatttacattttcgaaattatatttttgtattaaaaatcatatcgttaatattaaggatattatgatttatagggtgacagtccagttcttgagcagctacattacattgcctctttatgccattgtaactcaggtaatttagtccaatatatataacaccatttttaaattaaatcgttttgcattagtatataaattattactgttagtgtaacctagtgatctgaatttgatttggatgcatatatatatgtgtttagatggggtcaagctacaagagagcaatcttagaagaacaactagcaaatgtgttaaggcactggcaagggatggttagagacaagaaaaagactatccaaacgccagacaccgacaacaacagtaacaataacaatggtgatattgattctggagaaagtccggttcagacagaagttgcttctgagtttagattttcgggtagacaatcgccgattttacaagagatacagatacaagagaaaactgaaaggtgatcagattgatggaaaatgagaaagagattgttggtattattgttaagaactttttagagttgcctttactaattattgacgaatcaaatgacaaaatagtaagtttaaccagaagtgtcagtgttagattggcatgctggtatcgtgataacatgtcacacataatgtgactaataattgatatggtttctagaggattgcttgaagctatttttcttattgtgaggttattaaggacactgtgaattatatatacgtgtacagaatgaaaatgtcgcattggcaatgcagaaaacagacttatctctattcttctttgaaaagctcgcgaccgatgacaatccttctgatctcgcttgtccctgcaccgatttcatatagctttgcatctcttagaaggcgtcctgttgcatattcgtttatgtatccatttccgcctaaacattgtatcgcctgcaacatcaaaccaaatcttttagtcttaaaggaaaggtaactaggtgatcaatatgtgtagttatgatcccttcggaggtttgctttgctggtaaccattagaaagacaagagacaacgcttaaaactggtttcgggtttgatctagctttatgagctagtgtcacagtaactttaagtatgaaggaaaataagggtacttgacctgtaaagcgacctgcgttgctctctcggccgcacaaagaatagttccggcgcagtcctagacaataagcaaatacacaagaaggcaggtgtattaggttgcggtggtgatgcatgactattttcataacaggaaactagaagggatggttatttattatcaaattacctttgggtcaactttcccattgtcacagtccctcgcaacagagtaaacgtatgacctgatatgccaaaggaacaactttttgcttgagctacatttctatggacaaaataatttccagagtattgagagaagttttctaccttgaagattgtaatgcagtgtacatatcagcaactttaccctgaaattcaacagaattgttttaggaatcttatgattaaagtttgagatattcggaaacgtttatgagaaggatgatcaagctcaacctgtataaactgaaattccccaactggacgaccaaattgttctctctggcgaatatagggaagaacattgtcgaggcatgcctgcatgatccctaagggcccagctgctaaaacaagtctctccaaatccagacctgacatcagaacatacactcctgcacgtacaaacactatgtacatcagacaagtatagagatggggatagtagcctcgactcaagaaatatacaaggcgtgtatgtagcacaacattaccattttgatctcagatattagatcctcataaaactagaaaagccagaccatgcaatgcaaattatctatcaaactagagattaagagagtttcagcaatcaaaaccttttccttccttgtctagaatattttcctctggaacgaagcaattctcaaaaacaagctcacacctgctcaggagagacagatgttagagagaaagagacagtgaaaaagggatttaatttacacagatatttttatcttgagagaatggggattacgtatcgcttccccgcattcctagtttgtccaatttctgagcagtactgaatctgcaaagcaaccacaacaataaatggttttaaggaactcactctctgaatttgttccattagttctttactaaagatcatagaaagtcagtttcaacaagattgagaattcacatacccggtcattcctttctctatgatgaaagccgtgattcctttggaacctgcttttgtatcagttttcgcgtaaacaacctgatcaaaccaaaaaaacaacaaatggtagaaaactgttaaaattatagaaaatcagtttcagaagttaacatatgagctaaactatattaccagtgtttcagcagatggaccattagtgcaccacatcttgttgccatttagtatataaccaccatctaccttctcagccttgcatttcatgccaacaacatctgaaccagctgtaacgaaataaaaagtcaaatcagtatacatcagaacaaagcatcggctatatgtatgtattgatgtgtttccttctcacaatctcaaactcttgatccgaaaaatatatatcttaccattaggttcactcattgcaagagcaccaacatgctctccactgataagcttcatagcagtgaatcaatagttagctaaaactctaacgacattttaagagaaaaagatcaggagaaacatgcaacagttcacagatgaagaaaataaaaaacggtctttctataaggtgagatttccaacaccggtgatattggctgataaaccatttgcatagcagtgacaatatccgtaagctcagaccatgatacaaaagctcaagatgaaaccgtacctttggcaaatacttttccttttgggctgcagttccattcctcacctgtaaaatagtattaaatcttctctctcagactcaaaaactcagatactgcaacatagtttgtgagatatatatttaccaattgattgatgcaaaggttggaatgagcaccataagacaaagcaactgaacccgaggcccgactgatttcctccattgcaatacaatgatacaagtaaccaagacctagccctccatattcctctgcaggtagaggaacatgcgattaggctaccgttctagacataaaacaaaacatgactgagctaatagcagaagcatatgatcttgtggtaggagagaaatctacctggcgcagtgattccatggagattaaactcacccattagcttccataagtttacatcctagttaaacaagtacgaaagattagattttgatgagatatataagcaacaaaaaccgtgagagaaaggagttaacaacaaacctttggaaatgaattagttttatcaattctttctgcatgaggagcgatattatcttgcgcaaacttggatacactttctttaaactgcagtttcaatggtagtcacaaaaacaattaggtcgcaaaatgcattcaagaaaaaatataaacgacttatgtcaatcagctgaaacaaagttaaatcaaatgatgaagtgttgttcccaattccattttccacaacacacaatcatcaaattaactgacacaaatctctcagatcatttcgaattggcatgtcaaaaccccaacacatccaagtcgaaagctacacttagaaaacaccaaacaccaatttccttcggctctcaaacgagaagatggcaaatatacagacacacagatacacaacgagaatcacagatttatggagagaagagagagagagagagaacctgtaactgagtgtcgtcgaataggagagacgaagaacgagaagagaaagacctcctccgcgtcttgacggcgtaaccgagaatcgatctggcggagaaaaacctctgcatatcttcgttattaccggtaagttaaaaacaagaaagatcggaagaatgtgttcgtgtaaaagaaatcccaaacggctttttttttttgttattagagagcaggcttcttctaattgagattaagtagttataaaaatagaaattaatttgagataaggattacaaaattggaattgagaagaagatatgagcaatgagtcattggtccatctaatctagttccgtataccactttgctatttgctactcctccataccactgacactgctctattataccattttcaaatcgacaaaaaaaaattattttttcatttatagtaaagtttttgatattagaagatatgtatatactacaagtcaaaacaattggttgtgagtgttgatgagagaagaacacattagtgtttaggaaatattatattatattaactctcatcatgaatatgtaacactaaaattgtcaatataatattttgtgaaagttaaataacatatttgtagaagacagtgtatatgtaatgtgtcttcatttcatgtacaacgacgttaaatgaggttatatataatatactttaaaattatggatcacaaatatagatcgtacttatccacaggtattttaagtttctaccagttttttttgtatcaaatcgtattccatacttgtattcttcctttgtattatatattagaaaatcttttagataaaaaagtgtttaacattgactcattgaggttatttagagaagataagtctgatctgatccttctccctggttaacacaatgtgtattcacttacggtgactatgtacaacatgttagttgaataaaatttagttttggtatagtaagctatattcttttttttttaaatagtgagttatattcattttcaacactttgtaaaagttacatgctaaaaactagtcgccataaaatgcgatacaatgtgtcaaatggaaatgaattttaaagaatatctatgtaaaattctacttttatgtgtaagatgtttttaccccattagaaattaggtaagtgcagcattgtttgttatgaaggttggaagtttgagagatttagtcgccataatgcgatacaatgtatcagatggagatgaattttaaaatatatctatgtaaaattccacttttatgtgcgagatatttttaactattagaaatcaggtaagtgcagcattgtttgttatgaaagttggaagtttgagagatttagtcgtcataatgcgatacaatgtatcatatggagatgcattttaaaggatatttctgtaaaattctacttttatgtgcgaaatatttttactccattcgaatttgggtaaatgaagccttgtttgctatgaaagttggaagtttgagagatttccacttcggtttaatgaaaagtttcttagatatattaaatatattagtaggtctccagtgtagatcctcgtatcttcttatggttagcaaacatatcaaattaatggtgcatgatattcctaatagtgtcactaaaacatgaacaattttatctagtgtcgtactcgaaagactggtatatatcacaatcacatgcatgagaaaacgagagtttgatatatctttgcttattatcattgtcgttttatttttgctaactctacattattccttcgactttgagtttttctcttaatatatcatctaaaaaggtaatattatattattaatagttaattctcctcttatactccttctcattatcatcctcattcacatccatatttatgacgacaaaattagttagtagatgcatgaattcagatgagtctcgaacaaagactttttggtgtaccatctacacccacatagatatgcaaagtcgcgaagatacataaatatatccattatcacccagatgatcgtcatggctatctttgcattcagccacgagtttgtcatccattatgtcaatatatccataatcataaagtgatctcctaagaaccatcatttactaattcggcagaaccataataaataacctttctttattcaccatttttgttatgaagtatgtcggctcctatcggaaaaattaatcacacatttatagaaatagcaataatatatatatatatatatataatgtatgtactgtattaatctttgtttgttcaacaatcaaaattatttcaaaccaaacatattatttcacaaaatatgcacaacaaatttgtcaacttatttctatcacaatactttggtttttcctttcaacatgattttggtagtacgaatgtttaggttgaatgcaaaaataaccttttaatacgttgatataaatttttgtataaccccaataaatttaagtatttgatttatacatttctaaaatgcattttgatgtaaaaaagagagattaaaaacatgcaaaacaaatgtttacaacaaaatttctataaattaatactcaaaaaattaatatttcgataaatcaatatatttttaggttgggagttaatttttgaatcagtttaatatataaatttataaagtattctttttttttctttcgattgttttctattgaatgttgacgatattttttggatacaagtataaaaagggtaatattagaatctagccaaattttacacataaattaataatggttagtttgttggggtaactgactctttttgtggtggggaaaaggtgaggaaaggacaattaaccttgtaaatttatagttttttgcactgatgcatttgtttttggtggtggagacttcaacgtaaggttcagtgaaaaaaagtcatctaatgacaaagattaatggaaaggagaaaaaaaccatgtaattttaagaagtgacatgaatcaaataaaaataatgaaagaaacaacttgcatttgaacaaactcgtatgtatttatgaaaatagcatgtctatataaacaatagccatgacatattgaaagatcttatgtaaaacaaaaatataatatgttaaacggaaagatattagtgcaatagattacacaaaattcgatacaaaaacttgagatatctacgacggtggaattccaatgaagagatagaagatgaaataacttggaatttagatagatctcatgaatttttgtaaaatagcatatcgaaagaaacaaaagtgtggcatattgaaagattgccaggtaaatagaaaaatacaagtacatggaaaacaattacacaaaatcgagaaaagtacaactcataaacaatagagatatcttcgatagtagagttccaagggagaaagatccaatctcacgaaaggagaaaaaaatcgattagaaggatctttaactattggagggagagagagagaatttgacaaactctatctttggatgaaaaagaatccataggtaaaagataagagaataatatttttaagtaatttcaaatacacattacctcataactagtttctatatgtattttggatccattgttagatcatataaatttcttaaaaaaaattactcccaagtcccaagtgatataaatctataacaattcaagtattcaaccattcatcccaaataaccaaaagcctcagtcccttgtaagttaacgggcttaaacatcagtctcaggcagtcaggcctcttgacattatctggaaatagttttcttttttctgtcgactattgagtgtcaaccatattatttggaaacataaccatacaagtataaaaaacaattactccgaagtccctagtgatataaattcacaacaattcaaccattcatcccaagtaaccaaaagcctcagtcccttgtaaggtgtaaacgggtttaaacatcagcctcaggctacaaccggatacgatgaacatgttgcaacacctgccaaaatcaaaggaaaaaaatcaatgggatagagaagaattaaccgaaccaaaccgattcgattttatttcttctatgctaacttaatgatctaaaccgaaatcaaagctggttaaaagaacttaccacacatgttctttcccatttccatcttgaagtagccattgtctccccattcacctccccatgagttctttataagccagtacgggacgtcgtcttcaactccataaccaactgctaacactgcatggtttacatcctgttgccaccaaaaaaacccggtttacttactaaacgttggtaattgtaatatttttgtggtttacagcagaaaagtactcaccattggagtgttaccacatgtattgctagtaaaaactcccttcttataaaacctgaattcatgtacaacctcaaacgccacactcactggccttaccaacccgaccgcgtgcttcagttcatcttctgcaccctataatgttttcatatattagagaatgtaaaatgtttgcagctaaagtgagatttcaattacaaactaggctttaccagggtaatgttgacagagtcacggacttgtacaccgatgtttttcgctgaaaatttgcagccaccgtcttttccggtgtaaggataagcctcctccgtgtcgagcccaccgttgtatttaatgtattcaaaggcttgagaaggaagtccaccatgacaaccaaagttattgaaagtaccagcacaatccacaagctgttgctcggacaaagatattccttttccaaatgcttgatggtaagctgcttcaagagctccagttgtgctgaagttagaattggatcatacatatcagtgatcttgcttacatggagaaatctcactgaaagaatcttatcatagactttacctaaatgtccaacaagatccacaatgtccctgttctttcacagggctaacaataccatcttctctccaatctttctgcagtttacaaagtataaggacttaaaccaaggatccaaaatttctatcttaagaagagctaaagatcaaagaacatgaaaggaatggttactgtgtctggaactgtagcttcagtgatcttgtggctaccctttaaagtagcagaacagttttgagcagctccaagcttgtatctttgaaactcttgccatgtcaagtcagcaaactctatagaacagaacaaattcaacttaaagttaaaacatctctctcactttcttgaactatgtgaattgagacaaagctcaaataaaacgttcttgaagtatgtgattaagacaagaaggcttaaagcaaagcattagagagtgaagacttacgattaagagagagtttataggataagcctttcttattagtggatctgattaaatcaagattctccttaaaaacagagaatcttaacttcatctcctccacactctgatacttcttcccataccttcaaaaaaccccaaatgtaaattttcacagttcaaaacaagtcaactgagaaatacagattgagaatttacctgtgagtgaagcgagaaaaggatagaacatgacgggactgtcctaggatctggacgacggtgtcttcaagctcatggagattgtcggagaccattttgattggattagattcatcgaatccgatctctttactcgccgccgccgcaaagagaatcaataggattgaggaagataggtttagtttcacagacatggcttctctctggttctttactctaacaaaagcttcgaagtcaagaagtagaagaagaagaagatgccagtttacacgtggtgagcttttattggttaaacttttggctttaataattggattactgacgtgtattgtgacgttgacatttataacggaacattgtttagttattactttatcgtgttggaaataggaatctgtgacaagataaattaaaataagggctaataaaaaataattttaccaaatatttctgttattttttggatcatttaatagtgaggtacatgttcagtggagaccatgaattttatatgttgtcaaatcttttgtgtgagagattttaggtgaatgatagagcccaaagccctcttgaccagcttttgctgttatttctttgcttgttcaaaacgtgctaaacattgatatgtgaatcaaataaataataaatcaataaaagataggaattttgtgtattcaacaaatgtattcaaaacgaatgacaaatagtaaacaatcataataaacccgatcagttaacccaaacaagcattatacattgagatacaaagttaggatttttagcttgcgaaacaagtaatataaatttttataaaatattctattggacttataataggaatccatataacaaacataatatgcataacaagtaataaccttctaatttaaaatttatatggcttcgacaattgccattcacacaagaaaataaattgtatagagtgaaaaggatagagaataaaagtatagagtaaacctagttgaaacactatataacaggggaactgggcagacaaccctatttctaaatacacactgagaagatttaaacaaattttaagaatttccgaaacaatttaaatggaaactcttctttttttttttttttaaacatcaaatggatgttttctaatttcaaaatttaaagtaaaatttatttttacgaaaataactttgttagaaaaaaaaaatagtttaattactacaagaaaatcgcctagtcaaatgaacaaagaaaaaaacaaatccactagataactaacaaaatcaaaatcaccattgatctctccaacaatacatacctctcttaacctttaacttcatatgatctcacatctctctcaacgttagactaaaaacaaaaaatggagatggagagtagaacctctggttctcgtggcatctctttctggtcaatcctattccactctctttggacaactattatcggaatcctcttcttccgtctcgcaaccaccaatggccacaagtccggtttcatccacttctttgccatttccggaacagtactcattaccttaccttggatcatccaacttctcatctccacgaccgtaatacttctgcataagaccaaaggttacaacctcatgtggattgttcagtcaccaacaatagccaaaaaagttgttgatcacactaaagctggtacttgttctgttacatcttctccttcctcaaattgtcaagttttgaaggaaagtgatgcagaagagattgcgattaggatcgtgattggcgctgctgatggtaaaagagagggttcctctccaggttctttaggcatgctcatggaaattgaaggaagaaataagactaaactgctcacaaatggatccacttgatccttatagtcatagtctttgctttttatttgtctctctttcattatgcactactctaaagacaataatattcattgttatctttggttctgttttcataagagccctgatttgttattacaacatgatccttattctcttttaatcacagacacaaaaaccatgtataaacaaaaaaaatatttagacatttctgctacatcttgagtgttacataaataaaaacttgtttacaacagaactgatagaaagtttaaacattaataaagaaatgtgaagcacattgtccaatgtcatcttccatcaccatatataatggtgtgagaaatgaacattgagttgttagcagaggaaggagaggctgatggtcctgaaactgatgaagtcactgaactagaagtaattgccaaggaaggtaaacccattaacaccggagttgaaactccgatcccgggagtatttggagagaactcaggcaatctttggtgtctgtttatgtattggaccacttgttccatgttaggtcttgcttctggtataatgcttgtacaaagcaaccctagcttcagaaccatttcaacttccccgggtacaaatttacctctcagtcttgtatccacagcattgactagagaaccttctctccagcattcacaaacccacttgaccaaatgtcgtttctcaaccggcatcgcaggatcaaatggtcttctcccacatgttacttcaagcatgaatgcaccaaatgcatacacatctgttctagtggaagttcctgttgacgttagctcgagcgccatgtagcctatggttcctacagctgcagttgcagagaggttagacccatgatcatcaaacctagccattccaaaatctcctaaaaacccttggagatttccatttaacatgacattagaagctttgatatctcggtgtaaaacaacttgactagctcctgtatgcaagtaacagagcgcagatgcgatatctctcaatattgatactctttgagaccaagaaagaggcggtttatcaccgtgaaataagtactgatcaacactacctccttccatgtacttagagaccagcaataactcgccttttcgcctacaatacccgagaagaggaaccagattcttgtgttgtaagcttcccattgtcacaacttcagccacaaactgtttcatcccttgctctgcatcgtgtgatagtctcttcacagctatatctcctagaataggcagagtacctttatacacttctccaaaacctcctcttccaagacgaccatctttgttaaaccctcttgttgctttatataaagatttgtatgaataacgaagtggaccatatggcttttcccatggctctctaacttctgcatacttttttcttctgtaaagataaaatcctcctaccaccaccattactatgatagcgagtataatcaatagcacaataagcagaggagatgttttctccggtttcttgggacgtggaaccgtgggaagtttagagatgtcaagactctgtagtaatgctctgtttctgctgaaactccatcctaagatgtattgataactaatcaatgaaccagtcgcagccgaaaaccctatgaatgcttttcgatccgggaagattgcggtgagattgatagttattgacaaaagaggcttacttggcttctgagttttaagaggtgctaaagtaacattgagtagagtatcttcataatcaatccatacctgaataggatctccactcaagagtttcaagcttttgttcttcccttctttatctgaataataagaagctgaagcagattccacagactggaggctgttttcgtctataccaacatggtttttgtctctatcatcaaactctgcgctttggaccgtatcaagctcaatagctaaaaggtgagaagaaggagaaccattagttgagatgttgaagagtcctaagtactgagttggatctgcttgtgtaagatccattgaagatgatagaacaaaagcaatcccgtgaccaccatcaactcctggcttagggacaagagcgcaaacgaaatgagtcgagaaagaaggagattgagatgaagcagaaccgaattcgaatggtcggttgaagaaagcatgacccttttgttgagtcgtggcgtttgttagctgcaaaagtccatcttgtaggaattttgcagaaccgtcaaggtttagattggtttggtcttggttaaagccattgtagatgaaacttaagtcttgttgacttgaaaaagaaataagattaacaaagcaaatcaagaagagaagaagaaggagatgcaatctttgagccattggtaatggtaaaaagaacacaaagacaagttttgtttaggttctgagtttcgaaaatcaaacaagttctggttataagggaacggcttcaaacgcaattttctacgttctaagtccacgaaaaatattccctgtatgtgacaaaagagttgacattggactttttgattatatataaccgtaataattactctaaaatactatttttcttcgttttaaaaaaaaatctgctaaaactccttgagaaaagtatatggtctactcgtcttttaagttttaacaatgacaagtcgggattaaattaaagcgaaataacctcaaagcaaaccattattggttttaaggcaagaagacaaagattttgaagaaggtgtggtgagttccgagtcaattggaagaggaagagtgggtaacgtgcttaagaagtatgcggtaaaagccctactttgtcaaacccatttcttgctttatacgaatgatgaattggtccactttaaagatgtatccaaatgatttctatttttttttaatagaaataaatgaatgatagtaacaattataaaaatgcagccgagaaaagcaagcaaatatgtgaaaataaagatcgtacaatttccaaatgaaatgttatcatctaggacattaatttggcctacgcattcaaatttcgatttggtttgattctagtttcggaatttagaactggtccacttaaaaatatcgaaatgatttgtacttaaaaaagaagaagcaagtagatgattgatacttgacccaaaaagagatgatttatagaatttatcaagcaatccacaacaaatgtcaatgtgaaaattaagatcattccaaagcaaaaacattcttatgtaaataataccaaaaactaactcttatgtcactaatgtcatttttttggagtagcttaaaatttaattttggataataattgcgtcgtttctacaaccgactaatttgtaaaaaaattataaggtttactacaaagataagttttcaaagtcgttactttcattttcttaaaacattgccaattcaaaagtaataaacaatataattactattgtttagtattcaagtttataaaatttgataaataatatatccaaacacgttttcttaataacactccaattttttcttaatgtataatactgtaaaactatttttaaaaatgtatataaaattatactacatatattttaaatttcttagaattgatccgtattttttgatttgcagacttaatggattggagtgttttactatatcgcttgtatttgtgaatcagtttattcattccggttggaccaaaacaaaagaaagaaatttcgagtcctgatcaacaatgccactgaaccggaaatttgaatccggcgtgccatcttttgatctgcatgccactcttgtagtggataatatctatttacctttaatgaattatatcaattaattttaaaagataaatcaaaaacaaaatccaaatcgaaatcgaagtaatcaattccgacccaacccaattaattccgacccaattcatttaattcgagccgacatttaattccgacgagataggcgatttccgattaacttccgacatcggcgattttcgacattggctccgtcgagtctggggagcctttgctaggtcagctaatccaattctccggccgtcgatttctccggtgctgcgtgctacgtgagtcgatactgttggatcgaattctttatcgatctttgctgcggctaatctggaaacgatccttctttagttcttccatctcctgtaagtattatagttagtacaatgtaattgaattgaatcaatgtgtaagcagcatcaaaccatggacgacctgaaattgaatcagacactgatacatctcgtggttcaactggtactaatatattgtttatatttgtaggaggcgatgaagaagaggatctagacgaacctacactttgactatggagggtaatatacagcagaccatgagtggagttgcaaaaattcaatatacggtatagtgtttaagacatcatctttggagagaataacatatgcggatttaatagataagatctgtagaaagattgctctaggtggtgagaaaaggaatctgaaattgagttacaagatatctaaagcatggagagagtcttatattgtagataatgaggatgtgttgatatatttaacgtcattggataaagagggatttagacctgttttgcatgtagagttatgcagtgatttggaaagtaataatagccaagttccaatagtagagcgaagaagttcatgcggtgtgaattttggggaattggctgccaatgttgtaatggttgcggatgcaaatacaggaattctgagtactaatgaacctattattgaactagaggaacagcgtgagacagttagtgaacctatgatgctagagaatggagtttctgaaactgttattgaaccgctgatgatagagtgtggggttaatgaagattctgataatgattatgttagggaagaatatgttcatctggcacgtccgatacaagaaagtgtggctgccgttgtcaaagaatgggaagatggtattggtgatttagtaggtcaagaatttcgttctaaggaggcagtatgggatttgattaatagagcttcgaaagaggaagtgtttggtgtgaaaactattaaatctgacacgggccgtcttatgttagaatgcagtcaagcatctaagggttgtgattggtatttaagagttacaaaaacttctgagacagatttttggtgtgtgaagaaacacacacaaatacataaatgctctcggtgtccggaggcaactagatatgaaaaacaaaaaggcacaccgcgattagtagcagatgtgttgcatgaggactatccgggtcttcttaatactccgaaacctaaacaaataatgagtattgttaaaggaagacttggtttggattgttcatactccacaactttaagaggaaaaaaaaaacatgttagtgatgtgagtgggagccctgaaactagctacaagttattgtttgcttatctgcacattttaaggtctgtgaatcatgggacaataacagaagtggaattggatgcagatgacaggtttaagttcctattcatcgctttgggcgcaagcattgaagggtttaaggcaatgaggaaagttatagtgatcgatgcaacttttctgaaaaccatatatggagggatgttagttattgcaacagctcaggatcctaatcatcatcattaccccattgcgtttggtgtaattgatagcgagaatcatgctagttggaactggtttttcagaaagttgaattccattataccggatgacccggaattggttttcataagggacatacatggaagcatcatcaagggagtcgcggatgtgttcccgaaggcatcacatggacattgtgtatggcatttgtctcaaaacattaagaaaatgctggcaggtgacaaagaagcaggtatggccaaatttatggaattagctcatatttatacagcgactgagttcaacattaggtatgcagaatttaggagaaagcatcctaaagtagccacctatctggatcgggcaattgggattgagaaatgggctaggtgctattttcagggagacaagtacaacatagatactagcaactccgcagagtctatgaacgcagtgttttcagaagtaaggaagtaccatctgttaccgatgatagatgcgattttggagaagttttctgagtggttcaacacacatcgcaaagattccgcgtctgcatcgaacacaaggcaagtggtgcctgttgtggagaatatattacacacgcgctgtccaattggtgcaaagctaaatgcaactgaactaaacagcttccgacaagaatacaacgtaattggaaatgatggtttttcttatttggtggacttggaaaggaatacttgttcttgcagagaatttgatatagacaagtacccgtgcgtccatgctatagctgcagccataaagcgatctaagatggatttgaatagccgttcaatcttaaatagccgttcaatcttgaatagcatattacagaacgatttatgtggtgcctcatcaggctcactggttctttcctcctgattatgtggagaaggtcgcaaaaccgccggattacactccaaaaaaaggaaggaatcaagaaacccggttcccatccacaggtgagaagcgccgaaagaagactaataacaaagctactcctggcatcaacttggagaggtggttgcagcctgaaaccaatgatgattgacgttaactcgtcaactagtacaagaagttcaactacgataaagtctttgtgtgtaaatttgtgtttctcggaattgtcaaatattgttcgacatgttcaattaagaacaatcctttgtttttaaatttgtgttttcggaattttgaagcatagttaagttttttagttcaacagaattgccaaacatagttcaacaggttcaactatgaaccagtcgttgtttggcaaacctagtacaacaggttcatctgggtcaactataaatacgggtggcatcccagtcaacgcgtcagttgaaataccaatcgtcgcgtcggttgacaggtggcactgcgagtaccaatcgtcgcgtcggttggaatattatttaagacaggattacaatcgattttacaccattcatatttcatcctatccaaaaaaagaacccaccccactaataaaggaagccgtcgtttgtcaacatggatggatatcattctgtttccgaactttgtccgactatcagtggatggattatttgcgttttcgttgtgaatgtgttcaagaagtttgtggcaccggatgagttcgaactgggcgtcatattggcagatcaaacggttatatattgcgaatatgtttaattttgtttctttcacataacttgcatgtatatagttaaaattatttggtgtagggtccccgttcccgaatcaaggctaccattcctcgtcgtcttgcgtcattttactttgatcgaatacgagaatatgagtatgagtggataattatcactaatttctcggtccgaaacgacgctgagtctgtgagagcaacatcccatgactaccagatatggtttatggaacagactattgttactaaagctttgaaaacggatgcactctcgttttggaattttactcctttcgagaacatcatagagaagacggttaacaagaatgtgttggtcggtgagttattttgacaattttatagtattttctttgagaaattgtacgaatacttacttctattattatacacaagatgtggtaggtgcgattatttggcagagccgagtgaccgaaggcatcgacggtgtgaagttttctctcaagatattgaatcagcagtaagttcaaatggttacttttttgggattagttcaaatggttcaaatgatatagtttaaacggttcacctatttttagttcacatggtgcacctattctagttcaaatagttcaaatgctatagttcacatggtgcacctactctagttcaaatggttcaaatgctatagttcacatggtgcacctactctagttcaaatggttcaaatggttatagttcacatggttcacttggtctattctgatggttcaagtgctatagttcaaatggttcagtagacctggttcagatggtcatgttcacaatttctgatcaagtaaataatttctatgaactgcagcaataaagttctctattgtgaagcacacaatcaacaagctttggactttcaagctcactttcggagtctttgtactccgagaattgtggttgtactcgtttgctggcgtgtgagcggtcatcctaaaccgaagcttgtgagtcatggccccgtgtcgaaggtgtttggtaatctggaaattccggaagttgatgaaatttataatgtagtattttagttgttgggtactttgtattattcgtataaacgaaggaatttgtagtttttgggtactttgtattattcgtataaacgaaggaatttgtagtttttgggtactttgtattagtttttgggtactttattattttaactaataaaacgttgttctatgtttcttttgtaattcccgaaatctgtaagcctagtacaacaggttcagcccgttcaactataatcacttagtaaaatgtgtttaacgattttataatatgtagaaacgtttgaagtttactactagctcaacaaaaaatctactattactattaaagtgtcattgataaatatttttttataaaaattgaaatcgtggtatgtgttcacataaacaacctcttatatgataaggagtagttactatgagatcacctcaaatgaagtaaattacgtgaatatggtcgtatatcaaatgtgattctgccaaaactttcaatatgcaaaataaatcacagttaggttgggttcgacatagttatcaagtatgtacattaaagttcagctgaaatatatgaaaacagtgaaaagtacatctatgtgtatgatagttcagctgtacaactatgtgtaaaattccaactgatgaacttgataattccagctggcataccgcataattccagctggcatactgtatatcaactcaaggaataaatgaaataaatgtctggatttatcaagtcaagttagattttggtgggtccatatgtttaaagtttttttttttaatggtagggttttgaggattttcatctatatttaatcatttacttgtgtgaaaaatcgaaaattcgagaaaaccctctgctgaagaagacggcggcgattctttagcggcgtcaagtattttccggcgacgagatttttccgacaaacgacgtcatttcttcacaaggttagatcttttctattaaagatatagggtttatgtggtgtattttagttcagatctagggtttataatagtcaagatctaggctttattttagtcaagatctagtgtttattttagtcaatatctagggtttagtcaagtatttgatagtttaatattttgtatttgacagacatgcctatctcttttaacggaagctctgactcctctcctagtgagaaatctgacggtttcgactactacaatgcaatacgggacgggaattggggcattccgactaagtgctactgtggaagagacgttgaaaagggtaatgtggttggtggcaatctccacgggaaaacaagattccgatgtccactaaatctgactgaggtggatggagaacacttgcagaagtggtgggaggaagccattgaagaggagttttcgaagtactatagtcggaaggacaagcgagaagaaggacctcctgcttggcaagttccgatgttcgagcccatccacgagaagatacgcattatgaatgaccggatcactgatcttgagacctaattattcaaggaactacgatcaatgaggagtgctattagtatcctccgagctagaggagggcgtggttctcgttgaaccatgtatgaaccatgtgaaccacgttgttttcattatgcaagtatttaattttgaaccatgtgaagcactttgttttaattaatgtatgaaccttctgaaccactttgttttaaatatgcaagtatttatgatttattacgatgtgcaaccaaaatatacagttgaacagggtaatgtgacgaaagatgaaccatttgaactaaactgtttcgaaccagatgaactatctctacacgcacaattcaccggaaaccacgggcttcgtcaaccccagatgacactgacactgaacttgaactcatcggagtagttagagaaggcactcacaaaaccctaaatcaattttggaattcgaatgtttcgatttagggattgattgaaatcgtttttgtcttttcaaattttgaattatgaattttgcataaagcggactctattttttgaaatttattggattttgtttttggtaatttataagcccattaaaaatggcaaaaggcccaaaaggaatacttattttagggatgctaaaacccctagtaaaaaaaggctcaagcccagcccattttcttaatcgttcggcgtgaaagttcagatgggacaggcgaagagtcacgtctattcaatttactcgtctgcttttaattttacacgaaaccagagaattcaagaaattgaaactattcactggtgaagttcatcatggagagtcctgatcatcgacagaccattcagagggtaagaacgtcggcgccttcctctctggcgtctgcgactccaacatcaccggattgttcttctccaccaccacctgagtggttagttgacatcgggtttatccgccgacatttgggggttccgcttcaccgtgtaatcccccttggagaagtggagccgacggtaccgtggatgaggtctcctttaccaggagatatggggccggattttgttccagccccaagagatttcgtcccaggtcaagttattcatcccggaaagttttttggtcaaacgaatctatccaatgagatgcatgacacatgtctaaggttcattcaaaaggtaaatgtaagaatagtgtttcgttgttgctcgtttggttaggtttagggtttaatgaaatttcaggtttagggtttagttgtgttgattgttggttatattaggtgaatcatatagtggtcgtatagttgtattgatggatattttgcgagaaattaacatttctattgttggacaggtggataatcaacaccaagcttatagaaggcgtcaccgccaactactcattaagttgcaagacctggagagaggtatgaggcggttggaggttcatccgaaagactgggtgagatacggtttcgacaaagttgctgacattccactgccactaaggaaatggtgtgttgagcacgatggatcgtcaccgaattggtcgtttttcacggagccagatcccattgaggaggacgatgaaccagatgatgcgacctcctcctacatgagagtggatgagcctccacgcgagtatcctcctgactctctctttcaataaacattatgcctttgttttgcttaagtttgtaagataaatctaaatctaaattgtggttttaaatctttattttgctaactatctatgttttgaatacaatgtatgaatctaaatgtttgaatataactatctgtgttttgaaaggaaattttgctaacaattatataatcagtcgaacggatgtttggtcgaaccatttggacttcttagtcgagccatttgggctttagtcgaactatctgaactatttgaactaatcagtcgaaccaaattgaaccatttgaacaaattagtcgaaccggataatcctagtgttgaactatctgaactatttgaactaatcagtcgaaccggatgaactatataggtcgaaccgtttgaactaaccagtcaaacacatttgaaccatttgaactaatcagtcgaaccaaattgaacacatttgaactaatcagtcgaaccggatgaactatattggtcgaaccgtttgaactaaccagtcgaacacatttgaaccatttgaactaattagtcgaaccagataatcctagtgttgaactatctgaactatttgaactaatcactcgaaccggatgaactatataggtcgaaccgtttgaactaatcagtcgaacacatttgaaccatttgaactaatcagtcgaaccaaattgaaccatttgaactaataagtcgaaccgactaatcctagtgttgaactatctgaactatttgaactactcagtcgaaccaaaataaacagttgaacctaaaagaccaattacaagccaaatgtttaaaaattcacaaaagtaaacatcattacaatgcaaatcaagccaaacgtttttaaataaaccaattgttccacaactaccagtaactggatcaatctgccttccgcattctcttacgcttcttatcatccgccacaaacggtgatgtaataaggcgggatgctccccttgttcgcttctttccggtttctattacaggtggcacctcctgcttcttcttgcccccgccattcttcttcgcttttcctttcacctctttctccgtcgtgtttgtctccttattacctgcatacattttaaaacaaaacctaagtcatatattcacatttttatacccaacagacattaattattatacttactgttttctgcaacctctggagaatgttcactgatcagtatatcccgttgttgcttgtttccggtggtcacataaccatctggcgaagcaaataacacgtcatcgtctcttgcatgcccatgttgacttgcctcctctgtttgcttcccatgttccctttccttcagatctgccacaaataacttaatagactgcactctcacatcaatggcatcaatcttatcttttgtttcatcaaagcctttggtcatcatctgcgtcagtgaggttatagatgccacaaactgtatctaaatcagggaatcgaggagggacagcagtctcggggacctcattctcaatctcatggacttcctcatccgaaatctcatttacaatacatcgagaagaaatgtccatctcacacattcctttccaccatatcctactgttctctactaatagtcgctctctccaactgtcaataacaatatctattggaccgcagtcatcatcaacatcatcgtctaagagatctttcaacagatatttctcatgataggcaggtaccaaaatgcttggaaaatcctgttaaaagaaattcatttagcaatcaatcaatcaatctcatgatagactagacacacaatcaagtaaatacagaaactctaaccttagtattcccaagctctttatatataacttccaacgggacacctttcatgctacattctttaaacttatgcttgcacatccttggacagtcactcaaagcggagcgtacatggactctaaatttcagtccaagctgtggaatagcctcataaggcagaatctacaaataacaaaacaatgttaatatcataaaacctgtacattacaccttatactcatataataatcataaattacttacctcaagaggcacaatgaatccactgaagcaaggttgagcttttggtttcacgaaaccattcatgttcttcatcattttccttattcctgccatacattccaaaaaggtgtaacggccccacggaaacgtctcgcacgcattcaaatcgccaacaatccttaacagaaactcttcaatgtttccatcattctttgcaccagcttttactaccttgaccaagaagtacaacagcactaacttcaacctatctgaaccatgcttcatcttcgagcacttagcaagaacatctacaacctttatcccagattcttttttaaatatcctcttcacaaagttaatattccccattgtattcatttcttttgggtaactgtggcaatcaaacccacttaacaacgcatgctctttaatggaatacctaataggtactccatttaccacaaaccaagcctcctcgagcaaactgtcttcactgtgcgcagcataagcacccacatgccttgcgtctggtggttaggctcctgaggcatgtggaatatatgctggaactgatcgtgtcttttgaaccatacagcttcttctttaaacttcctctctatcagttcaattgtctgcgtgacctggcacctactgcttatcttgcacactttgccgtattctgaaaaaggaaaatgcatggtctgttgcggcagtggctgagaatctaaatcatcatcctccaaaccatcattgccagcctcatcttcctctgtctctttaacagaaacctcatcatcctcggcctcataagtatcctgcaaattcaataaacattaaccaattgaagaattcatatgtaccaaactaacaattcaaatgtaccaattgaactagttccatcaaattacttaaatcaaacatgtgtcacagatgaactagttgaacatttctaactaatacgagaactaatactcaaacaaaacaaatgtgtgtcatagagattcaattgtatatacctgacgattaacgttttctaccccttcttttggaattgtattcaccatttcctcctcctccaactcctccccattcccgtctttcgcttcttcgaattgttgaatgacagcgtcaattagaggtttcaaagttgtccctgtctgatcctcttcaatttcggcggttcctttaggagaagcctcatcaccaacacgcggttcctccatagccttttcaatttcagcggttcctttaggagaagcctcatcaccatcacgcggttcctccatagccttttcaatttcagcgctttcttttgtagtatcattcgccgcaacatctcgtgctgctggttctgtcggacctgctggttcggtcggaaccaagtcggcggcatctccgtcgttctcaatttctgaagtaacttgttctgatgtcgaaacttcaccggacaacgacttctccgtcgaatcatatacagggccagcaataccgtctctaacacgagccatcaaactattagacgaatcaagaattcgtcgaaaaatcgcgaaaggcgagaaattatgaatttgattttggaaaatttgaattgaatgagagcagaaacggtttgattttaaaaattagggatttcgcttaagtttggaatgggttttaggtcgctgggcatggatcttaattggatcggatactttgttgggtcgtctgggtttttggtcttttgccaattatttgaattttctctcatttatttttaattcgacaaaaaataggaattagaagagtctggttactttttcgcagatagtggcattctctctatcggagctagtatagaacaagcaactgtatctcccgtggcaattttcttctccaatcacaagttgataaggttcgtaattcatatttaatttgagaaaattgcgacgtttgattaaatagcttgaatttaacaaaggattcttcgtattgaattttcagataaggttttcgacaatgagcctcaaagatcagaaagcaaaatttgagttcaaggtaaatacccaatcagatcgcaaattgattgactaataacaaaccatcatgaaatgtactaagtttcacaaaacatttgagtgttacagaaatataagtaactgaaataaaaacataactgatacaaaatttaaacattagagacaataagacagataaggtggtttggtactaagatctgaatcatgtacaacaaataaatgtgaagaaagttgttaaatttcatcttccatcaccatttaagatggtgtgagagatgaacattgagttgttggtagagggaggagagactaatggtactgatgctgatgaggttactgaagtggaagtgattgccaaaccaggtattcccattaccatcggagtggaaactccgattccgggagtatctggagagaaatcaggcaatgcttggtctctgtttatgtattgcatcactttttccatgttaggtcttgattctggtataatgcttgtacagagcaaaccgagcttcagaaccatttcgacttccccgagtgtaaatttatctctcaaccgtgtatctatagcgtcaactagagaatgtttcctccagcattcacaaacccatttgaccagatgtcgtttctctactggcatctcaggatcaaatggtctcctaccacatgttacttcaagcatgaatgcaccaaatgcatacacatcggtttttgtggaagttcctgttgatattaactccagagccatgtaacctatggttcctacagctgctgttgcagagaggttagctccatgatcatcaaacctagcacaaaatctcctaaaaaagcttgaaaattttcgtttaacatgacattagaagctttgatatctctgtgtaaaacaacttgactggctcctgtatgcaggtaacagagtgcagatgcaatatctctcagtattgcgagtctttgagaccaagagagaggtggtttatcgccattaaacaagtattgatcgacgctacctccttccatgtacttagagaccagcaataactcgccttttctcctgcaatacccgagaagaggtactaaattcttgtgctgtaagctccccattgtcacaacttcagccacaaactgtttcatgccttgctctgcattgtgtgatagtctcttcacagctatatctcctactagaggcagacttcctttatacacttctccaaaaccgccttttccaagacgtccgtctttgttaaacccttttgttgctttgtacaaagattcataggaataacgaagcggaccatattctttttcccatggctctctaacttctgcatacttctttcttctgtacagataatatcctccaagacccccgatcactacgagggtgagtataaccaaaagaacaataagcagaggagatctttttctcttctgttccgtgaaaagaggaactgtggaaagttcagagatgtcaaggctctttaataatcgtctgcttctgctgaaactccaccctaagatgtattggttactaatcgatgatccagttgcagccgaaaacccgacaaaagcttttcgatccgggaagattgcggtgaggttgatggttcttgacaaaagaggcttacttggtttctgatttcttagaggtgctaaagtaacattaagtagagtatcttcataatcgacccatacctgaataggatctccactcaagagtattaagcttatgtttttcccttctctgtcggaataataggaagctgaagcagaaacgacagattggattctgttttcgtctataccgacatggttgttatccatgtcatcagtctctgcgctttggaccgtatcaagctcgacagctaaaacgtgagaagaaggagatccgttagttgatctgttgaaaagtcctaagtaactacttgcatatgcttttttgagattatgtgcagatgatagcacaaaagcaatcccgtgaccaccataaaatcctggcttagggacaagagcgcaaacgaattgagtaaagaaggagagagactgagatgaagctgaaccgaaatcgaatggtcggttgaagaaggcatgacccttttgctgagtcgtgccatcggttagctgcaaaactctttctggagattggattcttgcaaagccatcaaggagaagttcatcaccagcttggtcttggttaaagccattgaagacgaaacttaagtcttgttgacttgaaaagcaaatcagattaactaagaagatcaagaggagaagaagaagataaaatctttgagccattggtattgaaaaaaccagagacaagcctcgtttattttctacgttccaagtccaatagaaatattctctccaggcaagaaagagttgacttagaacttcttaagatgtataacctgatcattactctcaaaataatagttttgtacgttttaacaatgtcaagtcggaactaaattaaagcgaaataccctcaaagcgtttaccaattaccattattggtttaagacaaccttgaaaagatagactctgcatctttttcaatatcgtttagctctaaaacagctatacaactttggagacgaaggtgtgttgagttccgaggtcatgtggaagagaagagaggataacgtgcttaagaagcatcccgttaaagaccctactttgtcaaacccatttcttgctctatgcacgaaccggttcacattaaatgatcgaactcacgaaatgatttgtacttttgttcttaacgaaaaataaatggatgattgatacgcaaaaaaggcaagcagattaatctcaaccctgacagaaacatgaggcagtgtagaaaagatcatggagtcagagtttttccagtgcctgattagcctccatagatcttctaagtcctttgatcctcttgagtataaagtgcccttatactctgtgatttaaaatttttggggtaaggtatgctttgtttacttaggaaataaagttcttttagttcaagatggtgtgtgatgagaaataacctttttggagcaaggttttatcactttttagttctaagtgttgcagtttgctgggtcaaaatttggagatttccatgaagtcctcaaaagttctactaatagtctatggtctactgataagatggtgagcgagaagctgtcatgacatatgcataagatcagattcgaaacttaggtttttcgtttttccgttcagcttttcacaattgctcccatgttcgaacttctcctttagtagatgaacattttgtacctttcgctttatttccttgcttgtaaagttaatgttttctctctttacttagtcttctttggtttgtaaagttatctacgtgtatcatttcttgtacttgtacatgcctctccaaaatggttctccatggatggatgatgggcttgttaatatatatatatcagtcactcttggaaaaaaaaaaaaactgtggctctatgtatgattgatcaactaaaatgggaagaacaaaaggaaaataagacacaaaaagaaagaaaaaaatgttgattgaaattgaaggagtaattttcaaagtcccaatgatacatgtctcaccattacaatagagaaacatttcattagtggcctccaaataaatttcttacacaatcttttttgttattaatgttaaaaaacacaaaaaaaaaaagagattaattatttgttttctttttatagtaactactagttaaattattttgtttcttaaagtaaactattcttaccttttttttgggactttgtgtctacaaaaagtagtgtaaaaaaaaaagaaacaaaaaaatcgaaaagtaattggaatataaatttgataacaaaagaccatatacataaaaacaactaaacaagtataacaaatccataaatacgaattaaaaatgaaagagttaattatagaaaactttccgatctctgaagcttcaacaccgtttgttcatccttgttctccgccgcattgtctctttccatgagagatcaatttcttcacaaagaagcttcttcttcttctactacattcctctcagcaccaatctctctttcgcatctcaattcgaaacgtgagtatttcctttttctccattctcgaatcgagcacaagtcgagtctcgcaacaacacttaacctagaattgatgattcggtatacaattttccggtgtgtatcgagctgattctctgatgtagaagccctaatttctgtgtatatttgatttgattctcttttgtgattgattgattatggcaatggtagagaagaatagttctgcgattggctatgtagctagaaatctgttactgagcttattcgtcgtcacgacgatcctctttgctctttcctgttactttgtgttacgttccactgctcataatcgcttccttagctctacatttccatctaaatcattcgtcgatgtaaggccggagaaagcgaattgtagatgtgttaaggacgagaaatcgtcggtaatcgcgggtcctttgaaggtttatatgtataatatggatccagagtttcattttggattgttagattggaagaagaaggaaggtagtgatagtagtgtatggcctgatattcagaagtatataccaccttatcctggaggtttgaatttgcagcatagtatcgagtattggcttacgttggatttgcttgcatcggagtatgagaatgcaccgagaagtgttgcggcgaagcgtgtttataattctagtgaagctgatgttatctttgtgccgtttttttcttcgttgagttataatcggttttcgaaagtgaatcctcatcagaaaactagtaggaataaggatttgcaagggaagttggttacgtttttgactgctcaagaggagtggaagaggagtggtggtagagatcatgttgttcttgctcatcatccgaatagtatgttagatgctagaaataagttgtttcctgcaatgtttatactttcggactttggaaggtatcctcctactgtggctaatgttgagaaagatgtcattgcgccgtataagcatgttattaaagcttatgaaaacgatacatcgggtttcgatagtagaccgattctgctttactttcagggtgctatctacaggaaagatgtgagttcttctgttaccttgctttagttccttgtgtttccttgtttgttctctaaatatggtttcctccaatgtgtcaaatatctcagggcgggtttgtgcgtcaggagttattctacctcttgcaagatgagaaagatgtgcatttctcgtttgggagtgtgagaaacggaggtataaacaaagcaagccaaggaatgcacaattccaagttctgtctcaatattgccggagacactccttcgtcaaaccgtctctttgacgccatagccagtcactgtgttcctgtcattatcagcgacgacattgagcttccttttgaggatgttattgattactctgagttctcggtgtttgttcgcacctctgatgcattgaaagagaacttcttggttaacttaatacgaggaataaccaaagaggaatggacacgaatgtggaatcgattaaaggaagtggagaaatattatgagttccattttccatcaaaggtagatgatgcggtgcagatgatatggcaagcgattgcccgtaaagttccgggtgttaaaatgaggattcataagtctagaaggtattctggatctgtttctgagaccgggaaagaatcaagatggtcttcattgatacctcggagtttctggtgaataaagatgagatttttttgtcttcattttcccagaggacatcaaattgtttttttgtttttgtttttgtgtagagataagtttatgttggatcaagatgatttgtcaactttttcccctaatcataggttatagatagagagacaagtcttcactctaatttgatttcttcttttcaccatagaaaaaaactaataatgttgtaagttgatttgttaaaattgttcattttgatctctctttttttttttaagttgttaagttgactttgtatagagagacttgtgtttccccaggtgttgccatttgccaaactgttttgtacttgaaggccgttttgattcaaaagccaaaaaactaaaaacttgtcagtttacaatgactagaagaactgttttatttgtcaattgatacctaaagaagtttgagtacaacatcaaccaacaacatagtcaatacattaagttaaaacatttacgtagctaaacagatttagatgcagagagtaaaagagtatagagtatagaatttcttagatcttatcttccatgcccgtccaagattgtgtgagtaacaaacatagaaactgatgagttccttacactggagaccccaatggcagataatgcttccatagaaactggcataaaagccccgatacctggagtagacggcgagaaaatcggtaagggtaagtcttggttaaggtattgcaccacttgttccatcgcaggccttgattctggcatagcatttgtgcagagtaacccaagtttcagaaccatctcgacttcctcgggtaagaattctactcccaatcttggatctctggtcttgaataagcaagcctctttccagcattcatagacccacttgaccaaatattgctttccgactggtagctcaggttccactggtcgcctgccacaaattacttcaagaagaaaagcaccaaaagcatacacatcggttttcatagacgtgcccattgttattagttcaggtgccatgtaacctatggttcccacagcggctgttgcagataagttggttccacggtcgtgaaacttggccattccaaaatcacctaacctcccgttgaactcggaatccaacatgacgttagaagcttttatatcccggtgcaaaacaacttgcttggttcctgtatgcaagtaactgagagctgaggcaatgtccttaagaatagaaattctttgataccatgaaggagatgggtttccctcatgaaacaagtactggtcaaggctaccgttgggcatgtactcagacaccaaaagtaactcacattttctcctgcaatacccgagaagaggaaccaagttccgatgttgtaaatttcccatggttacaacttctgccacaaactgtttcatcccttgctctgcatcgtgggatagtcttttcacagctatatgcctgcctccgggcaaagttcctttgtagacttctccaaacccacctttcccaacacgacaatctttacgaaacccatttgttgctttgtacagagacttataggagaatcggtgtgggccgtattccttttcccaccattcttttacttctgcatatttctttctcctgtaccaataaactcctccaagaaccatcaccacaggaatcactaataagatgaccaaaccaataagtaatggagataatttctttttttcctctttaggaagaggaacccgaggaagtgtagagaggttcaggctctgtaattgttcttttcttctactaaaactccatccaagtatataatggttactgagaagattccctgttgatgaagagaacccaacatacatcttctcttgaaagatttctgaaagattgatggctcttgatataagaggctgatttggcttcttgatttctataggggccagtgtaacatttagaaacgagccatcgtaatctacccagacctgtataggctccccactaagaagatttatgcttatattcttccccaaagcgttggaaaagtaagatggcagagcagattcaacagatattgggctgttcaaatcaataccaacatgaggcttctccagctcattaaactctactgtcttaacggtatcgagctcaatagctagcagatgtgaagaggaagtcccatttgttaagttgctgaagacccccaagtactgagttgcgtatgcatgagagagatcaatggaaggagatacaacaaagacaatcccatggccaccatcagctcccaacttaggaggcacaagcgcacacacaaaatgtgtatagaacgatagtgatgaagatggatcaaaatcaaacggcttcttgaagaaagcatgacccatttgcaactctgtagtatttgtcaactgcaaaagcccatcaggtagtattttggcgatcccatcaataaaaagatctgcttgctcgaagccattgtagacaaacccggtttcttgttgacttgacaggcaaatcagataaacgcaagagaagatcaaagccaaatatagtctacaagccattgctaaggaaggagagagactgaattctaagaaaataattattctttctggtaacaagcaatctctagagctaataaaacaaagtctagtaataacttagaggccaagaagtcaaactcaattttcaacgttccatatcctccacttttcctagcatttgctaaagaatgttgtcagccaatgcaattatattcccaaattggcatcaccaagttgacttcatgattaaataacaaaatatgaccttatcataccagattttttgcataatcttatccgtcatgtaaattaagtaaagccggagaaagatctaacggtttacactagttattctaaggtcatcaaattaaacactccatgataaccattatgcataatctaaaaccatcatgtaaatatgactgctacagaaacattttgtgctctactatggtttttccaaagctaactgaagaaaacaaaagcaagctaaatacttccctcttgcagaaatatttcatgtaactcccaaaggaatgtcaaaggccttggagtacaagatgtttatagcattcagaaagtcaagggttagatagataacacatatattcaacagggacaatcctaagcaaacacacttttcttggccaactttgataaattccaactaagttaatgtaacgttccaaggtaaagtgacatgtaaactaaatttgaatccagaggcaaaatctctataactaagatactaccaagaatatgattacaaaagtcacaatctttaactaattcagctcttaagaattccaattaaacaaaaacatgaaagagcatatacaagtctcacataaaacataccagtcatacctaaagttctaatccaataaattaacatcttttgaaactcgatcatcatccatttagctcaatatctataaaatcaaccaggataaaacttctagatcccaatacaagaacaagaccgttaaagtgttgtttcaagtttaaggaagagagatggtaacaaatcaatgcattcgaactggcgatggtcatgtcacatataccaacacaagaaatttttatacatgttataaactttcttggccttacagtcaaggaaattaatatcttctcacttaaaaactatacagaagacaagatcacttaaaaaaaacaacaactagcaatatagttaattccttaaaataaaatatttgggtagctagctatagagatttagatgcagaaatactgagtttcttagatctcatcttccatacccttccaagatcgagtgagtaacatgcattgatgaatctgggataccaatggtagatgatggttccactgaaactggcataaaacccccaatacctggagaatctgctgagaaatccggtaagggttgtttctggcttaggtattgcatcacttgtcccatgtcaggccttgattctggaacatcatttgtgcagagcaacccaagtttcaaaaccatttcgacttcctcggataagaattcccttcccaattttggatctctggtctcgagcaaagaagcctgtttccagcattcacaaacccacttgaccagatatttcttttgcactggtaactcgggttcaaatggtcgccttccacaagttacttcaagaaggaagataccgaaggcatacacatcagtttctttagaagttccagttcttattagctcaggtgccatgtaacctatggttcccacagcagctgttgcagataggttgccttgggggtcctgaaacttggccataccaaaatctcctaatcttccattatactcagaatctaacatgacattagaagcttttatatcccggtgcaaaacagctggattggctcctgaatgcaggtaattgagagccgaggcaatgtccttaagaatagaaattctttgcaaccatgatggagatgggttttggttataaaacaagtactggtcaagactaccgttggacatgtactcagagaccagtagtaactcaccttttctcctgcaatacccgaggagaggaaccaagttccgatgttgtatatttcccatggttacgacttctgccacaaactgtttcatcccttgctctgcatcatgggatagtcttttcacagctatatgcctgcctccgggcagagttcctttgtagacttttccaaacccacctttaccaacaagagcatctttgacaaacccatttgttgctttgtacagagacttgtaggaatatcggtgtgggccgtattccttttcccatgattcttttacttctgcatacttctttcttctgtaccaataaactcctccgagaaccatcagcacagggatcaccaataagatgaccaaaccaataagtagcggatgtaatttctttttttcctctctaggaacgggggcctgttcatttctaggaataggagcctgggggagtttagagaggtccagagactgcataaattctttgcttttactaaaactccacccgagtatatactggttactggtcaatctcccatttgatccagagaacccaatatacatcttatcttgaaaaatttctgacagattgatgtctcttgatataagaggccggtttggtttctgaatctctataggggccagtgtaacatttagcaacgatccatcataatcaatccacacctgaacaggctccccactcacgagatttatgcttatattcttccccaaggcgtcagaaaagtaagacgggagagcagactcaatagatatcgggttgttcacatcaatcccaacatgagccttttctagatcatgaaaatctactgtctcaacagtatcaagctcaatagctagcagatgagaagaggaagtcacatttgttgagctgttgaagacacccaagtactgagttggaaacgcgtgagagaaattcatggaaggagatacaacaaaggccataccgtggcctacctcagctccgaacttaggaggcaccagcgcgcatacaaaatgtgtatagaatgagagtgatgaagatggatcaaaaccaaagggctgcttgaaaaaagcatgaccaattttcaactgtgaagcatttgtcaactgcaaaagtccaccaggaaggatcatggcgatcccatcaataaaaagatcttcttgatggaagccattgtagacaaacccagtttcttgttgacctgacaagcaaatcagacaaacacaggagaagaacaaaaccagatgcagtctacaatccatatctaccaaaagagagaactttatgtgcagaaactttttctccggtaacaagcaatctatgaagctgctactgcaatacaaggtctattcacaacttcaggagaagatgtcaaacacaattttcaacttcaggagaagacgtcaaactcaacattttccgacctgttctcctttggaattgtagccatataacggtaaaatatattcccaacaggcataaactatgataataaatcatgacaaataccatcattttttgcataatctaatccatcatgtcaattaattactaccggaaaaacacttgatagtctactactatggttattccaaggtcaactgaaacagaaattaatcccgaaagactctcgaataccttggactacaggctggttctagcattcagactttacttagatattatatatgcaaaagtttaacgagtacttaaagtagtccccttaacttttcaacagagccaatgtctatagaaacagtaaacaaactttgcttggtgaaattgatgcaatccttgagaagtaatccacaaactttggatgagattttttcaacaaaattaaattcctttgccaataaagagaaacgaaaagtaagtagaatccagatgtactagtaaaaaaatcacaatctctggtccgatcaagtcatgccttatgaattccaataaacttaaacgcgaaatggcaaatgcaactctaacatagaacaaaccagtcccgatcaatttttttctccgactattcaaagtccttaaaccctaaaatttctctttgaacattccatcattatccaacaatgtgagacgtacataccttccaggataagagcttcgaggtctaaatctttggcgacgtttttctctgtcgccggttgaacaaagacggcaccgtcatcggaaacgatattccgggacggagagcttctaatttaggcacgtgtgtggttcacgcgttggaatatgtttagatgttgttttaattatttggcccatgttgaggtcagtattagtccaaagaagcccaaatgtattaaccgggtgaatcaaaccgattctatctgaaccaagtcaatagaaattgatttgaaaccgtttttatttggttaagggggtagttaacaatgtactacaaaagtttttacattcaaacttcaattcacaaaaacttttattttgtctatcaaatcaatcaaataaatttagcacaatattttcaattcaatttcatgcgattttattgaatcctaaatattattatattcattttattaccgcttaaaccacaaattttaaattgtagttctatattaattgaaaataaaagaaaactaaaccgaattc

SEQ ID NO: 80 - DNA, 110980 bp, Arabidopsis thaliana
gaattcccttcccaattttggatctctggtctcgagcaaagaagcctgtttccagcattcacaaacccacttgaccagatatttcttttgcactggtaactcgggttcaaatggtcgccttccacaagttacttcaagaaggaagataccgaaggcatacacatcagtttctttagaagttccagttcttattagctcaggtgccatgtaacctatggttcccacagcagctgttgcagataggttgccttgggggtcctgaaacttggccataccaaaatctcctaatcttccattatactcagaatctaacatgacattagaagcttttatatcccggtgcaaaacagctggattggctcctgaatgcaggtaattgagagccgaggcaatgtccttaagaatagaaattctttgcaaccatgatggagatgggttttggttataaaacaagtactggtcaagactaccgttggacatgtactcagagaccagtagtaactcaccttttctcctgcaatacccgaggagaggaaccaagttccgatgttgtatatttcccatggttacgacttctgccacaaactgtttcatcccttgctctgcatcatgggatagtcttttcacagctatatgcctgcctccgggcagagttcctttgtagacttttccaaacccacctttaccaacaagagcatctttgacaaacccatttgttgctttgtacagagacttgtaggaatatcggtgtgggccgtattccttttcccatgattcttttacttctgcatacttctttcttctgtaccaataaactcctccgagaaccatcagcacagggatcaccaataagatgaccaaaccaataagtagcggatgtaatttctttttttcctctctaggaacgggggcctgttcatttctaggaataggagcctgggggagtttagagaggtccagagactgcataaattctttgcttttactaaaactccacccgagtatatactggttactggtcaatctcccatttgatccagagaacccaatatacatcttatcttgaaaaatttctgacagattgatgtctcttgatataagaggccggtttggtttctgaatctctataggggccagtgtaacatttagcaacgatccatcataatcaatccacacctgaacaggctccccactcacgagatttatgcttatattcttccccaaggcgtcagaaaagtaagacgggagagcagactcaatagatatcgggttgttcacatcaatcccaacatgagccttttctagatcatgaaaatctactgtctcaacagtatcaagctcaatagctagcagatgagaagaggaagtcacatttgttgagctgttgaagacacccaagtactgagttggaaacgcgtgagagaaattcatggaaggagatacaacaaaggccataccgtggcctacctcagctccgaacttaggaggcaccagcgcgcatacaaaatgtgtatagaatgagagtgatgaagatggatcaaaaccaaagggctgcttgaaaaaagcatgaccaattttcaactgtgaagcatttgtcaactgcaaaagtccaccaggaaggatcatggcgatcccatcaataaaaagatcttcttgatggaagccattgtagacaaacccagtttcttgttgacctgacaagcaaatcagacaaacacaggagaagaacaaaaccagatgcagtctacaatccatatctaccaaaagagagaactttatgtgcagaaactttttctccggtaacaagcaatctatgaagctgctactgcaatacaaggtctattcacaacttcaggagaagatgtcaaacacaattttcaacttcaggagaagacgtcaaactcaacattttccgacctgttctcctttggaattgtagccatataacggtaaaatatattcccaacaggcataaactatgataataaatcatgacaaataccatcattttttgcataatctaatccatcatgtcaattaattactaccggaaaaacacttgatagtctactactatggttattccaaggtcaactgaaacagaaattaatcccgaaagactctcgaataccttggactacaggctggttctagcattcagactttacttagatattatatatgcaaaagtttaacgagtacttaaagtagtccccttaacttttcaacagagccaatgtctatagaaacagtaaacaaactttgcttggtgaaattgatgcaatccttgagaagtaatccacaaactttggatgagattttttcaacaaaattaaattcctttgccaataaagagaaacgaaaagtaagtagaatccagatgtactagtaaaaaaatcacaatctctggtccgatcaagtcatgccttatgaattccaataaacttaaacgcgaaatggcaaatgcaactctaacatagaacaaaccagtcccgatcaatttttttctccgactattcaaagtccttaaaccctaaaatttctctttgaacattccatcattatccaacaatgtgagacgtacataccttccaggataagagcttcgaggtctaaatctttggcgacgtttttctctgtcgccggttgaacaaagacggcaccgtcatcggaaacgatattccgggacggagagcttctaatttaggcacgtgtgtggttcacgcgttggaatatgtttagatgttgttttaattatttggcccatgttgaggtcagtattagtccaaagaagcccaaatgtattaaccgggtgaatcaaaccgattctatctgaaccaagtcaatagaaattgatttgaaaccgtttttatttggttaagggggtagttaacaatgtactacaaaagtttttacattcaaacttcaattcacaaaaacttttattttgtctatcaaatcaatcaaataaatttagcacaatattttcaattcaatttcatgcgattttattgaatcctaaatattattatattcattttattaccgcttaaaccacaaattttaaattgtagttctatattaattgaaaataaaagaaaactaaaccgaattcttttggcaacaatagtaataaataattacccgaacactaaaagtaaaacagtgaaatataacaaagaaacctgaaacattgacaagttaaatgatacattttttagagaatgaactacttcaataagatccttcagctcttaaattccaatggttgttcatgatcctttgagttattggctgaagaagaagaggccgaaggagctgaccagttcctcgaagtaaatgagacggtaagtgaggctgcatcgacaactacaggagtaaacgagccgattccaagtgtatatggtgagaaatccggcaatggtaagttcccacttaagtaaagaaccacttgtcccattgctggtctagattctggcacaatgtttgtacatagcagcccgagtttcataaccaactcgacttcctcgggtacaaattcttctcccaatcttggatctttagcatcaagcaaagaatctttcttccagcattcacaaacccatttgatcagaaatcgtttctcaacttgcaccccgaattccacaggtttcctcccacaggctacttcaagcaagaaaacaccgaaagcatatacatcggttatagtggaagctcccattgttattagctcaggtgccatgtaccctacagtgccaaccgctgctgttgtggctgcattgcctccatggtcatgaaacctagccataccaaaatctcctaacctaccgttcaactcagcatctaacataacgttggaagctttgatatctcggtgcagaacaacttgttcagcttctgtatggagatagaagagagctgaggctatacccttgagaatcacaaatctttgggaccaagaaagaaccggactttgatcatcaaacaagtgttggtcaagactaccattaggcatgtactcggaaaccagtaaaagctcgccttttctcctgcaatacccgagaagtggaacgagattcctgtgtttcagacttttcatgctcacgacttcagccacaaattgcttcatcccttgttcgccatcatgggacactctcttcacagctacagttttgttcaaagggagatctcctctgtacacttctccaaaacctcctcttccaagaaatctatccttgtggaaacctttagttgctatgtataaggatttgtaagagaaccggtgtgtaccatatttcttttcccatggttcacttacttctgcatacttcttcttcctgtggtaataaactcctgcaagaacagccattactacgatagcaagtataacaggcagagcgataatcagcgcaaattgtactttcttatgctcagctctaggccgtggaacttgaggaagttttgagaagtcaagtaactgagataattctctgtttgtgctgaaactccacccaagaagataatggtaactgattgatgtccctgttgctgcagcgaagccaacaaacaatcttctcctcgagaagatttctgagagattcatggatcgtgacaaaagaggcaaacttggcttctcagcttcaagaggcgccacagaaacattaagtacatttccatggtaatcaacccagacctgtataggttttccacttgagaggtttatgctcacattcttctgtgctgtcttggaaaagtaagaagccggtgctgattcgactgaaatgggattgttcacatcaatcccaatgtgattattgtttgtctcacgaaaatctggattcctaacagtgtcgagctcaacagcaaacaggtgagaagagggagatccatttgttgatgcgttgaatatccccatgtaccgagttggttgcgcccgtgtgaaatccacagtaggagatatcacaaaggtaatgccgtgaccgccttcaaatcccggcttaggcaccagagcacagacgaaatgtgttgaaaatgagagtggtttagaggagctgaagtcaattggcttcttgatgaaagcatgacccatttgatgctgggagtcttttgcaagctgtagtaatccattgggaagcaatgtagcagacccatcaagagcaagatttgattgaccaaagccgttgaagacaaaactggtatcttttgatgaagttgagaaagagataagatgaaaagaggagatcaaccagattagaaacaatcctttagacattgctgctgatgaaacagagagctctgtctagctgcagagaaaagagaaataaatatgattataagaatcacacaatgtaatagcatcatctgcatacatatctgtcttgactgcaacagcttgataatattatataaatcatctgaactacacgtggttctcaaattttttaattcagatactagtttaacaaaactaatccaaatttcgttcaaaaaaactaaggaaagtgctagaagcgtactaacaagcagtaaacgttgttaaattaatcattacatgtgtcttggattcagtacccaaaatctttcaccggatttttctcatacttcacctacttatacagataattagtaagaaaacatctattgttaaacataccagatctgaagcattccttgagccattgctgctacgaataagagagtttattgttctttgtgcaagatctttttcctctctgatcaagcttagctggctgcagaaaacaaattatgaacttatgataatggtaatcacagcctaacagcatcatagtcatttacttttcattttctttacaaacaggactatcacaagtttgtaatattatattaatcaagaatcacttcatgttgtagatattttaatccagacattactttaacataaattatcccagcatcagttaataacaaaggcaactgctaaacaaacagaaaagaaaatactcaaaagtaaaaggcatcaaaagcctagggaaagccaaagcacccaccttttatagaatattgaagtagctagatagaatcaagttcaggcaagtcaaatagagaaattgcagtcttaatttcataatgtgataagaatactacaaataaaatacagaccacatttctcacactagtatatttaagtctatatcgtcctatttactttttattcacacagaatcgcatctgaaacatcgataaaaatttcctgaagaagcaatagcaagttcttccataattcccaagtaaacggtacccccaaacagtaaaagaacatagaagacacaaaacttgatgatcacatgtttgagactagctacatatattcttaaatcctttagaaacagaaagttatgataaactttgaggaaatcaactctctattacctcagaccatagctgaatatgttacggatataaaaacataagtgtagtcctttaacaatttcaagaataaacctctaaactttacctgtcatggggtgaaacaaccaaccatctctaattctattatcagttggatcacaaacttgatgatgctctcttgtgatcccaatcagctccactgacgaaactggcctcatttcaactattcaagaaaaccagtggaatataagaaaacagatgaagatttaatgtgaacagttaagaaaacttcatcacaaacaagcatgaaattcatagcaacgacgttagcaacaaaacctgaactccaggacttgtagatggaacaaaagtccgaacaagatgggatatatgctcacttgacaaaggattcaaaggagtctccgcagatggaaggtcattgcatcattcaagccaagaaatatcaaaaatacagatacagatagtgcatgaaaccatcacactgaaaccgacccaccgcagatggaaggtcattgcatcattcaagccaagaaccaaaacactggtttctgctaatctggggcttgatcatacaaattattttttgtcgtacagagaagtaacagaatgagatcaaattagcagacagagtgaagaacaactaataaacatatgaacaaaagccttatttattggaaaatgcaataaactaatgaagaaagagatatgcagatagtacggttacataatagagtaaagtgtaaagaaacatcaaaatttacaaagcttaacatcatttctacaaaagactccaaacactacttttcagtgctggatgtctttgagaaatatcaaaaatagacttcacaaggagagcacaatgccaaactaaagtaccttcacacaagcctagcatggcttttcctcattccgaaaaaaaaatctaagagaagaggagcaaagttgtcaaagtttaccgtccatccccatggataattgagtgagtgacaaatgtggaatcgttggctgaggaagaagtgtaaaaggtcttggtactgggggagacaggggggtttgatccgataatcagcggggtaaaggacccgataccaggagaatttggagatatatcaggcagctctaagcttccgtttaagtattgaacaatatcttccatagaaggtctcaggtctggcacaccatttgtgcaaagcaaccctagtttcagtaccatttcaacttcctcagctgagatttcacctctcattcttggatctcttgctcctagcaaagaagccattttccaacattcgcagacccacttaactatataccatctttcagctgacaacccaggttccacaggtctcctcccacatgttacttcaagtaaaaaggcaccaaagccatacacatccgtggcagtgcaagctcccactgtagcaagctctggtgccatgtagccaatggttcccacagcagcagttgtagcagggtctttcccatgatcatgaaaccttgccataccaaagtcccctaaccttccattaaattcggtgtctaacataacgttagaggccttgatatcccggtggagaacaacttggggagctcctgtatgcatgtaattgagagctgtagctatatctttaatgattaaaagtcttcgacgccatgaaaatggcggtttttcgtcattgaataagtattggtcaaggctaccattgggcatgtattcagataccagaagtaactcaccttttcttctacaatacccaagaagtggaaccatattcttgtgcttcagattacccatgctcacgatttcagccacaaactgcttcatcccttcctctgcatcatgggacactcttttcactgctatttgtcctttggaaggcagagttcctttgtacacttttccaaaacctccctttccaagaagtccatccttgttaaacccattcgttgcaatgtacagatctttataagaaaaacggtgtgggccatattctttttcccattcttctcttatttctgcatatttccttcttctgtagacataagctgctccaagagccaaaaacactatgattgccagtaaaatgagtagaacaataaggaccactgatggtcccttatttttagctctatgacgaggaactcgaggaagtttagtgacatcaagggtctgcaatgacaccttgtttctgcttaaactccacccgagtatgtattggtagctgatcaatgtccctgttgctccagagaacccaagaaagaactttctatctggaaatgtttctgaaaggttgatggatcttgacaaaagaggccggcttggcttctgaattttaagaggggccagcgtaacattaagtacattccctccatagtccacccaaacttgaataggatctccactcaaaagctttatgcttttgttctccccatctatctcggaaaagtaagcagccggagtagatgcgatagacataaggctgttgacatcaattcctacatgattggcatcaatgtcatcaaactcagcgctgagggcagtgtctagctcaacagcaactagatgagaagaaggggatccttgagtcgagatgttaaaaagtcccaagaactgtgttgcatctgcctgtgtgagatccatggaagcagataaaacaaaggcaataccgtgaccaccaataaatcctggcttaggcaccagcgcacacacaaaatgtgttgagaaagagaatgatctaggtgacttgaactcaaaaggcttcttgaagaaggcatgtcccattttctgtccggaaccatcggtcaactgcaacagtccgttgggaagaattttggctaccccatcagtataaagatctgcttgaccaaagccattaaagataaactctgtctcttgttgacttgagatgcaaatcagatgaagacagaagatcacccagatcagatgcaatccttgagccatttctgacaaaacagagaatctgactattctgaacgaatcttgttttctgcaccaatggtggataataatgtatccagctgcaaaacacagtcaggtcaaaacttctcagtatataatataaagtccaatctttttcattgccaagtcaatcataatttcaatacatttccacccattgaattcgtccagagcaatgaaaacaatttatgtctgagcatttcaaagttgacttaggaaatgtaatggtattattattatcagaaaacaattgcatattctaacccatcaaatattttaaacaaaccaagtcctaaaatagtaaactaaacggtggctataatatgagacttgtctatcattccctggttccagaatattctccactactcccatcccatatcatcaacaacacaccccactatcctgaagacaaaatctttagttataaaagtatgtttactagctttattaaatacttgaactgttcttaactccaattataaacaaattatttccaaattccaacagagaaaacaatttaaggtccaagaaaacgattaacagttatctattgtctaggcaaatgcaccaaaattattaaaatattcatcataccaagctgaatccaaaggcaagtccatcatgttctcaccaaatatgaacactgctaacaagtccatgttcccaccaaagcctcctaaagtaaacttggctgacatcctcttcttcagcattgttacctatgattttgaaaggaaaagccatcaataagacatgattatcaggcagaaatcgaacggacaatatgctgcagtggcaaatcccaaagagttgaccttgaacaacaagagacatacatcacattatctgccttttgggaacagatcgatcaatatagccctatcaactcattacaatttctagctaggaattgctcaacacactgcaattgaggcatgggggaaacagatgcagcgtcatctatgcctagagatttagcgacagtggtggacatactacactgaagcttctagggtttctcaattgcgcaaacttgaaagaagggaaacacagaaagtcacagagacaagtagtgcaaaagagctgtataaagtggaataaatattcttatgttacagcttcatatctgagttttatacatatcgacatatcggttgaactcaaaaggattgcagagagattgagaaagaatcccacaaatagttatcccattgttcttgagagttgattcattttcgattcttcctctcctttcttcttctttctcttctcgtctctatcggagttcctctgtttacttctctgaaacctctttttctgacaagtccatccttgttataccatttcctttccagatagacaataactgctccaagagccaaatacattatgattgtcggtaaaacgaatgcctgtacaagcaaggccgtaacacaatcacaaacaaatcctgccttagacgccagtgcacacacaaattgtgttgggaaagagagtaatcgagttgaaccgaactcacaagggttcttgaagaaggtatgacccattttcactctggatccatcggtcaacttcaacaatcctttggcaactccatggcctgtttcaccaaaacgtttatagataaaccccgtttcctgttgacttgagaagccaatcagatgaacacagaaaatcatccagatcagatgcaattctcgagccatttctgaagaaacagagagtctgattattctgaaagaaactgtctttcacaccaatggtcgatgaaattttctccagctgcaaaaaaggtcaggtcaaaactttttcactatataatacaacatccaatattttttcaatgtcaaatccaccataatttattaacttttcttgtatccattgaatttgtctaagagcaatgaaaacatcttatctttgagcatttcagagttgacttgagaaatgtaatgacatgcaacatttacatatactaagccatcacatattttaaacataacagctcctaaaatactaaactaaaatagatataaaaaaactgagacttctataacattccctggttcaaagaatattttccactatcatcaagaacaaacccacaatactaaaatcagaatctctagttaaataagtatatatctactagtttcttctcaactccaatatatcttcaggtattaagcaaatacatcctaacaaagaaacaattcataatccaaattaggtagacacagaaacttgtaaaaatattcataccaagctgaatacaaagtcaagtccaccatgttcacgccaagtactcgtctttggcatttgatacctatgatttgcagctcccgtgttctcatcaacaccaaacaatgattttgaacgaaaaaaggccatcaatcagacagaaattgaacggacaagatactgtagtggcgaatcagaaaaagtttacttgaacaacaggagatgtgcatcaacatttgcctgcatttctcagatgaatcataattcaagctcaagctaagctttcttctctcccttcccatggctcagaaaatcatatcctcaatttagaaaatcacaatgaaatcaagccgatgggagaaagcacagtgtcgccatgagccgcctctgagaaagaaaactgcgaaatcatctcggccgacagatcttgcgacggagatcagatggtaatgcccataaaggaatcgttatcgacgtaaagcgacgccgttttggaagtacacgttttactctttatttcaatttgttttttggttcaactctcgtgttattttattattaccttaattaatctaccagtttacttttcatctaattatactaaatcaacagtcacttttcccaaaactgcaagtctctccttttgccatgtatgcttaagtctaaaattttggtctttcacattcgtaaaacaattcactgccttctactattatttttcaatcgcacttgatgatatccttcacgtaaatcaatcttagagaagacaacagaccctcccagttcatccattagatcttcaataagaggaattggaaacctatctttcacagtcattccattgagttcccgataatcaacacataaacgccaagatccatccttctttttgactagcaccaccggtgaagcataaggactagaacttacttgaactgtaccactttgtaacatctcttcaaccaacttgtcaatctcattcttctggtgaatagagtaccgatagggtcgttgattaacgggattagagccctccaacaactcaattttgtggtcatgttgagtccgaaatggaggcaattcagttggttcagcaaaaatatcagggaagtctttgacaagctcctctatctccgtatcatcaccctccgtctttgctactgcattcacagaacaactcaatccctgttccaacaactcttcttctgctggcacttcacgaacatacaacaaagcaatctgaacttgatcatcatccaactttcttaatttctgtgctttcacatctcggacagaaccttcacgaattccacgtaatagcaccttctggttattgtacttaaacttcatttccaactccttaaactcccatgaaatgcggcccaaagtttccaaccattgtactcccaacaccatatcaataccttgtagtggaattagtaaaatatcagactgaaatgttgtagtctgcagattccaagtgaacttagaaatcttgccatccacattaatttttctcccatctgcaacagaaactctagttaaacctgcatattcaatcgcacaaccaagtttagcagccacagcagagtcaataaaattgtgagttgaccctgaatcaatcaaaataaacacaggcttcttcccatatgttcccctgacccgcattgttcgataaccagcaactcctgaaactgcattaactgaaatctgaggttcctcttcattgtacaaaacttcctcagcatccttgtattcatcatcaacatcgatactaaaaagctgagttttcttatgaaccaaatagtgttccggtgtaaacttctcatcacaaaaataacaaagccccttagcacgcctatcactcatctcttgctgtgttaatttctttgtattttgaggtttaaaagacaccttgttgccataattctcacctttctgatccacgtcacgcgaagtcttagaaacacccgtagtaacccctgctttagattgccaatttgtagaaaaagttttcttaggatgagccttttcatacaaacgtcccaaacgcaaacaatcacgcactattctcggctgaaacatcttcacatgcatttgtgtatccaaacgtaaacccgccaaatacacacacaccaaataatcttcaaacaaattcactctcatcttaatattctcaaacttctgatgacattccacaattccatctgtctcttgcaattttttcagctctgccattggatcatcatcatcttcatcaaatctgtctttcaacaatttcacatattcaggccaatcaaacataacatccaaacccacaccagactgaataaacgtgtatggaagccattttaaccttcaaatcctcaggagtaaaatcaacaccaaaaaattcttcaaccttaaacagccattcattgattctgcttccatcaaacctgggaaaatcgattttgcctaatctagtaagacctccacaataaggatttggttcaagtcttaccggttcagctcgatactccctctgatgatcagatccaccggatcttgccatcgttgatgttgatgaccttggtaagctccgatctaacacctcatcctcatccataaccttcttcgctgtcgatctgctcatcgcacccatcatatcagcaatctgcttcaacatcgccttatgttgctcagcgaccaactcttccaacctcgacatgcgtgaggcaatcggatcttccctctcaacacctttccctttcaaatcctcttcctgcgatctcgtagtcaccatctttgccgagaaacgacacagctttgatacctttaatacagtaaagtcaccgatgctcaccggactcttcacttctccgatcaacgaacaaatatgtaacctcactccgatgttcctgaaacacgaaaatgataaagcgttaactctcgagacgagagaaacttagctcatgaattgtttttgggttttttagatttttacaaatgattctcgatgatgatggaaatgatctgctcatgactcatatagctcctaacggccttctcacatctgcccgttataagcttccacgcgtcacttccagatctttcttatttgccacttgattccacacgtgccaactcacacgtgcgatggttctgcaacaacaatacttgaaatcgacaaaattaaacggatctccaattgtataaattcgagaacgttactctccccaaacaaaccatcattggacatagacgagccacacgatctcaatctcacgctcatatttcacgtgattccacgccacctgctcacgccgttttcttctcagacaacaatggagttctattagtttcaactagttacatatatatagagttcaatcaatgttgttacaagtttacagtggctccatcgttgaaggcttaattacagctgcagggaatcgtcggttcgacactaggttgtgtccgattttcttcttaactttaatttttaaaacgacgtcgttttgaactgttaacggaaagttgactccgttatttttctgttaacggaaatttcacggcatgccttaaatgaccaagtcaacgaaacttagacattttttaagaagttaactcaaactttgaggtttaaatgacatttcgaaagttcatgcttttttcgtcccaaatttgaaagtttgcgcattttccgacatttttcccattattacgtaactataaattttagcatttttatatttgacattaataaattgaaaaatccagttaaatattataaacaatttagaaaaaagatcctttatacttgatcaatcatttgaaagcctaaatttttaacctgtttcgaatatgaaacctgtttcgagaattcaaaggttctcagggttagggaacttaagggcttccagtgcactggatttaatggcaaggcctttccttttgaagtttaacctttcaatctcatcccggaaataaaaagctagccgatgcataccctaatcgatgtttgagcgttttactgagaaagcaattaaggtcataacgttggctcaagaggaagctcggagacttggctataacttttttgggactgagcatatactgctaagtctaattggggaagggactgggatcgctgcaaaggttcttaaatccatggggatcaatcttaaagatgcacgtgtggaagtggaaaagataattgggagaggcagtggatttgttgtagtggagattccatttactcctcgcaaagcgtgtgctggatttgtcactagaggaagctcgacaactcggtaaagatctttcgctatttattattatttaggctcggagcttgttatgtgttgtacaaggcataaggttacttgactcttgttgctattgttgatcctagggcataactacattggttcagagcaccttttgcttggtctacttcgtgaaggggagggtattgcagttcgtgtcttggagatattgggtgcagatcctagtaatatccggacacaagtaaatgcaccaattcttgttaatgttatgtcttagtaaacaatttcttgattacagtttgagatacatatatcattttcaggttatacgtatggtcgagggaaacaatgaagtcacaacaagcgttggtggcggaagtaatggaaacagcaacatggcaagttggcaacactagaagagtatgggactaattaacttaactaaactagcagaagaggtaataaatatatgtactcatcttgaagagagtgtcatgttaatgcttgaagttttatgctgaattttggttttttactttctatggtagggtaaactggatccggttgttggaaggcagccacagataaaacgagtggtccagatcttggctcgaagaacctgcaggaacaacgcgtgtcttattggaaagcctggagttgggaagagagcaatagcggaaggaattgcacagcgaattgctagtggtgatgttcctgaaacaatcaaggggaagatggtaaatattttcccattggatcattttgtaatgaatttgagaggcttagctagagtgcaaaaatgtgtatatatgttttaagtaatttacttttactttttatgacggtcaagacttcatctcattctttctttccttgagaatgtggcagggaattggtgtgattatattgatgaatgcgcaattaaaaaaatattacttctacttttttatcaggttataacatttgatatgggtcttctagtggctggaacgaaatccggtggagaagccgagggaaaattgaagaagtttatgggcaaagtgatgacataattctgtttattgatgaaatgcacttgctcatcggtgcaggagccgttgaaggtgcgatagatgctgctaacatcttaaaaccagctctagaaagatgtgaattgcaggtaaattttataaattctttttatatctaatgatgtcaaatttttcaattcatagaactggaaactcaatttttaccaaatgtttttttatttgggtacggttgtagtgtatgagtacaggaagcacattgagaatgatcctgcattggagagacggttccagcctgtgaaggtacctgaaccaactgtagaagaagctatacagatcactactgttttagctaaaggcaaagaagtgaacaaagccgataatgaagccgaggaaggaagacctactgttacggaagccgataatgaagctgagtaagtgttactgaattgagtcgcatatgattcatatttgtacttaaatctctttttttgtatggatattgattgctcagtaaccatagagtcatagagaatttcccacaaaaaaaaacgagatttggttagtgttcaatgagatatgagtgtcaaattttatttatatttgatcaacgaaacatgttttaaagaaaccctaaaaacctagctcccataccaaaatcataagagataagtagctctccactgtttgcctcctgtctcaagattctatcgtcctactctattcttagtcgtctccatgtatttccgctagaggaacggaataacaaggtttcctctatacggtttcttagacctaaataaaaacagccctagccctagctggttcactcagaggtcacacaaatcattcaccaacatatatatttctatggttttagccaaaaaaagaaaaagaaaaaagatgagtatatggtgagtcacacaacttaatcaaacattaatgtagttgtatctaaaaaaatcaggtgtgtaagagcaagtccattgggggaaccttatgagtttcttaaaagaatcctaaagaaaacaaaccaaaaaataaagcagaattgagatattaagcaaggtgcgcaccttgcattaggtgttttttggtctgtaaggtacgcttacgtggcatgattccattggattactaaacaaaacaattttctctttttcatgtttttttctttctgtcgcaaatctctttctcttctcacaatctcttcatcatctctgagccttagtgtatcaagtttctctctatctctcttgcgatttctctctctcgcattgcgttcttctcgttgtctctctttgtctatttgtatctttgtctctctctgtctctctttgtgtctctgtgattgtttcaatcactttctctaagaaagtgtaattgcaatgagaagacgaatttgttcatgggtttactccacagtggttactttctttgttgaattcatatgaagctttgtgacgattggattttgtgatcatatttgctatgaggtaaattagttccaatttgaatgattagaagtgctttggtactattaccaggtttatgaattaatagttgagtgtttttgaagaatctagagcttgtaattgttgatgccaaccacgtgtttgatgaaatgcctcaccggatcaatagctatttatgaaaagtaaattcatgttatgataagttggttttggttttgtgtgttgcttttcttcatgcgtttcctttggaggatcacataaaaatctgcatcttgtagttcttttatgagttcctgcagtatttgtggaacaaaatttagtcatctttcatagggctttattgtaaaagctgggaaatcattttgtttatatgctttgtgattagaagaaggatatttcaatgtttatactaattgaacgattatatgtgatgtctgaaactggttattgttttgcaggcaaggaaaggatgttgtgattgacattaaaaacggattggtagcaggaatctaaaacagggccttacttgcagaggtaaaatgacaactatccatggtactgatgataatatattcgaggcattgaggtaattgatgtttggttatttgttactgaacaaacagggccttacttgcagaggtatgaaaaagagtttctctacatgctatatgtaaaggtgatcccatggggtgatctagactcactcgccatgcttcaaagacaactcggcgttgacatactcgtaacaggccataccactagtttggttttgtatcacttatctttgttaccactattttggttttgtatcatttttgtttgacaccacaaaacaatattcacacaagtacttttcttgcaattctactatataattatctctataaaatcatatattcatatgaaacctatcttatttctctacttaatttcactcttctttgttccaatcttctttttcactaccagaaacccaataaccaatcttattttttaataaaagaaactcaagaaacaatcttctttaaagccaaaccccaagaaattctacttcatccaaaattatgttgctacaaaatttttttctttaagaaacccacttaagaattccaccattggacaataaaatttttaaggattcaacaaaaactctaaaactcttatttactcaaagtttagtattaaaaaattataaggagtccttaattaggactccccaatgggggtgcttactacaagtcttgcgtgcatgtagatgttctcaagttgttgaataagttgttgttccttggtttccactcattgcttctgacacaatatttgacataaaactatatttgatgataatacttcgttggtaagaggattagattctgatttgttagaaattttgaaattatccttggtttagaaatgtgtgtgatatgagaataaagaactagaatgtaatgtgcagagaaaagtaatagagattagaaggtgataacttattcacaagaaatattaattaacattgaagaaattattaaaaaattaatagatttaaggtaatattttaacatatacattattatttaaatgcatatgaatttcacaaaagaaaagaaaatatctaattcaaaataactgtgaactaaagattgaactccacgatttaacgtataatgtgcttctgatgcggcatacgagattatactaatctatatatacatttttgcagccattttagcaaataaatcctggacttggacttatttacaatctaatgcaattagcattaaatcttttttccaaaataattcattttactttaaattttttatttaaattgtcaatcacattatcaatcaaatttaatcccactaaacttcaaatcaatcccttaaaattagcataaacatatttgttaacaatattttaaaacaaagttttttgttaaataaatattattcttactaaacgttttttgtttaaataaataaattttgtatttgaacttatttacaatgtcatgtcactgatattaattatttattaatgaaaatatttaattaaagatttaaatcttctaaatccttgcttttagagttattatgtcattaccttataagcaaaaatattaattctttaaatattattatttatatatttaaaatttataaaacattattaatatttaaacttataaaaagtttgatatattacaattttttaacatcattatataatatatagagtttaaaaaaattttaattttttccgtcatattttatgattcaaaattttaaaaaatgaatatatattaatcaattagcaaaaaatgtgtgggtgcaacgttccgcatcgacaaaaatatttagacaatgatttataaacatatcataaataagatcaatattaatataaataaatggtttttttacgggacgggtttggcgggatgggtttggcaggacgttacttaataacaattgtaaactataaaataaaaatatattataaatagatacaatttgcaaaaaaaaagttatacgaactttaaaaagataaattgttaccgcggtgtaccgcgggataaaatctagtctctatagatattcagagcaataattgtattcaacagtaaactaatctatactatataaaaagaaaatccaaaacctcagaaattaaatcttaaaattgtcaaatttaacaaagcaatataataagaaagatatggaaaagagaattcaaaacacctattaatctatgtgtttggattaaacacgacgactaattgaccacataatcattgaatgaaaaataaagaaaaaaacgagaaccaacacagccgccaccatttggttatgatgacggcaacctccaagcttccattgagctccacatgtgtagcaaaatgaataaccacacctatacatcaaccataaacattacaatgttaaatacccgagaacataatcaaattccaacatgatttatatttataatcacagttaatagctatagaatgtgattaatgataatacctgcaatatacattgatggttttatgcgacagtttgatcatgtgttggcactttttacattgacgcgatattgttttaggatttcgacccaacgtcttgtattccttgcatgacaagtcactatgccacagaactttgcagttaatgcaaaaggctttgcggcatttaaagcagcatctcctaactccatcttcagtagactcaacgagctcggttttcgacatcaaagcccaacaccttggatttgggcaatgaaatctgtcacatacagggatgaactcctctttgatcctatgttcccacatctcttctagtttaggtgtcaaaagatgggaacagcttttaagagataggattgatttgcagccatcatgaggacatctcggaacatctccctcgattagtctcacttctatatgttgtttcatccactctacaccgaattgatgacggcataaagcaacagaaaacatcagttcatgttcgatattaacctcaccgcaagccttctgctcggtaggaggcgtacgtatgcttattgattcctttgcaagcttaaacgcaaacttggcttgattttcagtcacagtaacaggaatgctagatgtcagttctcgccttatgcattgcacatcatccattagcaaggcgatgttctctttctcaggcgctaatctgcccatgacctaacacattcaaggtaaaacatcaataacaaaaataagcaaagggatatgtgaacctgaacagccaagaaagcttaccaattcatataactctaaacgatcacagcagattgagatatgattgattcccaaactcacggcttcggttaatcctcgcttcaatgccataagctcagcctccaaaactgtaactgtggagtcatgaagtgatcctttcatctgaaacaagagatattcatcctcttctctgaaaattgcaacctcaaatcccgccgataattgagctgatgttttctcccttaccaaacccttaaagtaaaggttgtatgtgtcagaatgaaagtcgcccggtgagggttttccggtggggtttcggccatagtctctttccagggttccttctttctccatgaatctgttgcacatacttgaagatttgtttttcgtagggggcctaaggtttaatgactcgacacatacaattctaggttttatagattatatatcagaagcggctcctagctcgttcgtgtgattaaactaattaactttataattaaaagggaactaagagaaattaaaaaagaaagagccctatgcaaaaaaaagaaaattaaacttttatcaaattaaggaatattttttcatatatatcaaaaaagtaaattaaaattaaaaaacctaaacaaaaacgatagggaaaagtaatgttatcggaaaagtagtactattaaaaaaaaaaaaaagtatttttgttgatctctagacctcataagatacaaagaattgagaaaagagtgtttcataacaactatggatattcagcatatacgaccagtccaccatgagcatacaaatcatcccaatcatcttcattcaccatcataaaaataaccttggccagtacgtggacaaccagtaggacaagtcacttgacccttcttccattcaactccacatttgtagcaaaattgatacccacatctacaaaggccacaacgacattacaataaaacataaacgttttgtctctagttatgtcttaattgagttaaatatgtattatatgtacctgcaagtcatgtggttgcacccttggttaagctcaatcaagtgtcgacacttgacacattggcgccatttttgatcgtttgctagaagctttagcgtcaagtcatcaagtacagggtcagggtgaagtttcttgtactcagcacacgataaatcagaatgccatggtactttacaatcaatgcaaacgagtccagaacatttgatacatgcacggtcattggatttattagaccgagaaatctcggttttggacatcaatgttgaacagtttatatatgggcaatagattctctttgctaaaggaatggactcttctttcatcatgtgtttccatagctcaatcaccttaggtttcaaaaccttgaaacagttttcaagacttagttttaacttgcattcatagtcaagacatgtaggcacagttccgtttcgcagtttcacttctactaactgattaacacaaggatagcaatgacggtgaagacatttatccattacgaacatgcgatcggccttggtttcttccagacaaatgacacaagtttctcccttcatctctgaggccctactggtttgagaaacaattgcctctcttgcaagtttaaaatcaaacttgatattgttttgagaaaccagaatagctttactagaatcaaatttttggctaagaagttggacttgttccaatagttgttggacaactcgttcctgctttggattacatttactatttgttatctgcattgaaaaatcagattcattcttgttaaaccaaatcagatatataaattatttctcgcaagaattacaagccagcaattaattcacaacaatctaattaatggcaaaacataagagagaatataatttgtttagttaagaagtacgtataactgaactgctctgcttttttttttttgtataagaaactattttcatttaaaaaactgcaactaatttagggtctcatgaataatttaaagtgcatattatgtcacactgcactaaggacgtttaacttctccatttttgtcttttcatcttgacaaatatttatgtttcattcaatgtatgaaaatgttgtaagttttaaagaaactgattcatttaagtacgcccaacggattctcgatagtttctcgttataatgttattattattttttttttttaaagtatacagtagtagtttttccttgatatccttatttttaaaagggtgatttgcagatatatcactttttcattaaataattaactaactaacaccataaatttataaatgtagtaaataacctttaaggggtgtgaaaagacatcactggcctggtgttacgtttgtcagcgaggaaggagaatgtttagtgtgagctgacgtgactttattattggtgttgaggtgagaaaaaaaatcaggtggtaggagagaagtcctttttctctttcttttttctttaccccttcccaattgtaattcatattatctaatcttaaaaaaaataattcaagttcatgatatatcaattaaaaagttgtatagttttctacatatatcatgacttaaattttcaaggcagacacaaaataatttagatgtgaatagtgttgtcaatgaataacataaccttttatatagatacacaatattttttgatggaaagatattaaaccctaagggataatatatagggaacccaatggtttaaatctaaaccaataattaaatcacttaacatccttaattaaaagaaataattcattttaaaacgtatatagaacaaggtatacggaaatagtatatttacaaatagaatagtatctctcaaattgcaacaacaaaactcaatttcatcaccaagacaccaagcgcaataacgaaagtcgactctctgaatccaaattgtgttccttcctctgtaattcgaaacccccagatcaaatctcacccaaaagtaattaagagactctgatttgaaaacaaaaataagtaacgatgtagctgtaaggactttactggggagaaagagagagggggagggaaaaagaaagagagagaaagagagagggggagagggagaaagagagaggagagagagaacggaagagagaggtacacagaaagagagatgagagaaatagatagaaaggtgaatttggaattaatatacaaaatatagaggatatcagttttttttttttttatgatagtttcttaattataaactttttgttggttagttttgccaatttccctttttaaaattccctttttggtttttgacttcgttgtttttttagacttttaaaatatgcctaagaaatagttaaataattaatcatccgaatatcaagtataaccgaaaacgtagcatacgattagaaaagatcttaaaactcttagaattaaaaataaaaaagagataaaaagtgtttcaaaacaacaactattaatctatgtgttaatcaaaacacatagactaaacaccataccaatccatctaaatagtcacggggagaacaaacacaaccacaaccctagctaagtacttaaacattatcagctgtacttaactatgagcataaaactaacaactaaaagacttacgaaagcaagaaaaatgaggactattgctacccaatccatcacctcttggagatgatgagagcaacaacctccaagcttccattgagctccacatgcatagcaaaacttatagccacacctacacatcaaccacgaacattacagtagccgaaaacataatccaattccaaagaggattcggaaatcataatgactatagaatgtgattatagataatacctgcaagttacaggcatgcgttcttccgatagttttatcttgtgtaggcaacttctacattgacgccacactgttgtaataggctcacgaccggaactcttgtgttccttgcacgacaagttactatgccacggaactttgcagttaatacaaaagtgtttgcggcatttatagcaacatctcctaactccatcttcttcagtagattcagtgagctccgtcttcgacatcaaagcccagcaccttggatttgggcaatgaaatctgtcacatacaggaattgactcctctttgatccttttttcccacatctctctttgtttaggtgtcaaaagatggtcacagcttctaagagttaggtttgatgtgcagccatcatgaggacatctcggtaaacctccctcgtttagactgacttctatatgttccttcatgcactccacacagaagtaatgactgcataaatcagcggaaaacatgttctcacctttgataccatcgttaaaacagttaccacaagtcttcttctgaggcctaggtatgctgatgttagaaactagtgtttcctttgcaagtttatacacaaacttaatttcattactagccacaagaaaagggatgctagatgaaaattgttgtcttatgcgttgcacctcatccattatcaaggcgattttcttatccttaggcacagatctccccatgacctaattattcaaggcaaaacatcgattacgatattgaagctaacgcatgtgaacctaaatgaacagccaagaaaacttaccaattcaaaaatctcaggattatcaaagaacattgagatatgattgatccgaaaactcacggctttggttagtcctagcttcaatgccataagctcagcctcccaagctgtaaagtcggggtaatgaagtgaaacttttttcttaaacaagatactatcatcctcttctctgtaaattgcaaccccaaatcccgccaatgaacccttgaagtaaaggttgtacgagtcagaacttgaaccgtcaggtgagggttttccagtggggtttggggccatcttctcgtactttttgtgcaaactctaagattatttagtgttaaggtaggttttatgactcgtagaactctcttaaacaaatcttatatgataagttaaggataactattgaaacaagaaacgagagagaaatggaaacttaaagcatatctacttgtttagatactctcacgaatatctcaacaaaacataatattttaagaattttaattatttaattaaatttaaattagtgagggaaaaaaaactaattactaagataaatgtgaaaaaacccataatatcctatataagatataaatgaaaaatgtgaaatggggttcttaataagattattacggaccttttattaagcctaaccaaatgtgaaatggggttattataagtaatttcggggattggcaactatttgtttctcttgaataaatcaatacgtattttaccaatcattaggactctcgtctcacttatgtttttaattaaaattttggataaattaacaataagacatgagttcttgatttttttccaaatacaaagctccacaaatcaaaagaatcagagactataattagagatagaatatcaaatgagagtaaacatcatgggacacaaacaaggcaagagatcagcggctagacttttcgagagagaagcaatttttataggattttcttaatcttgttttacttttttttttgtaagttaacaacataacattattctgtcaacaatattcattaatttaataggtttagaaatgtaaaccggaagtgaaaacgtttacaaatctgatgtcataaatcataaagctagagtttcaggctaaagaatgagcttgtattagtgttttcacgctcgactcggactgtccggtccgaccggttgaaccatgacccaaacactttttttgtttgggtttagttctaaaacccgaaaaatttaaaaccaaaaaaatccacaaaaactcaccattaacccataacctggtgaaccggttgaatcggtcggtgtgggttttaaaatattttctttattttggaataaaatatgggattttagattttattcaatcatttttagaaattttttcagttcataaactcatttgatgttttagattttgatgaagacttcacaatgccgccttaataaatgaatcgaatggtgagtgagacacgcaatattagttatgtgaattcaccatgttttattagtttattttcgtcattggtgatatcctactatatttgttacggtattagacatttagttggattttaaaaatttaatcactttattttattgtttgattacatatatataaaatatatttttatttttttggtgtaaatgattttatattttattaaacataatctgattttatattttataaacatgatatgattattttaaattaataagaactctaaaaactctatcatctctattaatattaaatttattaaataaattttaatcagttgacccgtggttcaacctagttgacccgatgatccagtaacacagaagatagccctgtaatcagtgttttcacgcccaacccgaaccgtccggtccgaccggttaacccgtgacccgaacacttttccggtttgggtttagtgctaaaacccaacaagttcaaaaccgaaaaaacccacaaaaactcgcaattaacccgtgacccggtgaaccggttgaaccggccgggtgtgggttttaaaaagttctcttgattttacaataaaatatgggattttagactttattcaattatttttaaaagttttttcagttcttaaattcatttgatgttttagattttgttgaacactttaaaataccgccttaaaattgaatcgaatggtgagagagacaaccgagattagttgtttgaattcacgatgttttattaatttatttctgtcattgatgatctcctaatatatttgttacggtgttagacatttagttggatttcaaatttttaaccactttattattattgtttgattttttctatatatatatatatatatatatatatttgggtgtaaatgattttatattttgttaaacataatataattttatatttgattaaatatgatatgattatttttgttttatatttataatactaattttgttttttataaaatactctaaaatttctattaatattaaatttattaaataaattttaactaattaacctatggtccaacccggttgacctgatgacccggtgacccagaaggtagtccggttcatcgtccgggtcgggtttaaaaacattgcctgtaattaaatgttgtggaataggagaaaagtaaaaaaaaaaaggttgacatttttgtaaaatgtgcaaaatgaaacttaaattaatcgaataacaatatagaaaatccaaagaaagaaaattcaaaacaactttgaaatctatgtattaatccaaacacagagactaaagactataaaattcaatgtaatcggcatcgtaattgggcttagtgggaggatcaggtaaacaccaatcacaaccacaaccgtaagcccaaggattatcatcttcatcgtcattattgtcaccatcatgtccatcatcatcggcactggttgtttgagaaacaattgcttctcttgcaagttcaaaggcaaacttaatgtcgttttcggctaccagaattgcttcgctagaagcaaatttctccctaaggcgttgaacttcttttataagttgtttgacaacttttatctgcttaggtttacatttaccacttgttatctgcattgcaaatcagattcagttttgtttaaccaaaacatcacaatgaaaccgtcgtcacaaaacaagatatgatatagataaaagtgccaaaatattcacgaaaaaagttataccaaagtaaagtaaacacttacgttttggtaaagctcattgtcatcacaatagatcacgatctttctgatccctaagtcgagtgattcacttaacccacgaatcaaagccctaaccttaactccttcaacgtcactcactgattccttcatctcaaacaacaactcatccatctgatcacaaatggcaaccccaaatccagccgccacattatccgtactcaccaaccccttagagtacaatctgtggacgacgtcgtccaaaacttttgccgctgaagattgagtttcgacgaccttaatagaaccctcaccttcaaggtttggtgtatattccatctaccctccgtttcttcgaaatcgtgcctacttcatctctatccatgactgttttatctttagttcccaagatttatgggaatgttaatgagtgaatatatataggaaaaaggagagaatattgtagccgtgcttgagaagctgataatatattatccgaaattagtaatatttgcaaccgtttttggttagtattgattggttttcttcttttttttccgaagatttacatatattttctacagattctcattactttgctatttatttctgcatttatgatgctacaaatctcatataaattccagacgacaaataaaaaaaatgagaagaaaaataacaagttattttgacgacctgataatttattacataacgctttcatatagaatcgttgaagaaaaaactaaaaaaggtgtttttttttattattcatttggaattgtgtgacatatgcattaagcaaaatagaaaatttagcaacatgaacaaccaacaaacaggttattttattatcctaacaagaaggaaagaattattaaaatgagaacaaaaactaaaatagtatacgtttatgcatcattgctcgatgagagcaacctccttgcttccattctgctctgcatgtgtagcaaaacgaatagccacacctatccagcaaccaagaaaatcaaatgtgaactagttacgcatgcaaaaacataatcaaattctaaaagaattataatagcatagaatgtgtttctataagttacctgcaagttactttgatgcatccttctgaaagttcggtcatgtgttggcactttccacattgacgccacattttctgatttgccaaatctttaaatattctatcattttctgtaggagttggatgcaatctcttgtactcattggctcattgcatgacaagttattatgtcatggaactttgcagttgatgcataagggttcaccacattccatacaataacatcttctaacttcagcttctctattccatttagagagctcggttttcgacattaaagcatagcaacttggttttgggcaataaactctgtcccacataggaattgtgtcttctttgatctttcgttcccacatctcttagtttaggtgtcaaaagatgggcacagcttccaagagtcaggttcgatttgcagccataatgaggacatctcggcacacgtccctcaagtatcttcacctgctaggaggatccacagatatgcttaactcagaaactattgtcgcccttgctagttcagaaacatatctgatactacttccctccacaaaaatcgtaaagctagacttaaatccttctcttattcgttgcacatcattaattagtagggaaatattgttctcatctgtcacgaatcttctcgaatatgacatttattcaataggacgagataattttagtatttcatattaaaaaacaaaaataaagaaagaaaaataattcctactcatatacatattactatgttagcttcaatgcattaacataggaaacagggaaattcctatgactataacaaaaaattagccccaaaaaaacacttactaattcgtaaacgggataataatcacaataaatcgagatatgatcgatccccaaacccgcagcttctattagtcctcgctttaatgccataagttcagcctccaaaacagtaatatccgagccatgaattggtgcattcagctgaaataagatatcatctctatgcccgcaaattgcaaccccaaatccagccaatgagtcatcgccaaccaaacctttgaagtaaaggctgcacaactgaggactaatgctcgagcgagtaaatcccttgagcatcttgtcctctgcttaccgcaaaagtaatatgattcattcatgtatatggtgaggatccaaaataatcaggggaaattatcttggtatagatttttaataatttatcttaacattaaaattagtaaagaaaaataaactagttaaaattatctcgaaaataaaggcaaggttctatcacactcaaatctttttgtttttttataacaaattttcttgttgggaactaactgcgtgacattcataattttgaataaggttgtggttttttttctttcttttttttttttgtaatatttggtaaattaacggtttgtggattctcattcccctatgggtcttggttttaacaagtgaataaaaaccataattataaattttggctagaaaaccacaatttctcgattgatggagattaatctatctatctatctaattatttttagtctcaccataatttaattttagtatcaagctttgctggattaatataatagacaattaaaaaaaagtaaatgtgatcagaacaaagaattttcttcggtattttacttttggagaacatcaataaagaaaacatcatcaagtgatgagctatagacatagatttcaaagacggcaaataagaattagaattcactataagaaaaacataatttcttaagaatgaagatagaataagaataactagatacaaaaagcctcacaagcaaaagaggatccacaagtaatatttaaacccaaaaaaataagcagaaaaaggctaaagtatgcattctcctccaccattccgtgacggtgaaggcaaccttcaaccgttgagactaaaaataattttaaaagaacacaggacaaggagtctgggggagattagaccagcagcaacaacaaaggatttattcaaacattaggatttaagatcaagctatatatgattggaaaaaaaaaaaaaaaaactgaaatccaactgaaaaccttaaagaattttagttttgggacaatattcgttaactcaaataaaccacaaccataacccctagatatgtacttaaccattaatctacttaaccatgcgctcagtagttagtaaataataaacctaaggaaaaaaagagaaatgaggacaatgaagaccatagaaacgtccaccagtttcatcaccaattggcgatgatgagagcaacctccaagcttccattgggttccgcatgcatagcaaaacgtatagccacacctacacatcaaactatgaacattacagtagccgaattctaaaaaagattcagaaatcatatataataactatagaatgtgattagagataatacctgcaagttacattgatgcgttcttccgatggttttatattgtgttggcaacttctacattgtcgccacactgttgtagtagccttgttacccttcatcttgtattccttgcaagacaagttactatgccacgaaacattgcagtcaatgcaaaagggtttacggcatttagagcaacatctcctaactccatcgtcagtggattcagtaagctcggtcttcgacatcaaagcccagcactttggatttgggcaatgaaatctgttacatacaggaattgactcctctttgatcctttgttcccacatctctctttgtttaggtgtcaaaagatggtcacaacttctaagagttagggctgatttgcagccatgacgcggacatctaggtacacctccctcgtttagactcacttctatacgttgtttcatgcactccacacagaagtaatgactgcataaagcagcggaaaacatctcctgaccttcgatatcatccacaaagcaaattccacaagtcttcttctgagtagtacgaggcataggtctgatgttgcgagaaactagtgtttcctttgcaagcttatacgtaaaattcgcttgctttcctgtaacaagaatagggatgctaaatgtaaattgttgtctgatgcggtggacgtcatccattagcaaggcaaatttctcatggtgaggcacagatctctccataacctaatcatccaaggcaaagaatcaatcagtttaagatattgaagcaaagacatgtgaaccttagcagccaagaaaacttacaaattcaaaaatctcaggatcacaacagcaaattgtgatatgtttgtgtaaggatttgcccactcaaaacgtcgacttttcttgagaacaaaccaaacacaacaccacaagcaagaaaacctctctgttggacagagtgttgagacagaacacacaacaagacccgaactttaaagagaaacacagaaagtgcaagaacacaaacagagaacacaaagcaagtttggtaacccagttcacatcaacagatgctacgtctgggccgagactgtgctcggaatccactaaattagagatagtgtttacaagaagaattacaagtgaccactcgatacccttcactagtactcgagttcactctgtatcactctcctagacctaagaaactctgttacaagcttatgataataacaagtctctcaatatctcttagccgcctttgttctcacaactctctcaataacctagagcacctcttttatactgaatacaactagggctcccttgtgctgacgcggacactgttgcaccatggaaacgccaaaggtactgtcttgaaaccgcgtctgttaaagcactccaacagctagcaccacatacagacaaaacttgtcttctacagctgaaggcggcaattttccttttgctggttcactatgaatgtggtcccaagctaacttaaccagggtttgatttacttcacctgggttaagctccaacggatctttgctttaaacatttgtaaccttccttgagcttcaagtcatcatattcttcacaaatctccacctgatgacatgaggatcaaaggtaacaacacacacaatactttagagagagttaacaaaacctgatttagtttcccggattccagtctcggcttccttgagtctctactcagactttacccgtaaaaagtccaatgcagtttggaacttgtttacaggtagaactttcgtgaagatatcagctggattcttctcagtagatatctttgacacttccacttttccatcagctatgatttcccggataaagtgaaacttgacatcaatgtgcttggttctttcatgatgcacattgttcttggagagtgcaatagcactctgtgaatcacagaagatctccacattcttctgctcataaccaaaatcttttagaagacctttcaaccagatagcttctttcactgcttctgtaagggacatgtattcacactctgtagatgactgtgcaactactctctgcagtccagacttccaacttatagtgttgccacccaaagtaaacaccagacccgtgatagatcttctcttgtctagatcagctgcgtagtctgcatcacaataaccacagatactgaagtctgaatttctcttgtaacacaaccttgtgtccacagttcctttaatgtacctcagaacccacttcacccctaaccagtgttcttttgcaggctggctcatgaatctgctaacaacgcctacaggataggccaagtcaggacgggtgcctatcatggcatacatgatgcttcctacagcgctcgagtatgggactgagttcatatactcttcttctgtgcttagcttctcttcagttgcagatttcatcttcaagtgagctcccagtggagtcaatgctggttttgattccagcatgttgaatgtcttgagtactttgttcaagtagctctcttgagacagccacagaacacctgcttctcgatctatgatgatttctataccaaggatcttcttagctgcgcctagatccttcatttcaaacttaatactcagctctttcttcaatgcgtctatggcttgcatgttgtttgccgccacaagcatatcatccacatagaacaataaatacatcgtggaatcatcagacagtttcttagtataagcacaactatcataatcacttctcttgaaaccaatttcagtcatgtaatgattaaacttttcattccactgtctaggtgcttgcttaagaccgtacaaagacttgttcagaagacatacctcattctctttgaataaggattcacatccttcaggcggcatcatgtagatcttctctttcaattccccatggagaaacgctgtcttgacgtccagttgctccaattcaagattttcttgagccacgattgaaaggaggattcggattgaaacatgtttcacaaccggtgcaaagatctcatgatagtccacgccttctctttgagcataccctttggcaacaagtcttgccttgaaccttggttcttcaactcctggaataccttgcttatacttgtatatccatctgctcccaatgattctctgtttctcaggtcttgtgactgtagtccaagtatcattctttagttgagactcaatttcctcattcatagcaagtctccacttgtcccagttttcatctctgacagcttctttgtaatctgccggttctactgcatcaccatcttctgttgtatatagagcttctgcataatagtcttcatcatcgaatcgtcttggtgctctgatttcccttctttctctgtctcgaaccagatgataactcaaaggagattgatgtacatctgtctcttcaatatcatcagtttcatatcttggtggtgtactagtcactgcgcctcttgtagcaggtgtgacttgagcttgtgattgttctccacctgagctgttatctttgtcagcttcaagatctaaatcaatgtatgacccagcgtggtcatcctcttcacaggaaacttgttcttttctctgcatcagatccttgtacactgcattctcctggaaactcacatttctgctcactacacacttcttttcttcaatcagccaaaccttgtaacctttcacgccacttggatatccaataagaactcccttctttgccctcagatttaactttccaccatcagtatgaacaaatgttacacagccataccttctcaagtagctgtatataggtgcctttccagaccatctcttgtcaggaaactcaaagttaatcgcagagcaaggagttttattgatgagtagcactgctgtatgtgtggcttcagcccaaaatcttttaggcagccctgagtcacatagcatgcttctcactttctccataatagttctgttcatgcgttcaacaactccgttttgttgtggcgtgtaagcgcaggtcctgtgtctctggaaacctttttcttcgcaaaacccatcaaacattcggttacagaactctagaccattgtctgttctcagagttttaactctctcaccactttggttctccaccaaactgatccaacttacaaacttctcaaaagcttcatctttagttttcagaaaataaacccataccttccttgtatagtcatcaatgaatgatataaagtactggcagttccctagtgacattggtactgtaggtgccccccacaggtcagaatgaacatactcgagcttctttttagtgtcatgttgagccaagttgaagccaatcttcttagctcttccatagatgcagtcttcacacgtatcaagcattgacaccttcttcttatcaagaaaccctttcttaatcagcaagctcatgtttttctgactcatatgacatagcctcctatgccataacacagtgtcatcattagctctagccactgcaagtgattcatcagttgcaggtttcccatggagtatgtagagcgtgtcataccttcttccctccaacagaacttgattaccagatttaattctcaacataccattctctgattcaaacttatgacctgctttttcgaaagttcccaaagataacaggttcctatccatatctggaatgtatctcacattttgtaatgttacagtgagaccattgtcgttgacaatcctgactgtaccaactcctttgactcgtgagatagacttgtttcccattctgactgaacctcctgcttcttcatcaaaatcttcaagccactccctcttatgggtcatgtgatagatgcagcctgtatccattatccactcatcttccaaatgaatgtcagtagaggataaagcttctgacacaaacattcctgcagattcaacaaagttaactgagccttcaaccagatttccttttcctcctgaggattctcctttgttgcttccttgattcttgaactgaggcttgtttttgttgggacaggtagacttcagatggccatcttctccacagatccaacatccacgtttagacttagacttagatctcttccctttccctttatccttttgttcacttcttcctctattttctgccttgtccttgacatacagaccctcagcttgacctttaatacttttcttaactgacccaaactctaactctctagagtaaatggcagcagccacttcgtcaagagacaatacagtcttaccagagctatatttcaaagtatcctttaactgatcaaacggcttaggaagagacatcaacaacagtatggcttgatcctcatctgagactaaaacatttaagttctctaaatctgctactatatgaagaaattcatcgatattaccttcaatagagagattctcggacatcttgaagctatagagcttctgcttcagatatatccggtttgggagagctttagacatgtagagcctatccaaggcttccagcatcgcagcagcagatgtctctttcttaatcttcctcaaaacccgatctgaaacactcaacacgatggtgcttctggcttttctcttcttctcttcaaaagcttccatcttttctcgttcttctttctcatcttcatcagatttctctgaatctctttctttccccatcggcgtctcagattcccttagaacagcacttaagcccaacatatcaatgtgagctaagagcttctccttccacatcgtgtaatccccacgaccatcaaacttctcaacctctattcttgctccagacatggtttaaccgtttgttaacactacggaaccacaaacggactgtaaccaaggctctaataccaatctgtaaggatttgcccactcaaaacgtcgacttttcttgagaacaaaccaaacacaacaccacaagcaagaaaacctctctgttggacagagtgttgagacagaacacacaacaagacccaaactttaaagagaaacacagaaagtgcaagaacacaaacagagaacacaaagcaagtttggtaacccagttcacatcaacagatgctacgtctgggccgagactgtgctcggaatccactaaattagagatagtgtttacaagaagaattacaagtgaccactcgatacccttcactagtactcgagttcactctgtatcactctcctagacctaagaaactctgttacaagcttctgataataacaagtctctcaatatctcttagacgcctttgttctcacaactctctcaataacctagagcacctcttttatactgaatacaactagggctcccttgtgctgacgcggacactgttgcaccatggaaacgccaaaggtactgtcttgaaaccgcgtctgttaaagcactccaacagctagcaccacatacagacaaaacttgtcctctacagctgaaggcgacaattttccttttgccggttcactatgaatgtggtcccaagcaaacttaaccagggtttgatttacttcacctgggttaagctccaacagatctttgttttaaacatttgtaaccttccttgagcttcaagtcatcatattcttcacagtttgatccccaaactcacggctttggttagtcctagcttcaatgccataagctctgtctcccaacctgaaatgtcggagtaatgaagtgaaacttttttctgaaacaagatgctatcatcctcttctctgcaaattgcaaccccaaatcccgccaatgaacccttgaaaaaaaggttgtacgagtcagaacttgaaccgtcaagtgagtttccggtggggtttggggccatcttctcctaccttttgtgcaaacttgaagatttatttagtcttaaggtaggttttatgactcgcagaatatatagagaagaggcggctccaactaatgcaaaaggcaattagcataacataagcataaaggatattaaaataaaggaaaactctcttaaaagatcttctataacaataaacgataaagaaaaggaagcttagatcatatccattatttttggactttcatgaatatcttaacaaaaagtaataatatttataataaaattgacttattaaattaattttaaattgtgatgaaaaacaaaccaattacgcaatgaaaaatgaattttctactatgtgttgttttttgaatcaataaaatttttgttttagtgaaaaaatcaatacgtattttaccgatcaattgatcgatcattattagtaaatgtttaaacctagctagcgctacaacttaaattctcaaaatcaacaaaaaaaaatcaaagaaagatataagaaagatataagtgtttcaaaataactgtgaaatctgtgagtctatctatgtcgtagtatataggacttgaacccatatcttttagtgtaaaagcattaatgaacatgttatcaaacaatgtgccaaggagacttccacccatatgagtcacacaagaattatatcaagtcaacgacaaagaaaaaatgaatagaaatcacttgatgatagaagaagaaacaattctcttctttcaacttttttttgttcttttttttctgtttttatttggaactgcgtcaaatatgcatgaaggaaagtagaaaatttagcgatatgaaaaaatcaacaaaaccaaaattttattttattttacacaaacaagaactttgttgctgcaacaaaaggaaattacagcagctgatctctaaaaattttagcgactgaaaattgtggtcacaggtcgctgtgattggtcactggcgattggtcgctgcaccaacgatagacaaacaaaaaattttgattattgtctgtggtttcagtcatctgcgacagataaacgaacatggccttcagcaatgggacgcatgcgcccatgattaatatctactaattctatatttgccacattagcgtctgatgttaaatacgttgacaaagattgttaaccttccctttaactctttgtgcatcggaaatcttatagctagagccaggaaaacaaccatgggataataccgatgcaagaatgcataatatatagagtgtctttgcaaactagtacgttttcgaaacttaattagaaaagtaatataattactatttataatatgtaatatagtcataatacgtttttcttcctgagagagagagaggtgtaagggagagagagagaggtgtaagggagagagagaaacgtgtaagagagagggagagggtcatgtttttttttgtttttgtttttcttttttattacattttttccctaaaattttaagaactataatactcgtttgtaaattttattttcctaaaattgatcatataaataaaaatctatgtttttttctctatcatttgatatgcattttgtttaataattttgaaattttattttattgtaatggtgaaacgaaagatataaatacaatttgtacagcataatctgtacaccgcaatcattacagcgtaatctgtgcggttgtatctgtacagtgttatctgtacagcgttgtctgtacagcattatctgtacaacgctatctcaaagaaaaacaattttttttagagagaaaacaaattaaattaaaatacataaccaataatacttgaataatacataaaaagagttatacattcatcagtaatacttgccactttgaaagaagtttaggtaatcttcaaaacgctatctgtacatcgctatctgtacaccccaatctgtacagcgctgtacagtggtcaaaatgtaagaaaattttaaaaacatatttggtttcgaacaaatatccttctttacagatgcatttcatcatttgacagcactgtacagatatttgttcgaaaccaaatacgtttttaatttttttttatattttgacaattgtacagcgctgtatagataggggtgtacagatagcgttttgcagattacctaaacttctttcaaagtggcaagtattactgatgaatgtataactcttttaatgtattatccaagtattattagttatgtattttaatttaatttgttttctctctaaaaaaattatttttctttgagatagcgctgtacagacaacgttgtacagatagcgctgtacagattttatttatatctctagtttaacaattacaatacaaaaaaattcaaaattattaaacaaaacgcatatcaaatgatagagaaaaaaacatagatttttatttatatgatcaattttagaaaaataaaatttacaaacgagtattttagttcttaaaatttgagggtaaatgtaataaaggaaaaaaataaaaaaaataaaaaaaataaaaataaataaataaatcctgacccacctgacccacgctctctctcacacgctgtctcactcccttatacctctctctctcaccaaacaaaaacaaaacgtactatggctattatactaattataaatagtagatgtactacttttccaattaagtttcggaaacgtactattttccaacttattcctaatatatgctaccaatcccccagttttattttatccttgttgccattggttgtagattaggatcatctcgcattggtaactctatttgctgttaatctttgttcgtgtttccagttgagggaaagatgcagaagacagtggacaatgagaaaaatttctaagcacattcattaatatcttctcgctttttagtcttttttctctccgttcaatcatatgattgttatgagaattctccagaagaatagaacattttttggttttcacgtttatcaatatttacaatgagctagctataaacaaatttgttaaatcatataataacatggtacaaagttaaaccaacctgtaaaagatggaaaggtaatgttagaaaagttagcttaactcgtcttatgtcgtactacttggcttacgtgtgtgtcaacttacgaatatgttttgtgttagttgttagtcttagctttgatacaaattaatgaaattataaacgaatgaagttgtaggtcaacatcagttagaaatacaatttagaaataataaaagttggtaataaaatcgtgccaaagtcaaagctgcacatgatcgtatgtatgatcattttatagctgtcaaataatgtagaatataggtagacaaataattgacgtgaataacaacaatcaattcaagctcatatatctaaaagcaaaaaaaaaaaaaaaaaacgaatgagtttcaaactcaaacattaacattaagaagtagaacctattaagatagttttcctttcaaaaaagattttgtaataggctttacgtcttactgcccatggagggcatgtatcagcacccttgtatgtatacccaagctgagatgagacacaataacaagaacaataaacttccccgccgtcataactcttcataatgaatgaacctgggcaacgactatgacaactgttgcaaagtggtcgtgtagatctattgttaggtagcaattcaagttcaccatggtgtctgaaacttcctcctgctttggcatttctgatatctccaagtacacaaaatgtatgcaatgtgacaccgcaatcgttacaagtgtagaaccaagtctctggatttgtttctctttcgcaaatatcacaccaatatttgccgcttgccttttcttcaccatagcaaagagtgagtggatgatcatcgtaccttggaagcattattgttaatggcatagtagcacaacggaaatccaaaaagtaattgcatttgatacaacctaggaggactttagcacgttcgttgtcgcagttgtggcaagttttcttgttaccttcttcttgttttacgtagagtaagtgatgatcgtgacttccatggataaaaggcattgtaatcgaactgcatattaagtcaaagttcacacctttagaagagtagaagaatccttcacaaaacatttgataacaagctctgcataaaaagtcatcgtcgataatgctttcgaagcaaagaatgagaggttctgagctcagaaaatgtcgtttcttcttagaaatattagcacacttttcatggagaatgaagctgcaatttgattttgaacacttgtagaatgtgtaagaaccaatgggaagaacacatgctccacacaagctactttcttctccgtctttgctgaggctcatgaggttatgctcatgagcgaaatgagtgattgtgttgtcatcattcctcttgaatggctcgatatcttcaacttcttcaggtactccatcgagctctttcccattccatacgtctttccttgttgcacatagtgaatgaatagcatattgaggacaaagagaacaagaataagcaccacatgaccaatcaatctcttcaaaacaaactccacatcgccattctccaagaccaagaggatacttgaacgaaacgcggtggtcatggtgattgacgttaataacacgtggtaaatgagcacactttttgtgaaccatgaaatcacattgatgacacacataaggagcccgatcaccttttgtcccacaagcatcacaaacgaaggagatcaatcttggcataagattgagtgtatgctcatgtaccttgagatttgaaagagcaactggtggggtttttgtttttgcgcataccaaatccaaattgaacttacagatatcacaatgatagatgaattttccagtgtcttctccgcatagatgacattttggatcagtgtaagtgggtgctccttcggtgagaagcttgagagggtgtttggtgtgacaaggatgagtgatctctggtgagtcaattactagggcagcgcatacccacccaacgaacaaccgacagcaaagacagatatagccatctacgtggttgtcataacaaacatcgcaagtcatattagtcgcaaaattacccatgaatagagggtggtggtgccacggcatattcagatcggcttgggcacacatgggatcaataatgcaatcgatatccacattgagtttacaatctctgcaatgataaagaagacgcttggtgtttttaccgcaaagatgacatttgggtacggtatgatctggagctccagttgtgagaagtttaagacaatgaccaacatgagaaggatgttcgaatatctctggcacgacttcgaacaaaaacgtacatttcttatgaacagtaaacttgcattcaccgcatgagtaggcatcaccataggattgatcgcaagcatcacattccaaaccatcatgattcttaacgagggatacacgatgcgggtgtccttttatcttgaaactcatgacggatgcaggtagcagaggtggagagaatggaaattaatgtttgggggtaatagcactttggttcgtgtaataatagtggatcaatgaagttgttcctctatatactctacttatatcaatgccacttgttatattatgatatataaactaatattaacgttgacaaatcttaactaatacaactagtgggcacgtcgttggtctttgtttaatttaaacgctaatgtcaatggttctgttcgggttgtgtctgccatgttacatttttttacttcgacttctttattttcatttatcttatctcttctaactctcaactagtcgtctttattgtttataagtcaaataatagcaaatcattaccctatagataaagaaagattttattttattgtatcaatccagatcatcgaaggaagaaatcaaagtcatgacagctaaccttgagccgactatatggtactttcgaggttaggcattgaaatgagtataatacacgtacgtgatatgaccaaaaaaatattgaagtgacgtcaatgatatttttgttttagactaatttttttatatatagttttgtaaaaattattcatttagatatctattttaacagagagagtaaaagaaatttgcattttaaaaatgatagaaagttaaagctaattaaacaataaaaaaacaagtattattgaacttagaggtttttgtttgcaaaccaacgtctcataccaaagtgaagtcatccaattcttgatgctcttgtcgatgaggcgagtgcgacacgatcagaaggtggcccttgaggtagatgcagtcatttttcttatgccatatgcaatagattgaccgaatgaaaagttacctgaacaaagacgatttatcttttattctatgagatagatcacatatgataatttttcgttttatttagttagtgttataattgtccgagtaattacccaatagggcacggtgaagtgtgtagtaatatattcggggtcaaatccataaagagcagtggtatacacaacgagaaaattggtttttggttttcagatttgtaaataaaaatacaaataaacaacgacgtatcttataattataataaaagcattgggtcggacttaaatggcataagcaagcgacaagagcgtggaaggttacgatggatccagagagataaaagtttgacgagtcagcccttgttccagaaaaccagtttcttgctcaacacccggtaatgttttcctcggactctcattgcctttctttctcttttttgtaagctgtatatctaagcagttatatattttcaaggttgggctagattcatggttaatattccccaagcctttgatgcatagatggagcacatagtgcaatcgttatcagaaaccgtggcatgtttgaaagagagaatagctgtgctgatcagaatttaagcaagcaagcagaagttaagtggaaatgttgattatttggaaaagaagagaaaataatgagagtggaattattaatggtcctctacttcttcatcatgttttgaagttaacaaatattgttttcgaaatgcctattttgtcaagttgctaaaattcatattaattttggaaagtatttagtttctagtcaaaacaccaaaaatgagtacttaaccaaatgacacatatataggcgattgttcatttgatacataaaatcttttcaggttggtgtttcttaatatattcaccttttatttttatgtgtgattactttttccgtctccttcatttagtttagaatttcaatatacaaacattgctccatttgttcatatttggtttattttgggtcaagttttaaaatttttgatctttgcaaatctagataaacgcttatgtactaaacagtaatttataacttaatttaccaaaaatcggctttttcatacctgcacaaatgaactatgttgaattcacagatttaacttatatgtgtgttaaatcatacatgcacttttaaaaaattttgaatttcaaacccaaagttaatttttttgtgctaaatcttacagaaacgtgtaaaaatttcacaccgttaatccactgtgaaatcgtggtgacatgaatgacacgtgtatatcgccaacacaaaacgacttcattttacgaaaaatcaaaattttaaaaacttagagatttagtctcaaacccatgacctctattgtctagagacacaacttcaccaacatgctaacataattcacattgtagttttacaaataaatatatttgtaagcttcgtggtttttcttcttcttcttcttttctttctccagttataacatcatcgttaaacttcacaatctctataaaatctgaaacgacaagtcgttgtagttactagctcgatggctcttcttccctcaaattggctccgatgatattgtcttctttcttgattttttacctcataaaattggtcagattaaatcgccaaacctaatctatttgatttgaattttatgaacatagatgagtttttagaaagagtcgttctcttcttcgatcaattcggtgaatcttaaacccaacgaatatgaattgacgagcaaaacaatgtcggatttagacgtgaaagtcgtatatttcactatattcatttcacttacgtatcgcgtgagactttttctagtatataatatacttacaatcataaacatgagatatcgtcattcctctttttgtttttcaaatatttttaaaagtaacttttaacataggaaactttcaaataacaaagaaaactatttaaatttgataatatctatataacattgataaaaagtaaaatatatatgaaacagaaatctattaaatatttgatgtcaaaaatctaatgttaacacgataaattattattttgcgttctaatttatgcaaaaagattcagaagaaaaaacccattataaattatgtaagttacgaaaatttaatgtttacgattaattaataaaaagatgtacacaaataaaccgaacaaaattgatgatataaagaatatacaacaaatatttactggcgtgggtgggggcgacggtggcggcggtggaggccttggaggaagaccatgaccatgtttgcaacctccagcctggactccacatcggtagcaaaatttatgtccacatctatcaagaaaatacaatgataaatcagattaacacatgtaaccaactttcaaaaggaaaatgttaataatagagatgatgatacctgcactttacttgtacgcatcctttagaaagttcaatcatgtgttgacactttccgcattgacgccaccttttctgatttgccagagctttaatctttccatcattttctgtagggtatggattcaacttcttgtaatcgttgcacgacaagttactatgccatgaaactttacacttgatgcaaaagatttgaccgcatttgaagcaacatctcctaacttcatcttctttagttgatatagagagctcggtttctgacattaaagccgagcatcgcgagtttgggcagtaaattctccctgttacagggattaagtcttctttaatcctttgttgccacatctctcttattttaggtgtcaaaagatttatacagcctccaaattttagcgtagtcttgcagcggtaatgaggacatctcattacacttccctcgagtagcctcacctctatatgtcgtctcatacagtcggaacaaaatcgatgacgacacttaccaacacaaaacatctgattctcattaatatcatcatctaaacagattttgcaagttgttttgcgagtagccttaggttggcgaggaggattcacagatatgctgatttcagaaactattgtttcccttgctagtttataagcataactaattctttttccctccacgaaaatcggaaagcttgacttgaatccttctcttatacgttgcacatcaatcattagcaaggcagttttattctcctctggtacgcatcttcccatgacctacgtactcaaagcaaatgaataatgacatgatcaatattcagatttttacacttggtagacaagtacgaaaaacaaccaatactaacgacataaaccctaagaagcaatgttcgtttttatattaaaacaaaaagaaaacttacaaatttataaattggataatcatcacaatatattgagatatgagtgatccccaaattcacagcttcggttagtcctcgcttcaatgcggtaagctcagcctccaaaggtgtaatgttggagtcatgatgaattggtcctttcatctgaaacaagagatcatctttcttcccgaaaattgcaaccccaaatccggccgatgagtcatcacttaccaaacctttgaagtaaaggctacacaactgagaactagtgctaatatcgccggaggaatttaccggtgagggttttgcggtgtcatcttttctagggagtccctaagcatcttcctatgctacagtctcttgatgagattctagagtccaatataattaacaagaattaacaagaatccaaaactaaaagggaaaatatctttggataaacttgtataatgattctagttagcgaataatattccgaaaatataggttatgtttaagaatttttaatttattattttatctatatttttttttgtgaaagggcttaattattttatctaattgcggacatttgtaattttgattccattttcgtgaattatgtaagagtcatcttctttcatgagaatattttgtttgggattcaaaagttatatttgtaattcatagtttagctttcttgtccatcaagtttcgatctatttgacaagtttttgagttcaacttttagttctatatataagactgattcgaaagtctttggagtgagaaaaaaataaagattttcttgtataatatatggttgtattgtactcttcttttccatgaccatgaacacgatttcgtactaccaagataatatattggcgataccaatcaaaaataacaaataatagaaccaacgagaagaaaatgagctatgaaacaaagataattaactaagtaggtgattggttgggctgtaactgtaaaatttttgctgtagagattttgctgtaactgtgttgactgtagctgtaacttttcttactgtaaaattactgttgtaagtttttaacttgaaatatttataaaaaatggattagtaataaaagtttttttatagtaaataaaatgtcttgtattactaatttaaatatatatattctgatgatataaaaataaaataaaatcttatgaattcttaataaaataaatctaaattttacctatgattattccataaattcattgcaatctaaattttttcttttaggtttgataattatcagcttttttagaacttatctttgttttttgttatatatttatgttgataatttatttttttgtatttatctaatgaaataaaatttctacagccaagaaaatagggctttgataatttactctaatacaaccttaaaaaaaagaaaaaaaaaaattgggatgtaagtttaaaaataaaggtacagcacgattggtttgtaatcaaggctttaagaaaaattaaggttgtaagtcagactttttttttttttttacgtcaaaaaaatttcataaattaaatagtgttgttacagtgatgtttttgaagccaactagggaaaagtccagaatctgaataaaaacaagatgaattacaaccaagtttcgccagatcgtgtgcaatcatgtttccctccctcttgacgaatttaaattgaatgcttctgaattttccagcccaaaactgaatatctgtgagtagattcgctaaaaagcaatgtgaagcagaattggtaacaagttgtatcaaagtttggcaatctccttccatgatgacatgtgtatagcctcggatccaaatttgttgaagtgctgctaataaagcctttgtttctgcctctatcggtgtgcttgtatggtctagtaccatggatccccaatgttcaggtgtcccattatggtttctaataatccaacctcctgtagcttttcaatcctgcacattaaaactagcatcgaagttgcattttatgtaaggcatctgaggtttaacccatgtagtgttccccgctgctgtcgttcgctttggaagccgtctaggaccttgagtttgggtagcattaagccattcgtttgtttccgccttagcccttacaactgttattgatggactttctcgaagattgttaaaaaccacattgtttcgtgctttccaaattctccaaagtagccagaatgggataagtttctgagaatctgttatagtggtgttctggagaagtaataaaatatttgaaatgttatcttcaatgttattagatagtatagagcttcgatataaaggtgtgtcagatagccgccaagccattgttgcaaaaggacatgtgaaaagtgcgtgattgatagattcattctctcgacgacatcgtggacatccaggatcgatgcgcattcccctcgtggtgaggcgatccgttgttggtaaggctttagacagtattctccatagaaaatgttttagcttcggcatgattggcaaattccagattttggtttttagatctactgaaccatggggtttagccattgtagggatggtgtttgacgggtcatgcgttgataaccaataacccgagcggactgtatagtcacctgtggaattgtagctccaaataagacgatccgttttactccttgttgagagatagatgcgtttaatatagtcatggtcagattgatccacaaaagtttgcaatttggcattatcccaacatcgactatgacctctatgctgaaataaattgtcaagtgatagaccattatgttgttcatccgttagcaaaggacgaggagggtgagagtcgacgacattgtctatccctaaacggatagtcttaccatcgccaatcacataccgtgtaccttttctgaggagggcaataccagaaagcaaagaggaccacccgtaagattgttgagaccttgttttagcatcaattatcgagttatctttaaaatatcgagccttcataacccgcgcgaaaagagaattgggatattgaatgattcgccatgcttgttttgcaaggagggcgtcattaaattttgcaagatcccggaaacccagccctccttccttcttagaatattgaagtctcttccaagcaacccatggtattcctcttttatttgaagctttttcccaccagaaattcatcagaagagactctatctcagagacaataccttgaggaagtttgaaacaggacatcgcgtagacgggcattgccaaggcaactgattttagcaatatctcctttccggctggcgagaggaattttgcactccatgaagcagttctttctttaacacgatctatgatataattgaacatttctttttttttcctaccaaattgttcgggaagacccaaatatttaccccctcctccttgatttggaatgttcagaagtgtttttagtcgtgtttgagtggaaccgtatacacgagacccaaaagtgattaatgatttctgaacatttattttctgcccggaataatattcgtaaacatcaaacacatctttaagagcttgacagttcctcacattagcttgacaaaagaataatgaatcgtctgcaaattgaagatgcgttatagccggtgctccatttccaattcggactccgcgaatatccccacttgatgctttgaccttaatgagatggctgagaatgtctccacaaagaatgaacaaatatggggataagggatcgccctgtctaatacctcgagtcggcgaaatatatccatgaggtgaaccattgatcaagactgagtaatgaacagatttcacagcagccattatccaacctatccatttatcgcaaaaaccgaaaagtcgcatcgtcgtttccagaaaatcccactctactcggtcatatgctttgctaacatctgttttcactgccatatatgttttcgagactcgcttccggacttttaaggagtgcataatttcatgagcgatcataacattatcattgataattctccctggaataaacgcagcttgcgaatccgagacgattgagtttaggtgtgctttaagacggttcaccatgcattttgaaatgactttgtataagacattacacaaagctataggtctgtaatcggacagcgtttgaggattttgaatttttggaatcatacatatgttagtgtgattgacgctggtcttcatatgtgatgattcgaaaaaaagtttcacctctttaattacatcgttaccaacaatatcccaacattgtttgtaaaaacgtgctgttagaccatctggacccggagccttatcgtcaccaatctgacaaattgcttcaaaaatttcactgtcacgaaaatcttgcgtaagctccgagttaattatgtttgtgacagatgaagggaaatctgcaaagtcaattggggatacttgtattccgttagtggtgaatatgtccgtgaagaatttttgagcatgacaaccaatctctccatcacccatgtacatatgtccttgatcatctgcgattgaatttattctgttttgggaaattctggtttttacgcaagcatgaaacctcttatgttttttgttcttataattatattgtttagttttcattatcgtcatgaataatctagaaatccgattaatttattattttttagaaattaataaaaataaagaactattaaagagacaagaagaaccaagataagagtaccaatacaacactcctcaagcatcctttgtcgatgtgggcaacctccttgcttccattcggctccacatgtgtagcaaaacaaatagccacatctatccatcaaaacatgaatataatgttaattaggcaaacaaactttaatcatcaaaatttgaatggattataattaagaaaatgatttgagagatacatgcaagttacatggatgcatccttccgaaagtttgatcatatgttggcacttttcacattggcgccactttttctcatttgcaagaacttttagcatcttatcatctgatgtaggattattacccaatttcttgcaattgtcacatgacaagttactttgccatgaaactttgcagttaatgcaaaagcgctccccgcattggaagcatctcacaaatccatcttctaaggtagatttagagagctcgattttcgacattaaagccgagcacctcgggttcgggcaataaaatctctccgttactggaatggattcctcttcaatcttttgttcccacatcgcttttagtttagatgtcaaaatatgaaaacaacttttaagagtcagcttagactcacattgataataaggacatatcagtacagttccctctagaagcctcacttctatatatcgtttcatgcattccaaacagaatttatgattgcataaagcaacataatacatttgctcagatttgaaatcatcattgaaacatatactgcaagtctcaggatccacaagtaagctgatttcacaatctattgtttccattgcaaatttaacttaattttgagtttagatgatgatccgagccaaacacatgtttagattattaattaggtcgaaaaactgatatataaacatataaaattcggttgtgcgtgagtgtagttagtatgaaagtaataaatacatcctacatcctatagagaagttaagagttaagactttaactagataaatcaccttttgaaatgatgtattacagatctcattttatatattcctagttttagttaattcttaatgtatttaaataaatgtataaatctctaaattaaattatcataaaaagtattccttgtagagtgttaatagtatagtaaagatatattcttctttatataaataattaatcatttcaagtattaactttaaaaatttattctagattctctaaataaaatagcaaaatttcattatttaaataatatgtggatcttttgtaaacacttctcctcctaattgggcaactaatcatggagttattttttaattaatgtgtggttgacaaaaaaaaaacaaatatgtggataaagaaaacagattttaaactaaaagagattgcaaaatgaattagttcaaaactatataaagaaaaagagattcctagaataaatcaatatgaatcataccaaaaaagtggaaagataaaaatgattaaattaaaaagaaagaaaaaatatatagagaggaaaaaaaagagaaattgttagaaatgtcctttcattgataccttcttttttaaaaaataacccctcacttcgatatcattttcattttcctcctttaatttttaatgggcattttacccctatttaataaataattaagtaaacaaataaacatttgaattttcccagcaaaatatctgaaacattttcccaacaaaaataattgatcccataatttttggtgggaaactttatcttagaaacttttagagtttacaaggtttttaaaaggatttaagagtgtttttaaaggatttacaggggttttaaaggatttataatgattataaaatcgttttaaaaagatttacaagggttttcaatgattttttaaaggatttaaagtgtttttaaatggtttataagagtgttaaaagatttacaacagttttaaaatggttttaaaggatttagaagtgttttaaaaggatttacaaatattattaaatgaattacaaaagtgttttaaaaagatttagaagggtttataaggggttttaaagagtttactagaattttttaaaaggttttttaaaaagagtttaaggaattgctggaatctttgtaaattaattttgtcattgcgaaatgtttgtcttaaaacggttttaaaagatttatgaatgttttaaacgatttgcaaaagtttaaaaatattgataagggttttaaaaagattttaaaagcttttacagggtttttaaaacatttatagggattttataagtgttttaaaaagatttacaaaagttttaaaagaatttataagaatttaaaaagattataagggtttcttaattttttggcatgaaaaaaaattaaaaaggaaaatatgagtaccaaattatttttagcgagaaaccttttttttgcaccaaaaattactttggcaagaatatttgattttctcattatattcattcaacaaaagaaaagtagtttcgacgtttagcacataaaagaggtattttaaaaaatagacaacataaggagttattcttgaaaaatgcatttttgaaaatgcaccaaaaaaaaaaacctccatttctacaccaaagaaagaattgataatgaggacaacttagtacacctccctcaactagctttacttctatatatcgtttcacgcactccacacaggattgatgacggcaaaaatcaacagttaacatctgctcagtgttgaaccaaggattcacacaatagatttgtttagagagggaaaacaaatctagtaatttctcttcattaggtattctatccaagactcgattacaaaagatgttctaatctcttctgaaatacattagggtttgctcaagaacagaaaaagaattaggattttaaaaaggtatagctgcatccataatggattgcctacgtaccctgtgaagggatcaagccattcgtagttctcaatatgtataaagttatgtgtttcttgtgagtatccaaagatatctcttttgtgaagtccctaaggcactttatataggatccttaaaccgcctctctcgcgatattcttcggaagattcttatttatccttaggtcggttctagaggataatcgtcctaaggatattctccttattcttcggaggttttggggagatttcctgatttcgacattatcttcaaagattctcctttatcattttcgaaagtcccataaaagatcctattttaccggaaatgatccttggagaatgaatggtttttacaagtctttgcctcgcgtgtttttcacggctcggtggtcgtttgagaggtggcttcggggcaaacggtatgtaccggctgtagacgagctgtcagctaggcgaagtgcagacgagctgctagctagacgaacttcgagctaggaaagctacagacgaactgaggtggttggctcgggtacaaattgcccgagtcaaagctgggttcagtatacttcgttccgagctgatcgtctcggtaccaggttattcgggataactggatttctaagcacagaccaaagcagataagaaactgtatttagccgaagcaaaagctcggcactagtgtttatgataactgggatttagtttccgaggcggttgactcggtaccagtgtgtttagagtaactggatttcagtagatttgaatacccacggttgcgacccgatttgattcaatcttttaccagcgtttagaaacgagctggggcaccggtgttaagtataaccgggtttcagaagatagaattcatagcctgctcggaaaaacattcgagcagattcttatcttgaatatttatatagcgcgctgtaaccgaagcggtgtaaatgaaactttgaaaataataggccgtcgcccgttatcaaagtaaaaagatttagaaatcaaattccaagaaaatttgaagtagaaaaatcgaagttcaaatttaaaccgaaacgagagtttaaaattgaagtgggagtatggatatacggaccccactccccccccctttttgcaagtttacgcaaaaaatatagcagagaatgcatatatatgatttggacatagggatgatgatatctacggcatggacgatctgaatctctgagattgtaaacgtcgttgtatgaaaatctacatttaagatgttgttcgttagaggagatctcatctttgcgtagaaagagagaaacaaggatgaatgctagtgatataagtgagaatgtcaatcaagcttaattaatatgtaagaaagtaattgaacttatcttttatgagggaggtcgtcgagacagaattggagatcgcatcattgatgaatgagtggaaaccttgagcgattgctagtgacgatccattgtcacttgttggtgtaatgtacttccttttgctgatttatagaagaactgataacttccgtttgaaccgttaaactattgatcccaccgttgaatctttagctgatagtcatacgaagattttgtccgaattttagtcagatcggatattgcctgaggcttctaccgtcttatgaagttgctgtgacaaagtgaatttttcttcctttgctatatttgttttttggtttcggttgctccggtagcaacatacgatcctcagtgaatataggaggcagtatccagtgatgcttactctttggctgacttctggtgatctttcttctttacttctctttccattgaatattcattacacgacatgtttttgagagatctgaacaacgtcttgtgattaaggaagataaagcagaagctctccaaggcgaggaagggacaatttttcttagatatatgttaagacgagccgattgtagatgaaagacgagcttgaggccggaaaacgatcttgatgtccgaggaagaatagagtttattcgtcttatagctgaaccttgtaaaaggttgcctacgtacccttagaaagggatcaagccacacgtagttcatgttatgataaacgagctaggccattactggaggaaggtcgtatggtaggtgacgagccggcagacgtgcgacgagctggatgaacagtggtagagaggcgaattggacaaaccgagttctgctgaaggtttagacgagctgggcgacgagtaggtggactatgcagtcaatggacgaactgccgctaggcgaggaggtagatgagtttcagttgagggatgagtcgatagctagacgagttggacgatctgactagctgacagctaggcgaggaggtggtcgagtgatgggaagagcttgaagacgatctgaggagcttgaagacgatctgacgagcttgaggacgacctaaggagcttaaagggcttaaaggatgctgaagagcttgaagacgagctgagggacttggtgaagagaacgagttgataagcttgacgaagaggagcgagctgacgagctacttgagacggacgagctgacgagctttgtgagacggacgatctgacgagctttgtgagacggacgagctgacaagctttgtgagacggacgagctgacgagctttgtgagacggacgagctgacgagctactctgtgtctgcgtgtcaggcggcattcatcgagggatttgacgaaactacccttcgccttaatactcctccttggtttggaacttattttgggcttttgacttgggttgcagttgattttgttaaatctaaacaacgaccttttttgttgcgttcttagtgattaagatatatgttgcgttccatgcctccatgacacatggtccgtggtgatgaagtgtggcgatgacgtgaagctttcgtaaattgaagaccatcggtggcgaggtgaagacgtgaagcctaagatgggcatgttggtggaatcgtcctggaaacgacgatggacgtaaaatcggtcacaaaggtggttgatctgatagccgcagacatgcatctttgggctacagccaggacgtgcttgtcgcagaaaaacagtaataactcttgttagatgtaatcaattgaggcaaggatgagtccgttagaaagataagccttgtagcttcaaaatgatgtgcagatcggctcctgatgttttctgaatcgttgggagtttgctttctaatccagttgctcccacagttcgaatctgcgatttgacaggtgtcatatgtttcattgaaacagtgataacgcttagtaaacagctcggaattggatgaggtcggtctctgttgaaagataagcctcggggctttcagttgatacttagatcgcctcgtgatgccttttagatcgccgggtgtttgattccgaggtcaacagatcggatatagatcgatctgtattttgtcagactttctgcagataaacggcagtatctccgagaaaacagaccctaacgaagtgagctcgggcttgttaaaaagagcctcagggctttaaattgatctacagatcgcctaggtatatcattgcctagttcatcaggattttcaaggaaaacgatcccgaagctgactggttttatagagttgggtctcatgactggctgcactcgcttgaggtaaacgtttatatctcagcatatatcttcgattaaggtgaggtcaacttctccgaaaagacgactctttgggcgatccgtagaggtattaacccttacgagattccctgtgatttgccgggaaatcggccccgaggtgaactggtctattcggacggatctgttaagaaacagacagcatcgacttcagaaaaacggcgataactctgagcagagatatccgatggagttacggttagattccttggaacgctgatctccggggcaatccgtggaatggttgtacgtcatctggttcattgtgtcttgacgggaaatccccccgcaagtagacggatctgattgtcttggcttgatgagcgtacatcgaatacttggatgaatgatatgtgaagagagttctttgtcgtccccacagacggcgccaattgttgaaccaaggattcacacaatagatttgtttagagagggaaaacaaatctagtaatttctcttcattaggtattctatccaagactcgattacaaaagatgttctaatctcttctgaaatacattagggttgggttttaaaaaggtatagctgcatccataatggattgcctacgtaccctgtgaagggatcaagccattcgtagttctcaatatgtataaagttatgtgtttcttgtgagtatccaaagatatctcttttgtgaagtccctaaggcactttatataggatccttaaaccgcctctctcgcgatattcttcggaagattcttatttatccttaggtcggttctagaggataatcgtcctaaggatattctccttattcttcggaggttttggggagatttcctgatttcgacattatcttcaaagattctcctttatcatttccgaaagtcccataaaagatcctattttaccggaaatgatccttggagaatgaatggtttttacaagtctttgcctcgcgtgtttttcacggctcggtggtcgtttgagaggtggcttcggggcaaacggtatgtaccggctcggggcgcgcttgatgactccattaagctcagttggctgtctcccgagccgatatagatgtttcccgcagcgttctcacgattggctcgggctgtgctcatatgattaacacccgagtcattttacaaactctcttcgggacggtcgatcgaataaagtcccgaggtgctttgttctaggctaggggccatttatatgtttaaccatgaggtgattgttattcttagactgtttggctcggtcttgcttgtggggggaatccgaccccaacactcagcttccaagtcatggtcgaaacagatagggcaagtcgaaggcatatctttgctaacttcatgaagtactatcgtttccaaactttccattgcaagtttataagcatactaatttgagttctagtctccagaataggattgctagacttcaattgttttcggatgcgatgcacatcatccattagcaaggcaatgttatcctcaagcgcggatgtccccatgacctattaacattcaagaaaaaacattaattacgatattaaacaaaagacttgtgagccaagaaagagttaccaaatcgaaaagtttagtatgatcgcagtaaattttgatataagttatccccaatctcacagcttcggttagtccttgttttaaggacgtaagctcagcctccaaaattgtaatggtggagtcatgatgaagtgaacccttggtatgatacagtagcttattctcttggtcacaaattgcaaccgcaaatcccgttgttccccgctcactaaacccttgaagtaaagcctatacatgtggaatggtgaggaaattagttcatccatagacatgttgcaatatgtctgtgaagactctttccaatatatatagagcgtatcccctcttgaattccaaatccagttaggatttatttatttgtatatttataagtaatatcctaaaagaaaaggtcaaattttccttatttgcatgttttctatgaccctaaaccctaaaataatcaatggaaccaattgtagcgtggttcaatgccagacatatcatgaaagatggaagtaaaaaataagtatataagcatatcccgtccaagcaaagtagaatttacatagtttaagtaaaaatttattatatatgtagaacttaaagattttattatatttacatattggaactttgatttttgtgttaatccgcatgggttctactataattcaatatcgatatcactataacataaataaatcagaaccaaaattaaagagacgagtcactaatcgtaaaattaaccaaacatttttgttgttttatgggaaatctgttttctaataaaaacatgaaccatcaaaaaaaacgattgcgttactatcctaaggagaaatacaacttaataattattaacgtctttttgggggctctgaaagacataaaatagctaaaacgccaaccataagcacccccatgagaacacttataccatactccacaagcatctcctttcgctgatgaaggcaacttccttgcttccattcatctccacatgtgtagcaaaacttatatccgcatctatacatacgaaaactacaatgttaataagccgaaacgtaataaattttcacaaggatttaatcataaaacagtaggtaaagattgtgattagagacgatacctgcaagttactaacatgctatgttttgctagtttgatcatgtgttggcactttctacactttcgcaacattgttgtagtaggatatacacccgacctctcgtacctcttgtattgctcgcacgacaagttgttatgccacggaactttgcagctgatgcaataagacttactacatctaaagcaccatctctgaactccatttgacataaaagccaagcacattcgatttggcaataagctttgtctgccacaacaacggattccttttggctcctatgttcccacatctctcttagttccggagtcaaaagattggcacatcgtacaacagttaacttggactcgcattgataatgagggcatctcatctcactttcctcgagtagcctcacttttatatattgtgtcatgcactccacacagaattgatggccacataaatcaacagaaaacatatgctcagctttgaaatcatcattgaaacagataccgcaagtcttcctctgagaaggcgccatatctatgctaatttcagaaactattgtttccattgcaagcttataagcaaacttagcttgatttctagtcatcaaaacagggatgctagaagtaaattgttttctaatacgttgcacatcatccataagcaaagcaatgttatcttgctctgggaccgatatccccatgacctatacattcaaggcaaacaatatctaattaaaccctaacacattgaaatattttagtgtgacacaatgagaggagagggagaagtcactgtctattgtgcttaaaaatatactgtggaaactttagaacacctaacttgataaaaagagccgtacatgttagcttctaaaacaagtaaatctgatcatgttatctatatgattacgcatgtgaaccttaaaagccaacaaaaaaaaaaacttaccaattcgaaaatctgatcatgatcgcagtagaatgagatatggttgatccccaaacccacagcttcgattagtcctcgcttcaatgcggtaagctcagcctccaaaactgttatggcagagtcatgatgacgtgaacccttgatatgatacagtagcttatcctcttggtcgcaaatagcaaccccaaagcccttagtttcctcgctcacaaaacccttgaagtaaagcctattcatgtggaacggtgagggttttaggtcatacatagtctagatatatattgcgagttgtctatgaagattcctcccatatatatatagaagccaaaattttagggctttagggttaggccgttcgtgagttccaaataatatatattttgtatattttagaacatccctaaaatttagggaacctatcattatccgttagaacccatgcccatgtgttcgttcttataagaatatcttcatcatgttgcaattttgtgaaagagcttttcgtggtggagcttgtttttttggcctacaaggacctagaaaaataaaattcctaattaatagactttatttgatctacgttgaactggaacgtctgacagaacttgttaaaatagcagtttcttttttgcacacttaatatttatataagaaaccatgaccaatgatgtgttacaacttaaactttctatttagcttgtgtttttagtttactagactttaacccgcggatactgtggagacaatttattttcttaaagttagtatatataaaagtttgcaaattgtatctatctataaaatatttttgttttatagtttacaattgttattaagtaacgtcctgccaaacccgtcccgccaacccgtcccgtaaaaaaatctatttattttattaatactaattttatttatgatatgtttatgaatcattgtcttaatattttgtaattttgtagtaattaattgctatcaaatatctctacggtttgcttcttataatcgaattgttatagtcataaaaaaaaagcaatatcaaaaatgataattttgtagtgtttaaatgatattaaatattttggaagttttattttaataactaatcgtataattaatgcggagagattttgggaaggtagttaaatgcaaacatttaatttgtagatttactttctaattatcaaaaacaattattaaatatcagtgacagccactataaataagtcccaagttgaggatttatttcacaaaatgactgcaaaaatgtatattccccatcaacaaagaagatataaatacagaatatgaactttcgacatagaaaaaaaacacatgatgaattagctttcactcaataatcaattggagaggtttgaacatgcatgccatttgggtttcaccattgtgttcagattgaattggatcggtttcgtcaactagaaccatccgaccaatggttaagatggagttgttaactacccatcaagaaaaccctatgggattgagtcttagtggtcatataaaagaaaaaccagaagcatttgatgatcaagacattctttcggcatccaatttcaaataaacatatcacttgcaaaatttggaatcgtttgggaacccattattaattagcgatacgtagatattttataaaataccaaaatttggatagaagaatatgcatatattattatgacaactatatctaattagtaaggtaaaaagaatattagaggcaactaatcacatatattcttttacaatttcagagttgatgatttcgtgctgctcttgttcagtccgtcagcaggaatggccggttaagggtgtgttcccgttgcggtgttcggctaactggaagcgttgcacaaacatttggttctttatatcaatggtcaagtgaaaagagaggatgatccactcgtccagaacttgatcgcgaaaaccagaacatgatttgttggtattacgtacgattctcgatttgtagttttgataaaaaaatttataataaagttttaggttgtaacgtttttgtataatcgagacaagaaaaaattgtagtacgacgatcaaaaacaaaacatcaaaagcaaaataaaatttcaaatcttatcataataattaaaccaaagttttcatctttttatgtcaaagatggaaatgactaggatatgattttgtcatcctagcttcacttgcatgctcatcgttaccaatcctctcgagtttccgataagcgtcacgatgttgatcaccgatagaaatgttgataacaataaacgtcccaaagaattaaaactacccaaaaggtaagaaaactaaagacgcaaacacatgtcgacacagttgttgaaggagtatctggcggattagttgttgaatgagtgcaaactcttccagtgatccatttggctccacatatgtagcaaaactcgtacccgcatctaccaagcaaccatgtaatgcaacatagagttataatcaagttcacacaaaaagaataaatggaactgtaaaattgatatgtatactctctatgttatggtttctagattggtttatagggaatgtaattagaggttatacctgcaagtgatatgtatgcatccttccgatagttcgattacgttttggcaattttcacattgacgccacattttctgatttgctagagctttcagctttatatatctgctgtaggatttggacccaagctcttgtaatcgttgcacgacaagttgctatgccacggaagtttgcagttgatacaaaagggttcaccgcatttgacacaggttctcatagttacatcttctcttgttgagtttgagagcttggttaccgacattaaactcgagcacagagggtttgggcaataaactctctccgccacaggaatagattcctcttcgatccttagttcccacattgcttttagtttagatgtcaaaatatttccacaacttccaagagtaaggttagactcgcattgataatgaagacatctcggtacacctcccgagagtagcttcacttctatatgttgtttcacgcactccatacagaattcatgaccacataaagcaacggaaaatatctgctcaggttcgatattgtcaccggaacagatactacaagtcttgttatgatcaggcatatctatgcggatttcagaaactattgtttccattgcaagttcatatacaaattcaatttgattcctagtcatgaccagaacaggaacgctagatgttaaacgttttctaatacgttgcacatcgtccattaacataaggatgttctcttgctcagaaacagatctctccatgacctaaaaacattcaagacaaaacaccaataacaagattaggggaaattggacatgtgaaacgtaacaatcaagtaacaaacttaccaattcaaaaatctgataatgatcgcagtaaatggagatatgatcgatccctaaacgcacaacttcggttagtccacgcttcaatgccataagctcaacctccataagtgtaacaaccctagaatcatgaacttgttctttcatctgaaacaagagattatcatctttgtcgcaaattgcaaccgcaaatcccgctaatagctctgtggtttcctcgctaaccaaacccttgaagtaaagactatacgattcaattttgatttctcccgcgggttttggatcatcttccatgtatctttactgtttttgagtctttacagttctcctagacaatttatcgaacacttaatgtgcaattttcagttctgggttttttaagcttttgataaccaaaaaaaagttccctacgtgaccatgtttatcagtttgtgtgtgtaaaacgaaaaaagaaaaaaaaacggagattatctctccgaaaaaaaaacaatttgaatggtggaaaaagacattattgtcctctatgtatatatataaattcggagaaatcatatttttcgtcttcagaaattctgaatcagaatcaaaaggtaattccttttccattgaaatttcttgatattgatctggaatctggtttcgcacaaaaaaaaagaaaaaaaaaatctgtaatctggtttggatatatatatatatatatataaataacccttttaaaatctgttgtaaatattttaaaacccttttaaaatcccttgtaaattttttaaaatttcttgtaaattttttaaaacacttttaaaatctcttgtaaatctattttccgcaaaaaaaaatttacaaggacttttaaaagcattttttggctgagaaaaatttgttacgaaaaataatttggcgggaatatattttatttttggcgggacaaaaatttggctgaaattttttttggcaggaaaatctcagtttccaatttcatgtttctattagatgagagtaatttggtcattttgttcaaggaaagtggtatttttaaaaatggataatataaaatggtatttttaaaaatggataatataaaagggtattgttgcaaaagggtagtaaaaaagtgtagttttgcaaatctctcttatttcatatctatttattttattatatttattccaaaaaaaaattatgcatatctaataatatacccccaatttaccaatacgagatcaatcttttggagttagaaataatacatgtattatgtatgttattaattatttaggatttttaacatgtaacaataaggtcaataattgtttctcaaattcagtgactcaattttaatgcaaatgtaaataatatttaaatttctctaaaaaaaaattacaaagatttataagaaagaagtcaaatgtttttgtttaaaattgtatagaaaaactaatttatatcccataatacattatgccaatttataaaaacaaatatgctaattctcatgagtaagacattggtagtaaagaaaaatagtttggtaaagtcttgcattcatcgcaatccacaaacattacgttataatgcgtgaaaaactatcttttggaaatatttaatccaaacaagtgtttctttttcagcataaataaataaattattttaaatattgtttttgtataatactacatatatatatttagatataaaatttacatatttttatatattaattttaaacccacgcgttgcgtaggacatctacatatacatttttgaagccattttagcaaataattcctcaagttaaaacttatttacaatgtcatgccactaacatttaatgttttaacaaacttatttttaaatctaaatataaaattaattatgtatttatgttactaaaatttaggaaactaaaagaaaaaatcacaaaaataatttaaatctttccaaatctaaactacaatatactacacactaacattccttttaagggatcaattagcattaatcacaataatttttccttttaaatcatttattttcagttaataaaatgaatcaaaccttatattacaatacatgcgtcaatattttcttttaaaaaattagttacgtaacattttaaaattttgaaacaataattatttctcaatccacatttttcgttttaaattgcaattgtacaaaataattatcactccctaaaaatttcttttatgatttttattaaattttgttcttttttttggtaaaaataaattggacatgtattaaactgatattgctgacacaaataatgttaacaaaatgcccagatttaggccattaaagtaataaaaaagttagtcaaaaatacaagtatatcaatcccaaattatgattaaactaagtatttatatataataattttcaaaaaatagcattatatatattaaaaaaattgaagtaccttttttaagtacttttgtgttataaagtaaaaatttacaaaaaatgtcatcacactaaagtcaaaaacaattattatttttaaatattattgatatattttaactttataaaacattattaatatttaaacttattaaaaattaaaatatcatgagatgaaaaatatagcgggacgggtttggattgatatgaaatatagcgaaacgggtttagattgataaacacatgttaaatatttattttcttattttatcatcaccaatttttttagttacaacattaatataaaattacataactttattactaaattaaaaacaataaaatttaatattatatatatatatatatataaataaaacatttgtcccgtggtgtaccacgggttgaatcctagttacctagtatatatatatatatatatatatatatctttgaggaaatttgatttgaattctctagttggagtgaaatattgtatagtgaacggaaggtgctcgaagaaatgcgtgagagagttgttgttttgtatgattatgtgtgtttgtgttgagcatagtacaatctagttttttgtacgagttgagctttgaatgatgagttctaaacagtgcttctgatgatgagatcaatgtaaataattgtatgagttcacaaacaattattctgttgtgtagagagagactcatctccatggcaccaaggtggaaatgggctttaggtttcctctcaagttgtaacgtatttctatcagagcaagctgagcttttggaccgttattgtttcggtagactagtttttggtgccgagaaagataagagatggattcagttatcttatgaagaagctttctttttgttctacaaactgaaatgcatcaagatctcccttcacggtcgttctctggtaaacggggtagatttatggcgatccataagatcctttaagccaaattttacgatcttgtacaaagcttattcgcatctacgatcaaagaactagattgtgagatcagggttacaatatggagttgatttcatggtgtatagacatcacccatctcttctccactctgaaaacgccgttcttgttcagtccattagcaggaatgatcggttaaaggtgtagtcggatattcattgatagaaagtacctgaagaaatgtgaaacttgagcttcaatgatggtgagtggaatttggtaactcatagtttcagttttcttgttcatgaagttaggatctgtttgacaaagttttatgatttaaaattttttacatccatggatctggtttggatagtgagctgaagttgtttgaaaatgtcttgtctaatctgtatgtttgtgtttagagaactacactgtggaagagcaaacagttcgtagatggagaaactgatcgccaaagtgaaaaagcagaacatgatttgttggtggtatgtctattgaaagtttgatttgtaaagtttacgtgtaggctaagtaatgaatgaactagatcgtttcaacataaataatcgacacaaacaaaacaatgtagggtgactaactatcaaaaacaaaacaccaaaagcaaactaaaaattcatattcaaattttatcatcaaccaaagttttcatcttttgtgtctctcatcagaatttcatataatgaaccgtaccataacgtttaatcaaagatggaaatgactactacgatatatataggattttgtcatcgttatcaatcatcttgagtaccacgacgtagatcaccgatatatttctccagctcttcttcatgcgctcaatgtgaacgtttataattaaccccaaatacctaaaactaccaaaaagataataggcaagaaaacgcacaagaaaacgcaaacacatgtcattgaaggagtatatggcggccttgaatgagtgcaaaatactcttccagtgatccatttggctccacatttgtagcaaaattggtgcccacatctaccaagcaaccatgaaatgcaacgtagtgttataatcaagttcacacaaaaataataaaaggaattgtaaaattcaaatcataccctactctctatgtaattagaggttatacgtacctgcaagtgatatgcatgcatccttccgatagttcgattacgtttttgcaattttcacattgacgccacattttctgatttgctagagctttcagctttatatcatctgctgtaggatttggacccaagctcttgtaatcgttgcacgacaagttgctatgccacggaagtttgcagttgatacaaaagggttcaccgcattttacacaacttctcatagttacatcttctcttgttgagtttgagagcttggttaccgacattaaactcgagcacctagggttggggcaatatactctctcctccacaggaatagattcctcttcgatccttagttcccacattgcttttagtttagatgtcaaaagattggcgcagtttgcaagagtaagtttagactcgcattgataatgaagacatctcggtacacctcccgcgagtagcctcacttctatatgtcgttttacgcactcaacacagaattcatgaccgcataaagcaacagaaaacatcagctcaggttcgaaattatcatcggaacatatactgcaagtcttgtcatgatcaggtatatgtatgctgatttcagaaactattgtttccattgcaagttcatacacaaatttaatttgattcctagtcaccagaacaggaaagctagacgtcaatcgttgtctaatgtgttgaacgttatccattagtaaggcaaagttctcttccgcagaagcagatttctccatgacctaaaacattcaaggcaaattaaaaacatcaataacaagattgaagcaaagggacatgtgaacctttgacaatcaagtagcaaacttaccaattcaaaaatccgataatgatcgctgtaaattgagatattatcaatccctaaacccacagcttcggttagtccacgcttcagtgccataatctcaacctctagaactgtaaccctagagtcatgaacttgttctttcatctgaaacaagagattatcatctttgtcgcaaatcgcaaccccaaatcccgctaataactctacggtttcctcgctaaccaaacccttgaagtaaagcctgtacgagtcaggtttgatttcgctggagactctacccacgtgttttggatcttctgctcgtactagagtgctttcctcctccatatatgtttctttagttattgttttcaagccttttaatttctcttagacaattaattgaacattaaggttttttaagctttcgataaccaaaacaatttcccttgcttttatacgtcttcaaaaccttagccatttttatgtggaaaacgaaaaagacaaaaacgcagattatctctacccaaaaaaaaacaatttaaatgaaaaaaaaagatactattatcctcagtgtgtatatattgttggaatctctctttatctgccgctaaatctttttacttcttaattcccttaatttatccagattcattataagcatatttatactacttctaagggctttaatggtttaaacgcagcggttgtggttgcggttgcgggagtttgcaaaagcgggtggttgcagtttcaagcgttatttagcgttttgaccgactagtttagcagttgaaaacgggtgcgtttgcaggagatttacgactggttgatcagcgggtacgatagcggtgaaaccaaaatttaccaaaaaaaatttaatatatgattaaaaaaaattaaaaacactaaaaactataattatgaaaaagtataattttttaaacataattaatgatttaaaaccataaataattattcaaataaattttatgttcaaaacaaaaataattagtaatattgaagatttaaagttagagaattatttttttatagaattaatgtgaatataaaacttgataatatatattttaatttgattatttttcttttttaatttcttttctttttaaatcaaccgcaaccgcagccgcaaatgcttgtggaaaggaatttttgaaatccagcaatttcgaacagttcgaaactgtacggagcagtttctatgattggtaccaaccgctaacaactacaaccgaccgttaacaaccgctaggtggttgttagcagataaaccaatcaagccattagttgttttgtcttaacaatacacaaaacaacccacttaatatttgggcttaacatataacacatggcccatttgtctctttcttctttctaattcttcctacgacaaagctttctctttgtccctcttcctcttctacgatctcttcttctctctttgttgcagtctcttctcatcttctccactctcgtctctcaagtatggttaattacaggattaatttccaacatctattatatatataaactcgttgaaatcataatttttttcttcagatattaagtaaacaaattggccatcgacgagagactcaaaggtattttttcttccatggaaatttcgtgaaattgatctggaaacttgtttggatatatattttcgaaggaagtttgatttgaattgtagtttgagtgaaatatttatatagtgaacggaaggtgttcgacgaaatgcctgaaagagctgttttgttgtatgattctgtatgtttgtgttgagcatagtacaatctagttttatggtcacctttagctttgaatgatgagttctaaatagtgatttgatgatgagtgtagagagacccatctccatggcaccaaggtggaaatggaaaggtgctgaggcaaaggcacttgcagaacctgtttcgaaaacagtctcggagctgagatcttcattgacccaaaccgaggctttaggtttcctctcaagttgtaacgtacttttatcggttgagtcagaggaagctgagcttttggatcgttgttgttttggtagactagttgttggtgctgagaaagataagagatggattcagttatcctttgaagaagctttctttttgttttacaaactgaaatgcatcaagatttgccttcacggtcgttctctggaaaacgaggtagatttatggcgatccatgagttcctttaagcaagattttgcgatcttgtacaaggcttattcgcatctacgatcgaagaactggattgtgagatcagggttacaatatggagttgatttcgtggtgtatagacatcatccatctcttgtccactctgaatacgccgttcttgttcagtccattggcgggaatgatcggttaaaggtgtggtccgatatccattgcagtgttcgactaaccggaagcgtcgcgaaatcattgttggttctttacgtcaacagaaaagtcaacacagagaagatgaatctgcctttgtgtttagaggactacacagttgaagagcaaacaatacgtagatggagtccagaacttagccgtgaagatgaaaccagaacatgattaagcttacatgttaacaagtcttgttgtaatgctgatttctagaagaatataaaatgaactaggttccgattccaacataaataatatacacacaaaaaaatgtgttacataccaaaaacatacacaaaagtactaaaacctttaaacataaatcaaagcctcgatacatttttttgaactgttccaaattttgatcaaagatggaaatgactaggatgtgattttgtcatcctagcttcaccagccggttcatcgttatcgatcctcttgacattcctataagctgcataagcgataacgtaaaagataactagaatgataagtaccacaatgttgatcaccgatacttttctccaactcttcttcaaactcccaagaacaccagctttacaagaactacactgataacagagcatgctctggtcgttgctccacaccatacagtcctggttcggtcctatcatccctcctctcgtgtcccatccggtctcattcacatatgaaaaaccgcaatctgttggtggcttgcaacaaccggactgcaaattaacaacaacaattacatatcataaaccgcaatattaataactcttttatcataagcaggtaaagaagagagacactaaacagtgaacactctaagtaacaattattacaaccacaatattagattattaggctcataaatataataatcaacaccaaaatatatatagcaaaagaatctttcataaagaaaataaacaaaacagagcatttctagattcaagatttatgacaaaacaagaacttgaacaactacacttttgaacgttccatgcatcttcatcatatttttggttactcacgtgtaaagctgggaatttgaacatatatatgtctactttaatagaaaaatttcaaaaatacaacaaagaaataattatttgggtccaaaaaattgtatacttttgtgggtcgctccaaaagctaataatagattttaacatatgagaacaaaactgcaaaggccagaaatatttctggcaaataagaatcgaagcttagaatcattgttcaaggaatcataccttttttacatgcttaaaattgtttcattggcttctacacaacaatcaatcaatcaggtcaaataaactaataaaataatttttctacattttattatctttttttttttttgatggagtaagctagaggcaaaactaaatcagatctatactccaatactcatagtcaactaagttaattaataaaaaattaacacaaagtttcttcacttggaaaaaaaaagataataattatcttttcaataattgagtctccctcgtcatatgggtcatgaacacatggaggacctaaattgttatttcaagaaaataaaatttaaagcatgtccccaaaaaaactaatatcaagaaacttatcaaaaaatttatgaatctgaatatcactagatttgattctaaatcaaccagaagaaagaaaaaaagataacatcaaagagaaaaataattctagaaagttttttgtttttgaaaagtaataattatagaaagttacctcaacagggctaagtcttctaaggaagaacatatcagcagtttcaggtacaccattaaaatttcttccaatctttctacaagcaccagaatctctaagacaagaactaattttaccccaatagctatcatcagaaactcgatctttcaaccaaccagagtaatcttcaagataatagtcaagataaccccggttaagtacggttcgaccggatcctttatctgtaaccgcgtaagcgaagatgatgaaaccgataagagcagcgatgatgagaagcatgactactaggtatagccacataaggaacttgttacggtaacaagctccagcgaatccagctaaagatacgaccatgattgagattccgatgacgatgagaggccattgaaggaatcttaaacagtcggtggagttagctcggctgcttaaccatattccaccgccgaggattggtattgagaggaggaaagtgaggaagttgactaaacctatgagatggttgcttgttctcatagcttagggttttgaggttttcctgagctttgtttcttgtgcaaaaagactgagaaatgcagagccagaggcgttaaagaagaggtgatgaagacataatgggtttacatatctctgcacatgctttgacacgtgtcagtacagtctgattttgctattgggtagtgtgttattgtcatttgattagtttattgatgtttaccaagaaaaacaagaaaattttgtttatttttttgtcgtgacgcaaatatttgattttattatttttaaggctgttttgactaaaataaaagatcttcatgatattgatatctaagctgcatatatataaagttaaagtgataagtttttacgtaataattaggttttgaaagttacgtaagataggattaggttttgaacgtttgagatccacatatgttagtgaccatgtcggtagctcagtgatatttttgaagattttatatttgtataattactgaattaatccacatattcatgtttttgaacattttttcttatggtgatgaaatcatataattcatcacttgggttggtatgctcattttttctacatatcttgagctagaagagttaaatatcaagacaactctcttaaatggtattctagaagaataaactatatagattgattttttctaagaaaaataagtaagtggtgaagttcaaaatttgaaatgatggacttaaggaagaatatttcaagatgttgatatgctttttaatggaagatgtttaaggctatatacactccattggagcacatttcaaactcaaagcagtatatgaacaggaagagaagaaacatgagaggatcaaagtagaaaacatatgtatgtgtttactaaagtatataaacaagagatttggtatggaattttgctttacctcagaagatattattggagttactagattgtatataatgtgtagactattcatttgatcttgatcttgacataagtagttcaatctcagtttatgcctaaattttcgaaatttatagtttcaactggcattgtgttttgatattgcgctgatgtcttttgaccatgacatcacttcattgtaacgcttaaccaattttgttattaaaagtcataattttgcaagatacttcaagtggactattaattattcaaaatactccaacggattaaattacttatagccaatctcagtcttgaacgaaatgctacgaaattgtatatctcgtctaattaaagtattaatacaaatgagaggtgcttattcaaagaaaagaaattacaatacaactataatgttacgtgtagggaaataatgcgacaatacaaaggaatcgattcctttttcatagtctttgtaaattattcgtcaatttcaaatcaatttgcatggaacacatacaaaagccggttgtcataacgtccatatctcttaaagaagtcaattgaataaatccctacaccgaccttactgaatacacacatttctatataatacgatagaaattttgtattttaataatttacactagtttcgtcatttgttatcatttggattctagtcccgcatatatctgtattatttgtaggttatgtttgttggagaatccaaaacaagaagggtttaagctcaaaatagcttttgttagatagataattaatgagatagcattagctaattaggagttttcatttagataggaccaaacaaaaattgttattcttcaaaaatagaagggttgtctgaattttcagccctataatagttggaatctcaacttttcaccataaatttttagtcacttaaaaaatcaccataaaaaattttaatctcgataaaactacatatactttcggatttgttcttaaaactatgcctccaattgaaccgaccaattaaccgataattatacatccggtttgacttatctaaaatttaaccaaattaatccgattttgactctattttaacccaattttgacccaagaaaatgtaaatgaattgtcttctaaaaagtaaaagtatttttatttatttgtgataaacaattaaaaatattaaattataattaattttagcaaaacttaatatgacaaaatataccccaaattatattttgagctacattttgttataaaattttgataatatacaaacatatacattttccttttaacaatcatttatattttttttataaatttaaagttatgtctttttttaaaacaaaatattcatttttcttccaatcataatatatgaacagagtgaaatttctcagttctcttcttatgcatcttgcgcttcttgagttaatatcatcaaaatttacgatctgttaatcaatgatccctcaaaattttgtaaggaaatattttgtcatttgtccacttcagattccgcttaagcggtgatgttgatttggaaacttctttaaaagctcgtaatctgttctgtatagaaaccagtttgaacattttgagttttcttgggctaaggcccattgggccacagaaaaattgatcactgaagttagagaatttgatgttaaacctattattggctagcttagaggcgtatcttgaattttaaggtttttgcaaactatccaaacattgtagctcacaaattaacttggattcataatcatatacatatgatagttttgtttcataaatattaattgaattttagttttatcatgtgaaaataaattgatgatattattactcatttttattttgagtaacgatttcattttttttttgttttgtgatcgtcataaactatacacatagagataatttgaacaaaaaattcgttcactttccaaatagtttttcctgacttttaacaccactaatcattcaaaatattattattcttgaaaagccatcgccaatatagcaacgaaatcctaaacatatcaaatcaaaccgttttttggggattcaaaacaagtcatattgtaataaaagagtttggcggtttgttcaattctaacaagggttttgtcacgccagaatcttcgaattgaatttggtgcgtacgtcatgcggatatatattttggatatgaataaataatacacatttttcatcgtgatttcaagcgacataatttaaggcttacatgcctattcaaaatctactgaaattttttgaaacatcatcaaaagaaatttgggaaaatgtttaacaaaaaaaaagaaactttggaaaatacacaaacggacaaacgcaaaacgttcattcaagttaatcaaacattttgttttagtccgagagaatactgcttttcacttgggtccaatttttttttttttgtggtccattgttatggtaaacatacaaaaaagcttttatatgtaaatggaagaatccgaagtttgaaccggagactaggaagccagaaacatacacactgttaagttgttaagtttttctaatttgaaaacctacgtaaattattcatttgggccattgaaaaacaggtcagaacaaacaaaaaaacacaattcatttcccaagtaactgaaaatctttaaagaaagcacaacatatctattttcttttaccattaaccccaaactcatattatccctttctctaaccaagacgaccacaatccaaaccctaatcaaacccaaattttaaaataaatagactacaataaagcaccagtattaatgtagttgacagtactgctccaaatctctctccctgaatcaatctgatcaacatgaccatgaccatgaccacttcctcctcccatgttcatctgccaggggaatccccacaaaaccctgtttggatcacttgtcgccatctgctccataccgcctccaccatttccaaacgcataccccgtgttctccatctgatggctcgtggtcccatacacgccatccatggccattggagactgagagcttccgaaccctagatgtgaagaaacccctagaggttgcttgttcaacaaggcatatgctaacccaagctccatctgttcgttgctaatgttattattattatagccaaaactcgccgttgggaatgatttgccgtcatgggtcatcgtgggctcaggggttgttctgaggcttttggttgcggaggaggagcgtttgtgtttccggtaagcaccaccgattgggatgtttcttaggattccacccttggtccagtatctcctacaagatttgcagaagtagcgaggttgagagagactgtagttgttgtagtagcagaactttgtgttggtggagtcacagcgagggcatcttaatgattgctctggtggagctggcctagtcgccgacaatggtttcttctggttttgataatcttgtgttgaacatgaagatactcccatcacattctatcaaaacacaaatttaaatgaacatctaaaaccaatttaatctcaaacaaaataatcataagaatgtgatgttgattagtacctgatgcatcgaagaataatccatctcaaccaattgagaaacttctttgaaatgtagaggagtatgagataaagagaactaggagaaagaaaggagagataaagagtgggagataaaggaaaagccaagcatcttacctcactatatatagaaaagaatgtggaagtagctagagaatttggtggcttcctcaatattatatgattacattttttaacgttactaatcaatgttattaccgtacgagggaataacgtgatccaactcggagcataaaatgtgaaccatgaagccgtttttattaataaagatttatcatgcctacttctgatttacaactaataaaagatcctttttcatttagagtggagacacaatacaatttgtctctaatttatgcttgttcatcggcttttatttgtatcatattaaacgaaaaaatatactgcgataccttaatacttcactttacatacaaataactatgtgttccgtagtcttacaaaacatgcatgttagatatatatagattgttctatcatgtacaaaaaattatatgttgcgtacattacatgtgatgatgtggcgaaagattgtttaactttcatcatatcggaattcgaatgtggtcgtgatgtacatgagaaatagtcatatatgtttttgttttatcttggcggattttgttagaaactttctaaattcaaaaacaaactattaaaaatccttaggcttcaaagaaaataatttatttgttcgattaataaaagatttgccattatatatatattgggacaacctttgttttttgtcttctggttattaatttgtatagaaatgatgagaagtgtgacctaggaccgtactatgatgtatcagaattggttgtttgtacgatgaccattttcaggcacccatctccatgtgtgtccccaacctcttttgtgtcacaattcttccattgagttgtcgtcacccaccacatggaacccaccttcatcttctaattttagtcaaaagttctactctcgcgtgaatcccaccacgctctctctagctggtcctatgtggtatcatctgtattttcttctccccatttgttatttttgttttgtcggcagttaaatttaatattactccccaaaatgttgggtgaaaggtagaataatactccatagttagttgtgattaatcatttcttggaccacattgtttctctgaggactcgaggtccacaaatatctgtgtttgtagcacatggttcatgacttttgcttccattattttaaatattcttgcatgtactagtttaggttttgtaacttctaagttatgattgtcggattcatgggttagatgttttgcttccatcacgattcacactcttgatttatgataggaaatgtaagaaaacaaaacattgtatattatgattataatagtgcatgcaactacctatatgcttctacaatattttatcaagcattcaagccatatctatatttttcatggactgtgttttatgcatttcctaacctccaataaatttttaataataattgtaaatgcgagttattgtattctatctaattatttttctttcttatgccattatttcacatcgattatacgacatcaacatccacaataatgagccaatcgtctataatgataatatctgcagaaatatttaatttgatttaagcaaagtacttgcttcccaaagtagcctcaagcttctctttgtcattcaattagttaaattatactcctattgcgcatattccaagatttattttgttaaatccccttgtaaactattttgaaaatctcaaaaactttgttaatcaactactaggctaaaaacattcctcgaagtacccataactcggttacctggtttttataacatattcttaatctaaaatctatttcaaacctctaaaacatataataacatgatcgaagaaaaaacacatgatcaactttttaaattaatttttaattgaaaaataaaacatctctctaacggaacaaatgaccatgcaaaagcaaagatttggccggagaatgtgtagcccatgatatccctatcaggtaaagtaagtagagacacaaaacatcgattttcgtaaaagggactaatatgaagaccaagatttggtctaaaacgacatgtatcggcatgatcacccatatccacagccaaatagatagtatattatatacatgtacgtaaatatgtgttttctttgattgttgtatgatcttagtataattttctagaaaaaaatcttagtataatatgatatttgaccgttggtatttgtgaccatctctacataggtgaagaatgagtaaatctattgagcatttcacacatttattttgatagttgggtctagggtgtatatatataaaatattgtggctatttcaacacactctcgtcagaattgattcgtataaaattattgggattatatatatgatactaatatgaaatttgattggttattgttttgggtgtccaaatctccggaaccaaaattcgaatgattacgatacgaaaacctactatatatactagattaaatttggtacatgacaatgggagagattgagagtaattaaatgattaaaatttgatttattcctattaaatagtgtaatttgttttgattatttctgattttatctccggctcttttttgtgttgaatgtatctttaagaatatttgtttttgtgaccgaaaatatcatatatgtaacgaataattcgcaacaattaagtggcaaaattaaaccattttttaattgattagttagatatcccaataactaaactgataaagtaacaatttaggaaaatgattacctcttttgataagagataaatgagaggtaaaaatcattcaaaggcgttactgttgtcactcattgttaatgcttagtttgtctccaaatttgctggcgactaactattctcgtttagacaactcgagaacatagagatgaaaacgtgagtatatacaacagaactcaaacaaaatattactattatatagataccaactaatcttgagtttatattttacagacactttggaaattaaggtgaataaacgttttgcaaggctgtcacattctacgactaaaattagtgattcataagaaatgattggtatccaagtaaggaatattgatcattacattgcaattggaccctcctcgtggatcaagtttaaaccaactaacgatgaccatttcatatctcttttgagttattgtaatataatatatttatttatttcattacaacaatcaatttttattaacaaattatagtttcgaattttagatcagataaaagaaacaaagtgattgaggatccgcatgataaggattaaaaaatgcgacacgtgacgaaaaaagaaaaaatctttgaagaaatcgagaagagagacaaagaaacaaaagtggggatcccagaaggctctgatagatatgagcatgtggtctcagtcaaggccaagactcaaagctgagaccaacccacttctattatagatacatacaatatttgttttatatcttgtcatgtattgatgtatatctaagtagatttatcataattatcgtaccatgctaagtgctaacgaataacgatcgttcatgaatccaaataaaatcacgtcaggtgctgcgacatggcttcttcattcggtttgttactgtttttttttcctctctttttctttctatgatcatcataaatgttgtaaaactatgttaaaaaatcgattcatgtctttttgtgtatgatgaggaagttttaacatttctttaggtatcatatatagtttatctttttgcatactataatatagttaactattttgtgcaaattttataaatcataattttttaaagtttagaatctatattggtattttcgtcctatacgaaaacaagtacaaagaattaattatacactacaaaaaaacgacattaattaattcatatagttgtacaactaatactataatccatcggttcttttttgtttgattttaggaaaaaaacgatattaagaaaacatattaaatgtattattctttgtgatttacaattttcaataattctaaacgaatgatattcaataatttttattaatatttacaatttatcaattataattaacaagtattgcattaataacttaaaaaatcaattttttataaaaacaattattctagaaaatccaaaaaaaaaacatatggagtatatattagaaaaaaatcccatggctgataaataaataattgtatatatatatatatatatctcacgcatacatatataagatatgatatcattactctataagatataaataattttattctatattttgaatagtccattttcatatgcaatttgaaaatttataacattataaaaaagggtaataaaacaagtagtggatcggaccagagattttgaggcgcaatttccaaagcgatctgcatctattcttacctccatcttcaagcaaagcatcaacgcctatagattcccatgcaacgctattttctttataacatataataaaaatatttctgttgctttttattcgtttcactttcctgacattgtttttgtttattcttactttctattcatagaattaatgaatccttatcatatgatccgttataagtctctgctttcgaacttaggaaaattaaattcgcattttttttatcaatgacaataatcataatcactagctaggttaggtataacttataaggtctcgcacttccttgattttaaaataactttgtctttaccaaacaaaaataactgaaccgtaaataccaaaatattttggataacaaaaaatattttttaaaaatatatatttcaaaatattagttatttctaactaaaaatagttgaaaatatatataaacagtaaaaatatttaaaaataacaaaaaatattgaaaaaatgacaaaaatatccaaacataactgaaatatccgaaaatattcaaagcaaataaccgaatgaatactaaattttaaaaccaaaagaaccggagccgaaccaaaatcgaaccaaactttcaaaataatcgaataaatattaaactttagaaccgaaaaaatcgattaccgaatagatacaacctaaactgaatggataacagaacgtcgagaattatttttaatggtcaaatcagttgccaacaattttgaggcattaatactctcaattttgccaaaacaattttgatctatgaatctggaccgactctactctccaacccaattggtattttccatctacttaaaatatgggcttgtacggcccaaattattattttactcatatcgttttaacgtcattaatgattttctgaagaaacgtaaacatttgcactgtatgacgttttagagtgacaaaaacaacagatcaacaaatttcgattaccgtagacgacacgatgtttcacacccgactacgaatcacgacgacttatacaaaacagcaaaagcgtaaagacttgaacttaaaaccatggcgagaccgagacgaagaaacacagagatcggtgatggcttcacagagatattcaacagagagattggtttctctcatccaatcaccatctctcgtcgaatctccgcttctgaggttctcattttttttcaaatactcttccatttctctattttctccgatcttgaactctctctttacttgtttccatttttgaatgagacttttcaacttgtgaagactttccaatttcttgctcaaaattggtatagaaatatgggttttggatagttatgtcatagttatcagaaagtcttctccttttctagatttcagtttcgaatcatggatcttagtgttccaaagacgaagtgttatggcttatcagtgttttgtaggatgttgagaaaatctgaaccaatccaaagacttatatcagttaaaacactcaaattttaagttctttggattgaactgtattgttgtttttcttttgttacttcaggggagagtgaagaaactagatctttacgggaagttaaatggtcatgagggatgtgtgaatgcagtggagttcaattcgactggcgatgttcttgtttccgggtccgatgatcgacaaatcatgctctggaactggttgagtggaagcaggaagttgtcgtatccctctggccattgtgaaaatgtgtttcagactaagttcataccttttacggatgacaggacaatcataacatctggtgctgatggacaagtaatcttgtaatcttaagaaatcgttaagtcatttcagcgttgttactttctttgtaagtagtttaatcatttgatatccattctgtttttgcaggtaagacttggtcagatcctagaaaatggtaaagtggagacgaaaagactagggaggcatcacggtcgcgtgtacaagcttgctgttttgcctggagatcctaacgtattctacagctgtggtgaagatggttttgttcaacatgttggtctctatatctctctcatgctcctccattgtgtttctcattgtggtctctgaacttgtctttattatttttgggcagtttgatatacgcagcaacagtgctactatggttttgtattcctctccgttcacacaaggatgcaggagacatcactccagcagtaggatcagattgaattctattgcgatagatccgaggaattcatattatcttgcggttgggggttctgatgaatatgcacgagtctacgatactagaagagtacaattagctccagtatgtcgccacgtcttaccagacgctcctgtgaacactttctgtcctcgtcatctccgggaaaccaacagtgttcacatcacgggattagcatattccaaagctggagaactattggtctcttacaacgacgagcttatttatctgtttgagaagaacatgggttatggttcgtcgcctgtttctgtctctcctgagaaactgcaagaaatggaagaaccacaggtgtatataggtcaccgcaatgcacaaacagtgaaaggagtgaacttctttggtccaaatgatgaatatgtcacgagtggttcagactgcggtcacatttttatatggaagaagaaaggaggtaagcttgtccgagctatggtgggtgatagacgagtggtgaatcagttagagtctcacccacacataccgttacttgcatcctgcgggattgaaaagagcgttaagctctggacgccaatgtcaaatgatgttctttccctgcctgaaaagatcgataaggtaaatcaagtcttctctcaaccaatgtttaatgttgagacagtgtcacaaacactgaaactgtattttgtgggaaatgcaggtgatggaattgaacagggtggggagagaagaccaatcgagggtaacactgactcctgatgtaattatgcatgttcttaggctacagagacgtcagacgtcggcttttacagagaggagatacgtttcaactgacattggcagtgatgaaggaaatgatgctcgcttcattgcaagcttagtagccaacgacgatgagtcttcagacagagaatgtactgtaagctgagtcctctcaactagtgtaatagattacaggtcttgttccaaatacagatacttgtggattttgcttgtgtgttgtaatttataataaggaaaagaaaataagaacgagaaattagtaatctaatcttctttcgacatgacgaccaaagcaaatcttggttacgcaggaaaacagaaggttaaaaaacaaaacgtccaaacaagttcatggacccatgctgtgaatttctttcattcaatttggatagagtaatgaaatgaggagtttgcacaaggaaagagactctttcctttgtacaaaagcatagactgatacagttcttgtaagctctatacaaatggtaaatgcaccatagcgccaattttttccactagttcagccttatatagtatgcaaatgtagaccaaaatcaccttctgaatcaagagtaggcactgaagcatcaaacttttgctgatacaaagccaacagagtaaggtatcctcctgcgaatgagagaaacaacttcgttaagtacattatattatcagtaaatcattgtctataagaggtagcgagaacaagatgtctataccaattgagtttaaactgctttggaggagccgatatttgcggttgttgactctaaggtctggtttgatatgggcaaataggcagagcagtttcgactatgaatctcccaacaccggaatcagccaaaaaatccttcttttgagacagtcttaagtgaaaatccaaccaagaagaattccgagaatcaaatcccgtatgttctgttatacggatctccaggaccgggcctccggaatttaggctcttcaaaaccgctgtaaacgttgtcattaaaacccatccgttcattccttagaagctgggtaatcccaagattgttaccactttgtggttcattccacttattatcccagtgtccatttgacaacaatggatttgctgaagcttgtctaggcagctgtgtgaaaggagacaagccagttccttgtgtttgatccgttggcctcgagctaatcccatatgggtcagagaacgaagaagagaagttgtttacgttcctgggatcgtgaaatccattgacttgttgtgcagccagagacctctgcgccaacaattggagtcttgcatcattatcaaatgaattcagttgagaagagaaccctgatctcaaatcaaagtctgctgtttccatcccattatgaagtcttccccttccaacagctaaaattgcaggatcaataaactcaatatctcctgcagcattcaaatttccacttggaggtggtacatgatatgcgttcctcaacaaattggctgagtcaagtaaacgagttcctgcaaattgcaaagtatgtgttacaggagtttcagcttatggaaagttgaaactatcctttttttgggaatgtaacatataatacctgatgcaatatcagaagacaggtcgcctctttgatgtgaagagaaaccgggaggaggtaacctgttgggagcagaaaatccgggaggagcagaaacttgagtcctcgccactacaagaggacaatggtgaaaagttaagaaaagcagaggaaacgacagtttgatgaaatactagttggttaaaccaattttaattgcgaaaaacaactataggaagctatgatatatactaaccaggactcttgtaagaagataatccaggactagtagcaaattgttcatatccaccggaatagtttgaggcaaaaccattttgactgccaagcttatcctgatacatatcacggttcgctccaaactcttgaagaggctgatctcttgacaactgcccatatatgctgtaacttctattgtcatacgcttgactatttgattcttcatgccgagcaaaagagaacctagactggtcattatgttgctttaggaggttagaagattccagagtactggccctatgatcactctgaccaagtaattttgcaaaattgtgttgcgaagtcaacgattcatcccagggatcaaagtctaaaatgtttgaaatgatatcatcctctgtattctgaatgttgcttctgccttcattagcaaataatgaatgctccatattggacatagctttctcagaaaatccatttggaagatgcaatctatcactacctatttcaaaggaggatccagtttttgaatccatcccacaagaagtttcccggttctggaacgaacgagaagctagatgatttgaatccagaattgagattgatgaactaaacttagaagtcgagtggctaacagcctctgcaataccacgtctgttgttattgaatgatgagaaatcattgacttccaacggttccttaacatctatctgggattgcaaacctgatctccaatcccactcaggccttgaaccatgaattccattcagtgatatgtcagcttctgcataagtgtttgtaggagactgttttctacattgctcgagattttgtacatcgttatcagattgtgtaatagaaccaagatcacaatgagtaccgataaccactggaacaccaggggtttcatccctagaatttgtagttatccccatccatgcaacatcagcagacaatttaccaacatcgaagacatcttcagcaatttcacttgtgtgttcaagagaattctcaacagcagaaggcttgtcaatgactctgctattgtaggaagactctactaaacaggatatctgattgctactagggtctctattaggtgatgtagttctcttggactcgggatccaacacaatcttctgctgcaaaggcttcaacacaccaggtttgcttttttcagccaatgattgaatttcttccttgagaggtgctttctgaagactgttactagaggatacaggcccattagctgcctttgtaacaactgtagacgtagccaaagttccattctctgatgttgatctttgattatccaaagatccatttgacaaagctgaagttgctaaagagtgttgatttgttaaacgtgcccccctgtaatagcattttcaattttttttaaatgaccccataaaatagttcacatagacagcggcttgcagaaaaaaaacttaccatgatgctgcagcaggaagagcagttgatttacccgagctcccactaggtggggaactcttaggagcactaactgaagtctgcaccaattaaatgaagaaagaactaaacattaatccaatacagcattttcgtaaaacagaaagtcaaggaaaataataaattctaaaaaaacacatgttcacaatttggagctatagcagagctaagtttctatggaatgctgcacatcgacacaagtttatagtgagcacatccatgcatttacccatatatgactaactaaggtggtaaagccacatgagataagaatgtaaatgtgaagtttcgttgatacggatgacacaagccaaaaagcaccttatatcacggtaaattagaaaagcttatagagcttacactagaaggaacttttgcaattggatttccagtagaactgtcactggtataagcatccaatggtggaggtagcatgctccctgaacggtattgcatagtatttgttgctccagtgatttgctgaactctgcttattcaaagttactaaaagaattaactaaccgtctaaatacctgacttccattacactacatcttctccacatatttattcccactaataataatcacgagtacaagaggaaaacttaaaacaatatgataatgaagattaccttgtatgggctgatatgatctcatcttttgtaaaactatcctcttgagagccaacctcatgcaaatagaggcaatcctgattgttgcatgcctgggaatagaacaaacaatccatattccaataatatcagtagcaaatttcaactgaaaagaggaaagctgaaagaaaatttctgggggccagagagcagaacaagagtgcatatagggcataccacgtttctcaaccatgcatggcaatacttggttgtcccaaaacatgccctgcagatataaaagaaaaaaaaattgaagtcaatgaacagactgagtaatcagttttaaacaacagggtactcgagatgacttacttcagtgctttaccatccaagataaacccatgaacagactgaatacatcgaatggcctcttcctctttgccatatgtgatgtatctggagtaatatttggttataatcagaacaaaataataatacaaaacaaataacatataagaaatccattcatgctaaacgataaatttggttgattgacactagaaaacaaaactcacacactgcatgtgttgttaggaaactgttggatgagacctgttgctgttcgggacatcgaaacctttagaacctttccatactgaccaaaatattctttacgctggagaagctgaaaagaaaaaagaaaaattcccgtaaggccgtaactaagcagatcgtatgatataattacaggtttttcgaggaaaaaatgacgtacatcttcatctgctagattaaggggcaatccaacaatgtaaacaagatttctttgaaccactcggacacttgttagtggctttctcccatcagaagatttcggtttcgacttttgtatttttttgcgatccatgttgccttcagaggccagtctgagaacagaaaatagataagaaacatcagcaaactaaaactgacactgaacaaaagttcacatctcaggtgtcatatcatatctcaacctctcctgatcaacagtcatcccaacaatcttttctttgtcatatggagtgcggcaagctggacagcgcccttctgattgatctttctctgccatgtccattatatggtgccagcaccaaacacaaatctgtaagattgtaggtaaatacatatcagatcagaaaattatcagcagaacaaatgtcaatgatctctgaggccaccacaataagtataaattggtatgctctaagtatataccacaagccttcaaagtaaaccatagcacaactgaacctaatttttaatcctgatcacaaaaaacaatgaaaatcagagagagtgtctggacctgatagccacatttgcaaggcttcaattgctggtcagtcaaatccatctcctcagcacacaaagggcaagtcttttcaccgtaatcactcatttttttcctgaacaagacagagataaaaagactggaatcatgtctcatcataagacatacaagcaaaagcaaaccatactgacaaaactacctaaactttagtaattcagcaacattcgtgtatagtggcacagaataaaaagatcgacagttttactaataacagttcaaattgaacatcttcccgatcaaagaaactaatattatacactaatccaataaaattgagttagcaaatcttaaactaatccaaagtatcaaactttcagatcgaaatcgagaatctaacaagccaaagtccataatgaatccgtgcatgggacgcgacggttcaataagagacgcgtcaacgaaacagtacaatcgaaaaaaaaacatatcgacgacaatccaaaatctccatgagatttctacatacaatcggaatcagtaaacacgttgatctcaataactactccggaactaaaatcgaaacaccagaattagggttttgagattcggcgattcaaatcccaacatgaaagagtcaattacgagagaagtgaaaacatacggctgagtagagagattcgatcggagattgtggaagatgaagaagattgagagaagtgggagattgcaagagacaacaagtgagagagattggatggctgagattttggccgcttctagatccacgattgcctaataagaagaattaactatgcccttagattattagtttattacggatctgccactatctccggttcgattatttttggttggcgtcggttaaagactgatttaatttggtggtggttttatttcaacccaatgattatattttaatttttgttcttctacatatccgatattttcagaaatcatgtggaaataaatctaaaaatttagaaatttagttacaagttttataaaactaatcgtctaatacaatgaaatttcatcaaaataattatttttctataaattatgatgatctaagtaccggattaagaacaaattacaaataagaatactgtacacaacaaaactcaaacatgtgacttcagaaaatattttactcgtaaattaaaacataaacatacacgaatactatccttcatatatatctttgtatctaagagtaactcaatgttcaaaataaaatacagctaaaaaaagtaataagcaaaagaatatgggataaactattttaagctgaaaaagtaacaaagtgatagaacacactcatgcatcattagtttatgtaacaaagaagaactcattttaagttgttgcaatggagacttgcttcaaaacctttgaacagtccacaagtttcaagcttttaaacgttctacagatgaacaatggaataaacgactaggccattcttttcaaaagagtgttcataagggaaatatcatccacatgcatttggaagctctttataagctttcgattttgcccgtacctaatgattttcgtttgtccatctaggaagtactcgatttaaagtttagaactaatttaaacaatcattgttttgataaggttaagtatttgaaatcacttttagatgactttggaatagttttagaaggttataatccagtgaagtttaacgatgcatcgttattccttaacataaatagaactctaacttaaataaatttcataacaaaatcaatatttttaacgataatgttggaacataaattatatagcgcatacgattatttagaggaatttgtaaactaaatattaatatcttgttcgaactcgaaaatagcttacttttttttcttcataagtgttggctttgatatataacaacaaagtgttacaatagtggaaaactccacttacagaattcgataggctaatgagcattacgatattaaattatcaaacacatatagataatctcctttaattttcatctactcagaattgaacattttcataatctgcaagttctgctttatcttgtctgctttcattggaaatgaaatggtatatgttggtcggtaaaagacgaatcaaatttgtaaactaacaatgaactattgaaagagtaaatcttacagaaatctcaaaagaaaataagatactaaaaagggagaaactgaatctctcacttaatccccattcggggaacctttacacttaacacgcgatctgatggagccatgagtgcaatccaatcaatccaaaacttctgcaaggccctcttacacagatatcctaacgaaaagtaaccacaaagatccgcttctcaactccaaaaccaatttgcgcaaatagagattttgcctattttgctatctctttcttcttaaaacaaagccttcttaaaacaaaagtccaacaacaaaagtcaaaccgagcccaatatagtaacccatcgaggaagggataagaaagccatacaacacagagacatgtgtcgcctcatgaggaaatcacagacacgtgacgagaagaacgtgtttgtcgagaatgccaaccactgccggcatgttttctgagatcgaagaacgcctacccaccgaaagttcgttcactccgcaaaaccagaagcttcaagtagagcactgaagaccctctaaagaaattgcacatctagtcttcctcttccaaacgaaattaaactcagatttaacaaacgaacgaaactttctttcatatgaaggaaagcgtccaccattccaaagtagcatgaagcatcacaatgacgtaagcaaccaaaaagattttccggtgagacttaacgtcgccatgcccatcaagtgaaactactacaaaatttgaacgacaaggcttatgaagccgaaactcttaaacttccactttttcttcgtaatgaagaaacttaataagtttattagaaataaagacaaataaaggcaaaataccaaagaacggcgacgataaaaccggatttaccggtaactataactagaactcaccgtacggtattgaaacaaaaagttggaccatgtccgaacacaacctcacaaacatacgggaaggcatacgaaacaaagaattttttctttttctcaaaattttagagaaagaagagaataaaaaaattctgatcgaaaatagcttacttaaaaatcataattgaatagtatcttttgtttttaaactaatttagtctatataataataatattattaaccatcgtaaaccacacatgatattcaatacttataataaattaatcgcataaaatacaatacttaaaacgagtgttatataattttacgtaacgtaaaacaatacaaaattttaattcctgaacgaataaaacgagtatattaattaatttattgatcgtattaaaacgaatatgatccaattaagattacaattactaaaatccccacactattattgtcattatttaactatggcagatagatagatacagaaccgtaaaggacgttaggaagaggaagaacgttgacgaagtcaacaacgaacagaaaccgtcgatttgaggcggctctaatctcaaccacacgatcttctctgcctttccctcttctctcttcttcttcttcttcatcttcttcctcgcaattaccgcgaaaactcatctctgctcaatcctcaatctcagtctctctgttgactccgactgttatataaaaccatacaaataccttcagattcactacttcaaacctcaaagcaaccactgaatctcgactttgatcaattgagagagaaatgaacaccggcggtggccaatacacggattttccggcggtggaaactcacggaggacagttcataagttacgatatcttcggtagtttattcgagatcacatctaagtatcgtcctccgattataccaattggtcgtggagcttatggaatcgtttggtatgtttccttctctgagctttttcttaagttttattctttgagatcggagtttttaatttctggattttgattttgtgaagctctgtgttggatacggagacgaacgagctagtagcgatgaagaagatagctaatgcttttgataatcatatggatgctaagcgtacgcttcgtgagatcaagcttcttcgtcatcttgatcatgaaaacgttagtgtttttgttcgattttgtgaaatatctgtagaaattagtaaataaatcatgattagggttttttgatttggtattgcaacagattatagctataagagatgttgttccaccaccactaagaagacagttcagtgatgtttatatctctactgaattaatggatactgatcttcatcaaatcatcagatctaaccagagtttatcagaagaacactgtcaggtaaactaaaaactgttcttggcttttttctgggatttatatttgatagaagagacatgaaactgatacttgatttggtgtttttgttgtcatggaaacagtacttcttgtaccagctacttcgaggactgaagtatatccactcagctaacattattcatagggatttaaagccgagcaatcttctgttgaacgcgaattgcgatttaaagatttgtgatttcggtcttgctagacctacttcagagaatgattttatgactgagtatgttgttacgagatggtatagagcacctgagcttctgttgaactcttcagattacacagctgctattgatgtttggtctgttggttgtatctttatggagcttatgaatagaaagcctttgttccctggtaaagaccatgttcatcaaatgcgcttattgacagaggtaaaatattttagagagttatgtaattttagcatggtttaaagattctgccttttcacggaatatgtgatgaatttgtttgaatcttgcagttgcttggcacaccgacagaatctgatctcggttttactcacaatgaggatgcgaaaagatacatccggcaacttcccaacttcccacgtcagcccttagctaaacttttctctcatgttaacccaatggccattgatcttgttgacagaatgttgacgtttgaccccaacagaagaatcactggtaagtttcatacatgttctctgttggtttttcttaccatcactatgttttgattaaaaactgaaaataccatcttgtgcagttgaacaagctctgaatcaccagtaccttgctaaattgcacgacccgaatgatgagccaatctgtcaaaagccattctcttttgagttcgaacaacagcctctggatgaggaacagataaaagagatgatctaccaagaagccatagcactcaatccaacatacggttagaagtgcagcagccccgtgaatgcctggtattacccaataaccatccgaatggctacttagtatctttgcctgttcttttattcatgtacttcttccacatatgtaatcttgtaacttttatttgtttgttcatgttatttactgctagtgattaagtgtagctccaatgtaaagtactccagttattaaagaatatctatagacttttttacttcacatactcttgagtcttccctagtaaacaaagagaagagagaatataattttgtaatgtacagagcctcaatatttgtgggagacattatagagctagagccagagtcaatgctgtcgccgtgagttgtctattctcattcaatgactttcaatagattttagtgggattggctttaggtagcttgcattattgaagtagaaatggtcaattccttagcaataattaggcacaaatgtgtctttctttagtaatattgtaatatcctttgtctgacaatttagagttgacttctaaaacgttgggttggaaataatgttgtcttcacacaggctgttacgaagcagacagtgatggctcaacttgcatcaacggaaacctttgagtttttgttttactttcttaatgtttctttatttgaagctgctgcgcatggagaataaaatatcgtggacccgagaaagtcatcattgctgtattattacttatactgtatatatgtttcagaatttcaggccattgttgacaaaaatagtgaaagatttctgcttgattttgagacatggctagttcagttactggcgatgcagaaacagcgatatcagcagattcaagcaccaaacgccgtggtggaggttggattacctttccgtttatgataggtgagagattctgtttctctgtttttatatttctcataacttcataaccattagagcttggaagaagaagttgaatttatcttatctttctatggtgcagctacgttgttaggcttgacaatagctgcgtggggttggttacttaacttgatcgtctacctgatcgaggaattcaacgtgaagagcattgcagcggctcagattgctaatattgttagtggttgtatctgtatggttccagctgttgcagccattgcatctgactctttctttggaaccattcctgttatctcagtttcagctttcatttctcttatggtaaagttaataaagagtccttgacatttgtttttatcagtttctctctgaaacagaaattcactaattctactcttgaccagggtgtagctctactgactctaactgcttcacttgacactttaagacctagaccctgcgaaacagcttcaatactatgccagtctccttcgaaaacccagctcggagtcctttacacggccataactctagcctctataggaacaggtgggacacggttcacattagcaactgctggtgcgaaccagtatgaaaaaactaaagaccaaggaagctttttcaactggtttttcttcacaacatatctagccggagctataagtgcaaccgccattgtctacaccgaagacaatatcagctggacccttgggtttggtctgtctgtagccgctaatttcttcagttttttggttttcgtctcggggaaaagattctacaagcatgacaagcctttgggaagtcccttcacaagtctactatgcgtcattttcgcagcattacgcaaaagaaaagctgtggtttccaccaacgaaaaagactaccacaatgaatcaatcacaatgcccacaaagagtttcaggtagaaaaaccggctcgaaaaccgcagtttcattcttgcactgagaggccgttctaatgagttttcaaatacgcaggttctttaaccgtgcagcattgaaacaggaagacgaggtaaaaccagatggcacaattcgcaatccatggagactatgcagcgttcaacaagtggaagatttcaaagcagtcataagaatcatccctctcgccttagccacaatattcttgagcactccaatcgcaatgcaactaagcttaacagttcttcaaggtctggtgatggaccggaggcttggtcctagcttcaaaatccctgcaggctctctccaagtcataacacttctctccacttgcctatttatcatagtcaacgatagggttctctatccattttaccaaaagttaacgggaaagcacctcacaccgctccaacgagttgggataggccatgcgttcaacattctaagcatggctgtgactgccatagttgaagcaaagcgattaaagatagtacagaagggtcattttctcggatcatcatctgttgctgacatgtcagtcttatggctcttccctcctctagtcatagtaggaatcggtaaggatttgattccggataataattcattctacgagttcagatcaatccgaccatgttcttgttttttggttgcaggagaggccttccatttcccagggaatgtagctctgtgctatcaagagtttccagagtctatgagaagcaccgcaacatcgataacctcggtggtgattgggatatgtttctacacaagcactgctttgatagatctgattcaaaggaccacggcgtggttaccagatgacataaaccatggaagagttgacaatgtttactggattttagtcataggaggagtcttgaatcttggctattttcttgtgtgttcttggctatacagatacagaaacctcaaggatgatgatcataagcaagctgcaaatgtctctcactgatctttaagctggagaaagaaagaacatgtcctttgttgttatcatttgcatttctttacagagagctttgtctgaaagtatctccaatttgtagccattgaaaaacagtttttcatatgtagaattgatttggaaatttgtggtaatataatcgttttgtttctgtgattcctgagtacaaaccagtaacacaattgatgttgagcttgtgatgcttctgtagtgcctaagataacaatcttgtgattctcgggctgctttttgatgttttctgtctttgacagagacactcatgacattagtgaatatttttgcaggagttatgattaaggaagatggtgaatctgaatatgcggaagacaaccattttaaaaaggaacaggtgacaaagaatgtgatggagaatctagaaaagttgattactacttataggatgacaaagcattattcttcttaagatgaatggggatatggtgaatcttggatgaacaataatgcatcggtagcatcaaagcttgtcccggtgagtagtctattatcattcaataacttgttgattgttttgtgggctacttgcattgttaatgtaattccttagtactaaaagacaaattggtctttctcaagctagttattcctctacatgacatgttaagttgacttattgaatgttattagcttgaccgaggttttgctttcacacatgctgttatattataataagctgacagtgatagtttaactcccagcaacgaccacagtgagttttttagtttttcttgtgagactagaggctgctgcacatggagaataaaaatattgtgatcatcagtttgaatcattctcgttgttgtttcattggcttatttatatatatgcttttttttctggcaattgttgaaaacttagtggaacatcacttgttgttctttagaaatatgtctggttcagtttcccgcgatgcagaagctctgaagtcagcagattctagcaccagacgctctggcggcaggatcaccttcccgtttatgataggtaatgtagtttttatgttttcattgttgcataactatataaagccacagaagaagaagagagttcatgtatattgaagctagtttctttgtcgcagtaacgttgttcggcctaacattagctacgttgggatggttacagaacttgattgtctacctgatcgaagagtacaacatgaagagcatcgcagctgcgaagattctcaacattttcagtggttttacctttatgttccctgccattggagccattgcagcggattctttcttcggaacaattcctgttatcttggtttcatcattcatttctctagtggtaaagttgatttgactcactctcatttgttttcatcaattcctctcttcgaaattctcaaacagaactcaccaattctactccttgctcagggcgtagttctgctggctctaaccactttgtttgactctttaagaccccaagcctgcgaaacagcatcaaagttatgtcaagcccctacgaacatccagctcggtgtcctttacacagcaataactctaggctgtgtgggagcaggtgggctacggtttaccttggccaccgctggtgcgaaccagtacgaaaaaactaaagaccaaggcagctttttcaactggtttttcttcacatggtatttagctgcctctataagtgcaacagccattgtctacgccgaagaaaacattagctggagtttcgggtttggtctgtgtgtagctgctaatctgttaggcttgatagttttcatctcggggaaaaaattctacaagcatgacaagcctttgggaagtcccttcacaagtttacttcgtgtcatcttcgctgccatacgtaaaagaaaagctgtggtttccaccaacgagaaagactaccacagtgaatcaaagaaaacgcccacaaagagtttcaggtaaaaccacctcaaaaaccgccatttcagtctgatttttacaagaaagggactcgttgaggccatctaacgaatcctcgtgtatgcaggttctttaaccgcgcagcattgaaacaggatgatgaggttaattcagacggcacaattcacaatcaatggagactatgcagcgttcaacaagtagaagatttcaaagcagtcataagaatcatccctcttgtgttagctatattattcttgagcactccaatcgcgatgcagctaggattaacagtacttcagggtctggtgatggaccggagacttggccctcacttcaagatccctgcaggctctctccaagtcataacacttctctccacttgcctatttatcatagtcaacgatcggtttctctacccattttaccaaaaactaaccgggaagttccccacaccgattcaaagggtgggaataggccacgttttcaacattctaagcatggctgtgactgccatagttgaagcaaagcgattgaagatagtacagaaaggtcattttctcggatcatcatctgttgctgacatgtcagtcttgtggttattccctcctctagtcatagtaggaatcggtaaggaattggatccagatcattttattcgactcagaagtgagttccatctatttatgttcttggttttgtcttttggttgcaggagaggccttccatttcccagggaatgtagctctgtgctatcaagagtttccagagtctatgcgaagtactgcgacatcaataacctcggtgttgattgggatatgtttctacacaagcactgctttgatcgacctgattcaaaagaccactgcatggttaccagatgatattaaccatggaagagttgacaatgtttactggattttagtcataggaggagtcttgaatcttggctatttccttgtgtgttcttggttttataaatacagaaacctcgagaatgctgatcatgaacaagatgcaaatgtctctcactaaggtggagatggaagatgtaatttgttgttagcatttgcagttctgtaaagcgggagctttgtctgaaagtatctcgaatttgtaggcattgaaaacctttttttaactgttgttgtagaatgaatttcgaaatctgtggtaatataatcgatgtgtttttgtgattccgaagagaaaccagtatggtcaagcaaagcgaaactcaaggtttcttggtattgaagttactgtagttagtttgtttcggttaagcatgacagccttgtccattgctttcatagcaaacaactgatccgttccaacgagttccatccactaataaaacacaaatacaacatttcttagtttgatgacttgagaagtgtagaattagatattgagctgacttgattttattgattcacaaattatgatatttatacacaatgatctctatcaaaaaataaacataaatccttaaaatataggttataaactctatcaccaaagatattttactaatcctaatcggattacacatatccccaataagaagttggaggaaacaaacacattactctcgctcgctcactcactctgcagacaagtctaattgtatgtctccgttgttgttcatagcttttcttgtttattttgatctttcgtgctaacgaaatctggctttctttcaagtacgatgactttgataacaatgtgattggtctatttatggattgccatgactatttatttatatttatctgtaaaagtttaagagaaaaatatctgccaattcataattcattaaagaaataagaaaaacaaataagtattgttcggaaactaaccattacatttttttaactcttaagtactacaagacgaacaaggaaaactgttacactgatccgttatttaacgactctatctataactattttaaagtaaattactaatgaaactgaatctaactaagattttctgatgaaaaaaaagaaggaaattttgaccaaagtcaaaccaagcttataaaaaggaaatttttgttctcatcgctatcagaaaacttttacagagaaaagcgagagaaagaagaagaatggagattgattctgagatttctgattcatcgtcaagcaacaactcgatgatccctcctcttcctcaaaaccctattttgactgtgaaactctctccgatcattctccatgtacgacgttgctcgaagaacattaaaaagaagaaacgtacacggacgcctttgaagaagaagaagaagagtattagtagcagtgtcgaatctataatcggagtctcattcaaatccgcctctcagaaacattccaccaccgtaactcgcgacggaggagttaaaaagatttcctcttgggtgaaatctaggttacttggagaaggggcttacggttgtgtttacctagcgacaagtaaagatgacatatacaaaacagagagagcgatcaaaagtgctgatgttttaaaggcttggagtcttatgcacgaaggaaggatcttaagaagtttgcaatctccgttcgtgattcgttgttacggccatgaaattgcacgagaagggactggtcatcaatataatttgattctcgagtactgctctggacagtgtcttgcggatatgatcgaagataatcaaggagggataccggagtttgatgtcaagcagttcgctatagatgttctgtctggtctcagttacattcaccgcagaaacattattcattgtgaaattaaaccggacaatctcttactcagccctgttgatcaccggtttaggtctaatgggtttttgacaaagattgcagatttcggtttatcaatggagaaaggttctaaagagtatggaaacggacgtgggcacatgagagggacaactaggtacatggctccggagttaataggcggtgggcttctggattttgctgttgacatttgcgcgtttggatgttctgttttggagatgctaaccgggaaaagggtttggggagaatatggtgatttggctcatgatgattgggttgatttgatcggtcacagtgatctcactcctcaaatctcgattcggttatctgcagaagctcaagactttctgatgaggtgtttggttaaggagcctggttcgaggtggaccatcggtgaactcgtggaccatccgtttctctgttcagatgaagagttttctcacaatggatttgtttatgattgagtttgtttatgattgagttctgtttcgtagtattggtaactgcaagtattttgtagtatttggtaaagtattataattgttgttaatggattcatgttgagttctctgtttcattattagtttgcagttgcaaagtagagtagtcactgtatcaattcaccgaaaaccgagtctccctattcaccaagatccttcctttaccaaaagatagattttttgcagtgatcttgcatattttgtgtctgtacatagctggaatcttggaatggagattgctagctccttctgacccggccatagtaggcgatactttattccctcgtcaagcaatatagctgaagaaacctataaaagaaaagactgaaaccatcacaaaagaaaaagagctcgagaaaccaatttagacatgaaaagctctcagatttggccagccatacatactgaaaacgtcaagaacaatcacagagcagatcgcttgacgcaatgtgaatgaatcaaatgagcatttcttacaaagtaacactataactactaaaaccacacacaaaagatgcagcagaaacagtgtttatgtgaataattagtccacaaagttctacttttctcaaacacaaacagaacaagaacacttaaaagattcaaagagacatggatctaatctactctatcataatcattctggtttgtacccaattcaagccttaagtctatcaaccagaatcaaaattttcactatataaaagacaaaactttatcaaatcaatgttcatatctaccttaaggaaagccaagattttgatgacagtttcaccaactaacttgttgttaagaatatctcaatacatcaacaccacagtctctacgtacacatcgcactcacttatctccaccatttttagaatgagagactccattctctcttcaagagcatttttagggtaaaaagtgcgagaaaaccaaaactcttggactaaaagaacatttccagaggttttgtcatgaatggtgttgttttccaaaataaaacctttattttatttttatttttatttcttaaaacttagattttatttccaaactaattgtatttattattattatagtcttcactgttgattataactaattaagatcataaaagtcttataaaactataaagcatatgttaaaacatattacagacaatattaatttatagaacgttatattagaatatgtcataaaatgtataaaataaaaacacaaaaaaatcattacttataaataaataaccaaattctattacaatgcttctatatatgatcaaccaatgcatttctaagtgatagatatgagtctctttatattaaaattttggattttcttcattttaaagtgtttagttaagtttatatatgaaaactatatttatatttatgagatatattattattcggactactatgacaggaaaaagaattagtaaagtgatttatgcaatatatatataactgttagaactaaagtgatttggagtaaagtgatttggagacttttggtcgacgtaatccaaagaaccaccgcgtggttaccaaatgacataaaccatggaagagttgacaatgtttactgggttttagtcataggaggagtcttgaaccttggctacttccttgtctgttcttggttttacaaacctcaaggatgatgaatgatgatcatgaacaagaagctgcggtatctcactcatcatcttaaaagtaaactgtcctttgttatcgtttgaagtcttgagctttctcatgatcctaacgagcatattctaacctcaaagtattattcactctctagtcattgaaagctagtatttttcagttttttgaaactgtttctttcttgttctttccttttatatatcttacacaaatgacacatatatattgtataaatgatcaaacttctattcaatagataaagtcttctgaaattcgtaacaatctcactcgtaaacaccaaatcaaatcgtattttaatttaccttgtccaagaattc

SEQ ID NO: 81 - DNA, 100328 bp, Arabidopsis thaliana
gaattccgctgataacccgaatagcattttcaatgtgacttgggagttcgatgttgacccgggttttcagtactatttccgctttcatttctgcgatatcgttagcttgtcgttaaaccagctatatttcaatctttatgttgactcaatggttgctgctacggatattgatcttagcactcttgtggataacactttggctggtgcatattcgatggactttgtcacgcagacgccaaagggtagtaataaagtccgtgtgagcatcggtccgtcgactgttcacaccgattatccaaacgcgattgtgaatggattggagattatgaagatgaataactctaagggtcagttaagcactgggacatttgtgcctggtagtagttcaagcagtaagagtaatctcgggttgattgtaggttcagccattggttcgttgctcgcggtagtcttcttgggaagttgctttgtgttgtataagaagcggaaacgtggccaagacggtcattcaaagacttggatgccgttttcgataaatggaacttcgatgggaagcaaatactccaatggaactacgcttacaagtataactaccaatgccaattaccgtattccctttgcagcggttaaagacgctacaaataactttgacgagagccgcaacatcggtgtaggcggttttggtaaagtctacaaaggagagcttaatgacggtacaaaggtagctgtgaaaagagggaacccaaaatctcagcaagggcttgcggaattcaggacagaaatcgagatgttatctcagtttcgtcaccgccatttggtttctctgatcggttattgtgacgagaacaatgagatgatactaatttacgagtatatggagaatggaacggtaaagagtcatctttatggctcaggtctacctagcttgacttggaaacaacggcttgagatctgcattggtgcagctagaggcttgcattaccttcacacgggtgactcgaaaccggtcattcacagagacgtgaaatctgcaaacatattgcttgacgagaacttcatggctaaagttgcagactttggactgtccaagactggacccgagcttgatcagactcatgtaagtactgctgtcaaaggaagttttggttatcttgaccccgagtacttcagaaggcaacagctcacagataaatccgatgtttattccttcggagttgttctcttcgaggttttatgtgctagacctgttatagacccaacacttccaagagagatggtgaatcttgcagaatgggctatgaaatggcagaagaaagggcaactggatcagatcatcgaccagtcgcttcgcggaaatatcagacccgattcgttaaggaaatttgcggaaacaggtgagaaatgtttagcggattatggagttgataggccatctatgggagatgtgttgtggaatcttgaatacgctctgcagcttcaagaagcagtcattgatggtgaaccagaagataatagcacgaatatgattggtgaattacctccgcagatcaataatttcagtcagggagacactagtgttaacgttccgggcacagcggggcgattcgaggaatctagtattgatgatctctctggcgtttccatgagtaaagtattctcacaactggtgaaatctgaaggaagatagtgaaagatttgagcaatgcagtgccaagaaaagccaaagatctgatctttttgatagaaacagagcaagcaaagtatgtaaccaggaaaaaagcatcaggttattttcagataggatctttgtctttgcttgatctgtttctactgcagatttttcatcagtgattaaacggttactttgaaaatttaccttattttgttcctctctcccttatcctgagtttgtattttattgatgttcattttgaaattgtctgaaatttgtttgttctttttactatatggatgtttaacactcttgttgtttcaattgtattgtaagtttagaagttaaaacagagtttttcatggttcttgtttggtttaagaaactgtttgatcttaatctatttcagttttctttttttgtcttggaacagtatttgtccggttccattggtttgtttctttctttcaccacgaccaagtcttgaactttaaaacaatttcagaaaactgttttattatcctcatagtgatcaatcaatattagtaaccttagtagtggacgcacaagacaaacatttccgtactagtctgaaaacaaacgtcctacacgaccatgttttgttattccgcatagcgttcttggccgccttctttctccctcctcctcctcgaaaacaactctgattgtgtctccgggtaactgcttcgccatcacctccatcaccgtcttcttcgttctcttctgttgaaaatgtgtagcttctaaggtacatctgcctacaagatatgctgtcaaccaccgtggtgcgatgctggcttccgtcgtggttgattgaccgtacgaactcggcctccgccatcggccacttgtaaagattggcgtaagtcataaccggccggacgcaaatggagtctcttttgatgtttacacaatcatctatgcactttgaggccatggtcgcttttttggagggtacttctaacttctagtgtgaactgttttccttattttttcgtgatgaagttgggtttagcttaaatatatattcatagaaaatccttatccatatcatttcttacttttattttgtgatacaaaaataccaagtcagagaaaaaagttgagaagttttctcaacttttagctatgaaagttttctcagtaatgtttctaagtttttcataagaaaagaaaataggattaatcacaaaggagaatttctccaatatccctataatatttcctcatatccctcatgcattctcaaatcttctctattcctacttatatatatctcgctctcattttctgattttctgattcatttatgttgaaagaagaatggtaaaaaattcacgtaacatgtgtcacatttcttcatctttattaaatcgttttgtacctaatctttcactttatagagtcagcttttagagtctttgagatgtatatattttcaaagttaattaggtggtgaaccttatctctcactcttagcagaaaaaaggcagtgtttcacaaggaaacttactaacacatacaactcttaatattactttagacactgctattcattctaaatgtcacaagatcttttgatagtcactaattctaaaatttacaaactgttcacggtaccatgatctcgcatgtggcatgttgctatctagcttgtctatattcgggtttgtagtaggtagctctatcctcttttcttttttttctttttttttggatttaaggaatgaaaacaagtatgtttgcacaaaataaaaataaataaataaataattgaaatccaaagcacatatatgtatattagaaacggtccatgtgtatacgagggtaattatgtagttaatacctgataaagatgtacaagtattcattgatattgaaattcaaaatgataatataaaaaaaaaactcttattattcttctctttattgataaaattacttcactgtttaagatcaaacttattagggcaagtacaagacaaacatttccatgtgaatcggaccacaaatcccttaagtgacgcccttttactcgtcctcatatctttcttcgccaacttcttcctccctgctcctccgccaccgtcttcgttctcctcttttcttgagaacgtatagctcctaagatacatttgcctacaagataaactttccaccgccgtagtacgacgcggactaccgtcttggctgatagactgtacgaactctacctcagccatcggccacttgtgaattttggcgtgagttctaccaggccggacacaaatggcattgtttttgatgtttacacaatcacctatgcatttcgatgccatggccgaatctctccaatgtttttttttttttttttgtgaatgttggtttttgctagataaaattaacaagttgtagtgtgagtaattatggagagagatttgtggtaataatatatctttttttatttttggcaacgattattattgactgaaaaagtatgactcaattaattaacgtgacttccatactttctccttaacatgtcattaagtaaacaattgtcttgtgtatgataaaggaaatatttacatgtgtttcatcaatatagtcaagaatatttttttcatagtcattaataataatcataatttttggcataataaaggaaagatttgactgaccaaaaaaagaaagaaaattttgacaacaaatttgactgatttataacaaaattatgtgtagctaatttgaaacatttcgattaatgtacctaatcagattactgaacttgttcggtcaacccaaaatcctgcttactatataacctaatcagtcgatcctgaagataataacacatcaactgattgtgataagaattaaaactcatacacattttggctaatgtagaaaatatattcaagaagagcaaaatgggcttcgaacctgattttatgatggtttggttaattagtttgtttgatttggactaatatagtaatttcatacaaattattttgtgactaatatccattttgcatgattaggccattgcttccgtatttgtcaatggacaaagatgggcctaaacgaaccaagccatatatcatttgtgggcttaggcccatttataggagaaaaagtgggtaatcgtttttctcaagtctcgttcttttgtagctagagaactttttatattcgtatgaataaccatcaaatgcgagcaattacggattagaaaacctaaaaaaaccgtcatttatttttaatttttccgtttaatacctctagtatttaatttggaaaaaaaatactttagttaattttgattacttattaaaactttcgtttttttaaaagttagtataatcttatcttcgagtttactaacggaattgttaattatggttaaaacttaactcatgttaattatgtaaataaatacgatcgcttttcttgtttatacgaatatgttgctgtagtcagatggttaaacactttattaattttttcttgagcctgtgttcgaaaccacctacctctttttaaacgtttttttttttgctgtttttttttcatcttcttcctcgactcttcttctcagttactcttttcactcaatcaccatatctatggtttcgctactcagcctttttgtcttttttattcaagtttctgacagatttacttaacaatggaagcaattgaagaattaaatagatttgggttttgatctaatctcctcaaattcatctgggtttttctaatttcaattgagccaatacttatttttctctcttctttcaattgaggttaaatcctagattttcttatttttcaattgtgaaaactaaaagagcgtaatcagaaatttcctcaattgcaatgctaaatatctagggtttacaataaaaagataatgaattttgaagaagaaacagtttttagaaaaaaataaaaataaaaaaacgtctttggaggaggcgccactcgaacccagacccaaaagaaaactaaatcaatgtttaaccatttgactacgacaacatattagtattgtcaagaaaagcgattgtatatatatttaattaccatgatttaagttttgaccatagttaacgattccgttagggtagttgacggaagttaactcggaagtacaattataccaatttttttaaaaccgaaagttttaataggcaaccaaaattaacgaaggtatttttttctaaattaaatactaaaagtattaaacgtccaaattaaaaataaatggcagtatttttgagtttttttcccgtccacataatcaacaaatctctccgctattatgaacaaacctcatgtcgtttctctcttaacaatatggattgcaaagcgtttttccggtttaaaatattatgttcgttcacgcaaacgcaagccagtatatcaaaacgcaaccgtgaatatttatccggaacaacattacaacgcaaacgcgaatacaaatcgatctgaaattccaaaatgaaatcactaaagcaaatcctagacaacactctaaaacactaaaatcctcaaccaccgaatccatagagagttcttccttgtctcttaagagcataaacaacatccatagcagtcaccgtcttcctccgagcgtgctcagtgtaagtaacggcgtcacggataacattttccaaaaagatcttgagaacgccacgtgtctcctcgtagatcaaaccactaatacgtttaacaccacctctacgagccaatctccgaatcgccggtttagtgattccttggatgttgtctctcagaaccttcctatgacgtttggctccacctttgcccaaacctttgcctccctttccacgacctgacattttctaaaggaacctgaatttttcttcggaaacttttcgatttgaagatttaattgagattgagatgatttgagaatcttgttaagaggagatgtcatttatatacaagatggatctaattgatttgaaccgtcagatgtgtttttagatctaacggttgcagataacgatccgggtgaacaatgagattacttattagccgttgatttaattttatcgacgcttaatattgtcgatccccgtgatgcctgtaagtgaaagtttatgaaaatttcaaataagcgccacggattgaggaatatagcgccaaattcttttcaccgttactaacgaaattaaatcatcatagaacaaaaaaaatcgttataacatttcacatatatatatatatatatatatattacgaacgggtaatattcatatttaacacaagtaaataaaacaaaattatttcacaatggttaactaataacataaagttatacatcgaaaggtttggtttatgtcacattagagaagatccacgtatatactatcttgccttaggcttcacatcagtatcaaaggtcacagtcacattaagctgatccgagctatgaccagagtccatgttttgattattcctacttatcctcgtgttttcagatgcaagacactctttaagattgatgattacttgagacatgtttggtcgtttgactgaagaaggatttgcgcatgacattgctacttcaagagctctccagacagagtgggtgtcatagtttccgtgaagtttaggatccacaatttgactagtatctcctttcttgatcacaaatgtaacccattctgctatgttagggttttcacgggtttgatcaatcactcgttggtttgtgataatctctagtaacaagatcccgaaactgtagacatcactcttctcggataactcacttgttaagtaatatctgtaaaggcaagaaaatggagtgtgattcatataatttacatttctttaaccactgaataaatgtaacatacttgaacatggtgcaaaatgtttaatatacttactcgggatcaagatatcctagagtaccggcaacaactgttgaaacttgagattgatcgcctcctacttgaaacgatctagacagtccaaaatccgcaattttggccttgaattcttcatccaacaatatatttgtacttttgacatctctatgcaccattgctggtttgcatccagtatgcaagtattctaatcctaatgcagcttcgatagctatttgcaatctagtaccccaatttaaaacagagccaccgtgttttcctacatcaaaagtttgtaatatcatcataaagctacactaagcattatgtgaaatcgtagattttttacagaatacaaccattaaatcaaccattttttaattaattatcttcatttggtaatccataaaagattcaaatgagttatatatgtgttcacctgataaatgttgatgtaagtctccattagacatgtattcatagatgagagcaaagtgatcttgttcatcacaatatccaacaaggttgaccaaatttatgtggtgaaccctaagaagaagttcaacctggcggcaatgtaaagcaaacacacacagacatacaaacattggcttaacaaaacataaaataattacattttgttttgcttaacacttaattatatgtggaacagttaaaacatattgtacctctgccttaaattctttatagccttgtgctgatgtttgggatagtagtttgacagctacttgctctgagccatttagatcgccatgataaacaacaccaaaccccccttccccaagaggtctttgcaagttcttagtcatttccataacttctgaataagtaaaccttttctttttggtcttgatccacggttcaggtttatttcctacatgtaaagcaaatgtaagtatatatagttaaaatatagtaatatatgactgtttcttgatttaagaagttgttgtaaatactccatacttgatgacattttctttttgaatacaaaaaggaggatcacaacaacgatagcggcaatggaagcgactggtgcaacaacctttaccgcaacttttttctttggcttatctatgcatgtactagatagacaaagctctttgtttccaagaacactacatacgagaagtttaaaatatttgaattcatatttcaagttgggaattgggataatgcatggttagttatagagtaaaatcatgtgagaatctttcttactttaactttagcccctccctttctctatcgcgaagagcttgaggaattgcaccactaagtttattcccgctcaagtttctgtcgaagtagaggaaaattcatgtgtacacaaaaatgattgtgtgaacgtaattagtagataaatcgagaaaatttattacatgaccaacaatgatttcatagtggctagaaactcgggcactattccactcaaactgttatttgacaaatccctgggatgtgaaaaacaatgaacccatatatgctttgtaattatatatcaaatatctgtagaaaagaaaaaaataaacatgctgctttaattaatcacgtactaacaatacttacaaactttctagatgcgccagattctgaaagttagacactatagtcccactcaagccactcgatgataaatttctggttataataaacaaattataagtttagattatatataagcatgataatttagtaattttaaaagtgtgtgtgacatagttaaatcttacaaagaaattattcttggtggtgcagatatatctgtgatgttacaattcaatccatcccacaagaattgtttcggtacgcatggatctccttgccaactgattctactcagtccataagtagttctaatgtttttgatagcaaccactagcataaaatttgatcgatgcgaaaaaaatatttaatgaattagttttcatcgatatggaagaacttataacaaaacaaaatgataaaataactgtctcttttagtttgataccttcaatttcatttgtctgagattgtggaagctggagaactgagtaaacttcaaaagcattaagtagaggtggaagtgtcgatttttgggtttttgttaactgcattcggcagatacctccgttgcattgcctaggatttgttgtaagccaggtcattatttcaagatatttaggagtaacacctctagtgttaattgtttctccattcaatataatgtcgaattctctagtgtcattggcttttaggacttggatctccgagaagtgcatgtacaagtagatttgatcatcaggattctccaaacgccaaaccattgtcagtgctgcatcaagatttgtaggcgttgcggccatcttaagagcaacttgtggtggatcatagtgatttttattggacacatttgaagttgttgaaatttgattccattcgggttgaatatatggaacccacgaacgatcataaacatctttcgggtacctatcacaactcacaaattttctcttagtattggtaacaataaattctttatcatttaaatgcatagatcatgtacatataatattttaagatatatagactagttatgatttgaagttgaatacgtaccgaagaagaacggtggcattgctaagatacatgcgaaaataatatttcaaggaaccagatttagcgatgtaagtatcattcgccaaaggtcgtaattccaaagctgatatcattggtatagttgcccctgtcttaacaagacaaatttgcaaagagtttgatcttggaatgtgaatgatctccttcactgtaccatctggcactatttgcaaatctattgttgtccacttattaggaccgatatgcatatcgaattcagggctaacattaagcccgtcaaaatttccatagaaaaatgtagctctaataaggtagttcctcccttcttccacccttagatcatagcagtttcgtattccatctggaaagtatcgtagggttgcatactgttttaaattttccgattcaagatttttcgggattctaccggtctttccactttggatgaaattctcgtctgatgagaactgtattccggtttccgattctatgtaaggtggctcatttagaggtaagccacaatctaaactgataaaacctgttcagaatgaaacatatgagtggtggtcatgcgtgggtgtatagccgggggaaagagtaacgtacggtaaaataaaagtggtaagacttactatggccggctctatagagatgcctaacgaaaactttctaaaaagtgatgttactaagtttgttcgggcgaactaaaaatcatgttgtattctcctgagttatcttatagtttactaataatctttctatagaaacttagacgtacataccttcttgattttgtccttcagcaaaacgaatgatgaggaaaactccaaaccaaaacagcgacagaaaaacccaacaaagattcttcatgattcctccgatcacaatacacgcagaaaaggatcgacacaattatatacttacgtttcacttatatactaaatgtaaggacacacaaattaagcttctctaatatggacaccaattaaaccaagctaaagtcaacgatatgagaaaatgagtgaatatggagttaatagttgtttcaagaaaaccaaatgaaggagtgagcaatgatgtcttctagtgaaacatccaacgtcacaagattaatatattttaaaagtacgcgaaaagtcttcatgcatgccgtacatgcgtatacgaccaggtcttatcacaaccttgagtagagattttgattggcacaatcaaatggatttgctaattccttaatttacaaaacacaacttgcttaactagactcttttccattgaacttgtcaatctgcaaaatattttgaggtttaatattcataaccatgacgcatgaagaaacgttaagagggagttgactttcgggtggtcatagacttgaatatataccattttcaaacatgtaaaagtttttttgtgatttttatgcaaaggtgtgcgtcaagttgttatccgaaatcgatcaaatagtctacacattcaattagaaaacagtttttgaatgggattccaatcctagatcccataatcattctcttttgattcgatcatcctccaaggatttggttaccctttctaagctctttgatatggcgagaggaatattttttagagaagcgttacctggcctaggttgatgccattacatcttgtcgacttgtcgtaggacctaggtcaacgattacaaagtgcttttagttagcagtatagtgaagtgatctgactgtattggggcctgggcaatatgtttggtctctgactggatatcaccttggtcgagagggcgtgctccgcatgtttatgatgcggacatccccccgttactccgtacaagtagattaaattactttgtctgcttctggtgatttggaagtggtctctctattggaaggttatgagaagtggttctaggacttgtctcccgaaaacactattatacgggccgagccgccgaaacagacggcatatttgtattttcgggaggccgaggattttgccatctttctatagaaaaatctcggccaattttcttgattgatgtgttgtagtggtctcgtttggtaggcagaaaatcactctcaaaacaattaatttcgaatccaagtgcaacattcaaatgcatatatatgttaaaccagttaaaatgaatatcatctggatgtcgcatgctaacatcctaattcataaacaagttaacttcaatcttgaaccaaagtgaaatcggagtggacaccctctagagtctagacagatttaaacatcgatcggaacaattcaagtcaacggaaggcatatctcactttaaatatttcggcactagccgtgttggttggtaaaatcgactatcctctccattgatagggtctttaaatttaatgaacaagttgaacattttctgactaataaactaataaataaaaaatatatttcccattagaaactttccaagaaacttaaatctacagttaaacttctatttgtagaaactgacatgtcctcacgtttttttgaggattattgtcttggtacggcttttacttgaaatgtctaaaggaattgtgtggcgccattgcttatataaacttcatttatggttcagaacttgggaccgtgtctttcttgattttgcttggaaagtaagaggatatggagtttccccattcggttttgttggtcgtactaattattgcaactttcgctatttctaaccttgttcaagctgaagaagatcaagaaggtatgtatccacattattgagatatgtttatagcgtttctatagctagcggaaattataagattgtcttacaacaaaataaacgaatcttgaatttgcatcttctacctaaagttgtgagatttcagccatattgtaaattttatgttttggcctgaaaattgtagaataatattttctcaaaaaagttgtgtaattctgtgttttatgctgtaatttttcactaaaactacagaatcttgttttttttttgcaaaaatgtggaattgagattttccgcaaaatatgcgtcttaagaccaaaaatgtggtaatataacgatgattctagggttttgtacaaaagaaccatctaactcatcaagttttaaaattttactttttaactctggagaataaagattaatcatataaattcagaaaaattacattaaaattcttatagtatattataaacgttttcacggccacatacattactttaaattgatacaattgaactccttgttgcgtgaggctcaattttacaaatttgacggtagtgaaatgattatttatgataataattgatggataacttataatattttattctcatgtatgattattttgatcaactatctctagaaagtattctgtatagttttttaaatcacttagtgaccaattggacagcagatcattagcattggtggaacaagaaatatttgttacggggttcataaatttaatcgtaccaaaaaaaaaaaattctttagaaatatattctgattctgtttttttaaatatgtattgctattagatttcttttcaaaattaagaaattaagaataatgtcatttatttctacaaactccataattgagccctttttgaatataaatttatatgggtgagaatcaaagtagtatgaaatatgcatgttatcatatttttttacaacgtatttatatatctaaacttagaagtatagtcaatgtctaaagataaatcaaaagaaattatatatagagagatacagaagaaagaaaaaaacaaaaaaaaacatgaaaatatatggaaaaatgaccctataaagaaattgggtgttaactttacttgtacttaaagacaccattgttccactaaccaacgctttatttttctgtttgtttagtgaccattatttgatctcttgcatatcttcttaatagggttcatcagtttggattgcggtttacccccaaatgaagtgtcaccatatatcgagccgtttactggactacggttttcatcagactcaagctttattcaaagtggaaaaatcggtaaagttgataaaagttttgaggccacgactctaaagtcatacatgacgttgagatactttccagatggaaaacgcaattgttacaatcttattgtgaagcaagggaaaacttatatgattagagctacagctctatatggaaattatgacggtcttaatattagtcctaagtttgatttatacattggcgctaacttctggacaacactagacgcgggagaatatttatctggcgtggttgaggaggtcaattacatcccaagatcaaattctttagacgtgtgtcttgttaaaacagacacgtcgacgccattcttatcactcttggaactaaggcctctagataatgattcttacctcactggttcgggttccttgaaaactttcaggcggtactatcttagtaattcagaatccgttatcgcgtaagtctgctttaagatgatattgagttatttttggttgttcctcgttgatgagatttgttttgttatatgaagcacaggtatccagaagacgtcaaggacagaatatgggaaccaacctttgattcagaatggaagcagatttggaccactctcaaaccgaacaactccaatggttatcttgtgccgaagaatgtgcttatgaccgcagcaatacctgcaaatgatagtgcaccgtttagatttaccgaggagctcgattctcctactgacgaactttacgtgtacctccacttctctgaggttcagtcactacaggccaatgaatctagagagtttgacattttatggagtggagaagttgcgtacgaagcttttatccctgaatatctgaatatcacgacaattcaaaccaatactccagttacttgcccaggaggaaaatgcaacttagagctaaaaagaactaaaaactctactcacccacctcttatcaatgccatcgagttttacacggtggtaaattttccacagttggaaacaaatgaaactgatggtacgttagtaaccaatgcaaggttcatatacataaaaatatctcttatgctgaatctaacatatttattgttgtgttttatgacagttgttgctatcaaagatatcaaagcaacctatgaattgaatagaatcacatggcaaggagatccatgcgtcccacaaaagtttatctgggagggtctggattgcaacagcaaagatgcattaacactaccaagaatcacttcattgtgagatatttaaatagcacaaactttttatcttttttgttataacaaacattttctacctacatcacacttatttttctgtaactaggaacttgtcttcaaccggcttaaccggaaatattgcagctggaattcaaaatcttacccaccttgacaaattgtaagtatgcatgataataattacctcgagtatgtaagcgagtaagcgacttttgattcttacaaacttcagggatttgtcaaataacaatttgaccggaggagttcctgaatttctagctagtatgaagtctctgtcattcatgtaagtttctcatgacatatttagttatagcattcctttgggatcatgttcacctatatgtatgatatttttgtggtttcatagaaacttgagcaagaacaatctgaatggttcaatcccacaagctcttcttaaaagagaaaaggatggactgaagttatcgtaagaagaaactccacccatgcattttcatttaaaatccttcaccacatgcagtcaaaatcctaaacgatcagtcccttttttatgtagtgttgatgaacagattcggtgttttcctggttcatgtgtcatcactaagaagaaattcccagtaatgattgttgcattagtatcttcggctgtggtggtcattctagtggtactagttctcatttttgtatttaagaagaaaaagccatcaaatttggaaggtattcgccgaaactcatacaccatgatcaaatcaatatatatgtgaatatcattcttgtactaaatatttctctacagatctaccaccgtcatcaaatacgccgcgtgaaaacattacatctaccagtatatctgatacatcgattgagacaaaaagaaaaagattcagttactcagaggttatggaaatgacaaagaacttgcaaagaccacttggcgaaggaggttttggagtcgtttatcatggtgatataaatggttcatcacaacaagtagccgttaaactactttcccaatcatcaacacaaggctataaagagtttaaagctgaggtaaactcttcgtaagtttatatatgttaaacttaaaccaatgtgtttcatgtgaatttttgttgttgttaatttggtgtacaggtcgaacttttgttgagagttcaccacataaacttggtaagccttgtagggtattgtgatgaacgagatcacttggctctcatctatgaatacatgtcgaataaagacttaaaacatcatttgtcaggtgaaagattgtataacagttacatacatatatttcttctaacagaaaaaagcgaatatgtgattttacaatctactgtaggaaaacacggtggctctgttttaaagtggaatacccgactacaaatagccgtcgatgccgcactaggtttgaactatcccaaaataattacattcatgtgtttttactatcacaaaatattttatgtgggattagtgggcacaaatgattgaaatattaaatggtactatattcttagtattactatttttgtttgtttaattttggtcaactaattgttcttattgttaattaaagtaaaactaatgaacgtctatatgctcttatcgttgcaataaagtattccacattttcataaactttctataaggatgaaagtatagtttttaaaatttagaaggtttagatatttttcgtttaaaacgtttttcttctgattcttactaagattagttaaaataatcacacaatcagaattaataccgaaaggctttttcctgatctgataaattaaaggactggaatacttacatattggatgtcgaccatcgatggtgcatagagatgtcaaaagtacaaatatattgttggacgatcaatttactgctaaaatggcggatttcgggctgtcaagatctttccaactcggagatgaatctcaggtttcaaccgttgttgctggtactcctggatatcttgaccccgagtaagtatttttcttttttcgaattattaagaggttctgagcttaggtccttacagcctctcaaaccggataccagagatatggaatgacctataatgaaaatggacacaaaagttttagaacgttgtccttactattagtggtacaaccaacacatattaattgtacctcatattcttgcctctccagatattacagaacaggtcggttagctgaaatgagcgatgtctacagttttggaattgtgttattggagataataacaaaccaacgtgtgattgacccagcccgagaaaaatctcacataacagaatggacagcatttatgcttaatagaggagatattacaagaatcatggatcctaaccttcaaggagattataactctcgttctgtctggagagctcttgaattagcaatgatgtgcgctaacccttcatcagaaaaacgaccgagcatgtcccaagttgttatcgagctaaaagagtgtatacgttctgaaaataaaactcaaggcatggattctcatagttcctttgaacaaagcatgagttttgataccaaagctgtccctagtgcaaggtagtattggcaaagaagtcttactgcgtcgatcaatttctgagtgtggtattcttctttggtaagataagtgctttaatttttgtttgagacaactaaacatgagaggaaaattgtaacactcttttaatcttgtgttctaccttgtatgatattttgtggtttgaaactgtgcgtagtaacttgccatattggtaggataattcttcttgagaatgaaaagcagatccactaatgaatatatggccatagaagcaattataagacaattgccacttgaaacttgtccattgatgcttttgtgcatgatgaacaagagtgaccacacaagatggtaggataatctaataacctgttaatcaaagaaaagattaatatggataaagatgactgaaggagatcaattgtagacctaatttattctttcatcaacaacttagaacccacatagctttgggtctttttcttttctaaatctccaaggtgcaatcatctaaagcctggagtaagtattattagtctaatctcggatcatgaaatttgtcttcacattcatattcatctgttaacttaatacgcatatttcttattccttttcttttgccatgctagatattacagaacatggcatccgtgatcagccctagctcatggcatccttgatcataggtttactacaagctggaggtccataattcctctaatctcggcaaagtccactacccatctagacactttcacattgaggtatgtttttcagatcaccatttacagtctctggcgggagcgaaatggtcgccgtcatggagagacatcaacaccgggccatacgcttacgagaatagttgataaaagtgtccgcaatcggttgagtaccttggcattgacgagctcttatgaagagggaatgtatttctggttccaaactcacagtctctagttccctttccaatgctgtaattctctttctaaaaggttatagaaattttggtttttaagatgcattttattgtaaaacagtctttttttggtgaatataattttgcattcataaaaaagaagatattacagaacatgtcggatggcgtaaacaagtgattgctatagttttgggattattatcacaagccaatcaaacccgcgaaaagcccctcatagcagaatggacaacagtcatgcttaatagcggaaatattaccaggatcatggatcctaacctccacggtgcttacaactctcgttctgtccaaacctttcttcagaaaaagatcaagtatgtcccaagttgttatcgaactaaaagagtgtcttactactaaaactctcgatgaaaggtaagaattaagtcacatactctcatagttcctttgaaataagcatgagctttgatacaaaagctgtgcctagtgcaaggtatcttattatataaagtatggttttcaaagttactaactcttaagatcgtggcacgtgtcaagtcaaacgatcagatgtttacaagttactaactcttaagatcgtgccacgtgtcaagtcaaacgatcagatgtttacatgtgtcattcaaaatttaattttttattctcttaagaaaatagaaaatcttaaaaaagtaaacaaatttacatatactaatttatatatctatatatttataaacaattaacatttattcaacaaaaggaaaattaacaaatttgtctttaactaatgtaatcataagtgaaaatagaacattttgagagaaatagcttagcttataagatttaacttttcaattatttttaatgagaatattttcatttattaattttaactcatttaatattaatttgcttgatgtaaaattaacttacgagattacggcatatataaaacatatattttcaacaatgtttggtttctaaatatttttgtagatttctatttttttattaattattagccctaggcgtttgggtattcgggtcgggtatttcgggttcgggttttcgggcttagaagtttagaacccgttcgggtaatttaagatttcgggtcgggttcggttcgggttcgagtttatttatatattgaaatatcaaattttgtctgcaaatctattaaattacttgaaaattttaaaaattcccaaaacaacacgagtagttttgcttgaatatatcttaaaatacacaaaaatatctaaaatatccaaaaaatcctaatattttctatatataagtataaatataactaatatatatttatatttgagatatgtttggatacttattcgggtttgggttcgggtttttcgggttttgaagtttagacctgttcgggtatttgaaaattttgggttcgggttcggatcgggttttttggatcggttcttcggttttgggtattatgcctaggcctattaattatgttttgttaattgttaattatttttaatactaactaggatatagatttgatgtcataaatattatattgatatgaaaatgttatcactcaatatgaagtgtgtagaatttaaatcgagtttattatgatgacatagatagttaaattgtattacaaaattgaatggtgtaagatagaaatttattttttctttttcttttctagatactaaattaaatatagaataatggtcgcttactttttagaattcaaatatcattgataagattgagtgtatataattaaaatagaatgcataagactgaaattttgtttaaaccaataattattaaattaaatatcaaaaaaatatatagattgctatacaatattcaaatactatcgataaaaatttatttttgtatcttatacccgcctaaacaggcgggccttatctagttgtatatatttgcaaagaagtcttgtttatgtggatgctgtacttgtgctttttgttttgttcttttgtgagacaagtgctccaatttttattactattgtgatctcgtaaatttgaatttattgtttcaaatttggtgttaccttccacatttttgggctacttcttctttagcctcaaaaaaagaaaaactaataatgttattcattagttaatcaactgccgcacaattgtaaatttggacctccgataagtattacacttgggaatcaaatcacatacctaatgtagaagttttaatgaaatcatggtcaaccactagaccaaggagacttccacaaatatttctgttatgtgacaaatagttgactatttttgtaaggaaatgaaagaaaggttaaattgtcatgttatatgccatattgacttttcctagatgctaataacctaaaaatggaaattaaaaaaaaaatctttacagtgtttcctttttcttgacttcttgacccaaacaaacagtcaaatcattcaaaactattagagattatattattgtacattttttaatgaattggtatgtctaaccaggctatgctcagcctgccagagtaggtcttgagtcgtcatactgcacaagacccaaacccttcatataagtttccggccatttagtattagagtgtgggattccaacctaaaaccaattggcaataggtggagaagtccatatcttatatataccacttaagatcctactcaacttccgatgtgggacattgtccctaatacgccccctcgagatgatggctcttctagccattgatttcgatatgtttgggcatggatcggcgggccaagtattgggccggaccgatgtggatcgggttgagtatgtgcggatcgggctttgataccatattagagtgtgggcttccaacctaaaaccaattggcaataggtggagaggcccatatcttatatataccacttaagatcctacgcaacttccgatgtgggacattgtccctaatatttagtggcatgacatgcgggttgtgtcatctttaattttttcttaaagaactcgatcgagttctctcaggtaactcaagtgtcgtaaaagttaatagtgtgggactagatcttatgctgaatattgttaatttgttctcatgatgacttagcacgtctttcaacttccgctgggaggccgttctcatgaaagattggagagtggagaccctgtctcaattgtttgctgagactgttaaactgtcacccacatgtcagttagtgataggtggatacaacattgcttccaatgaacattattttcttttgctaaaatgaaatttctgactagtggaaagcacataaaagcaaatttttgatatttgcaatatcgtcctgacctaaaacattttctagtgaccatgtgtttaaaaataatcaaagacaagttggatgataaaagaaaatttttaaagacaagttgaatatttttggccaagaaactagcaaatatttaaagacaagtcgaaaacatctttactcattcgtcaaattgaatttctttttgtagaaattaggacatctcctcacgatttcagaggattgacatgttaaggtgttttacttgagaagtccaaaggagttttgtggcctaattgcttataaacttcgtttatggttcaggaaattgggtcagtttttatttcgtttgggaaataagaaaatatgaacagttcccacgagcttttgttaactgcacttatagcaacttttgctatttttcaccttgttcaagctcaagaacaagaaggtaatcctcattttgatgttaggtttggcaccttagcatttctagtttttgttattgtcttacggcaaaagaaattaataaaattaacttccatgaagtggtgtagttaaactggaaatgtttctactttctactttctagggtgataagatcttagtagatgttggaatggttgtatgaattagagaaaaggaaaaaaattaatttcctcgaaacgaacactaatttttttgcgctaatagctttttaagttttaattaaatacctttttaacctgtataggacaattttatccgttattcataaatgaatattattagtatgcgaacatattatataatcagttgtgaatattcaatattgtataggacgattggtgaagtctgttgttgcattcctcccagatcaagtagccgatgtctaattttagggttgagagtcaaataatatgctatactgctcagccaaaacataatttgtcttgtttgttatcttaaagttactttcattttttttttttacactaaaatgttgtaaaaaaatataatattaatatgactattttcgatcgcctaatcgcataggcctagttttaatacattttctaatgttcacataagttttatctctatatacataattataaacgttcatatatcgtttgatataaattaagaaaaacagtttctttaaagttttgtttttgatataatattttttttttctaatagatattttctataaattttttatgtataatattatatttctaatgtttatgttatatgcctaatggctaaaattgccattaaccttttgccatatcttaacaggattcataagtttggattgtgggttagctccgactgagccgtccccttataccgagccggtaactacgttacagtactcatcggattcaaacttcatccaaagtgggaaacttggtagaattgatacaagtctacagacatttttcctaaagcaacaaacaacgttaagatactttccagacggaatacgcaattgttacaatcttacggtcaagcagggaaccaactatttgatcagagctaggttcacatatgggaattatgatggtcgtaatatgtctcctacctttgatctatacttgggccccaatttgtggaaaagaatagacatgacaaagttacaaaacaaagttagtacattggaggagattacatacattccattatcaaactctttggatgtgtgtcttgttaagacaaacacgaccattccatttatatcggccttagaattaaggcctttaccaagtaacagttatatcactacggccggttcattgaggacgttcgtgcggttttgtttcagcaattcagtggaagatatacggtaagcaagctttaagatactttcaatttgttcatttagttatacgggccacagctaatacaagattgtggcaacggcaggttcccgatggatgtccatgatagaatgtgggaatcatactttgatgacgactggacgcagatttccactagtcttacagtgaacacatccgatagttttcgtctgccacaggctgccctcataacggctgcaacacctgcgaaggatggtccatcatatataggtatcacgttttctacctcctctgaagaaaggtttttcatatacctccatttctccgaagttcaagctttacgtgccaacgagactagagaattcaacatttcgattaacggagaatctgttgccgacttgtatagacctgtatatctagttatctacagtccaagacggtaaacaacaaacttccaattatttgcgaaaatatggaatgcctcatagagttgtcaagaactcaaagctctacgcatccacctatgattaacgccattgaaattttccttgtttccgaacttctacagtctgaaacatacgagaatgatggtatgttagtgattagtgataatgaattgtatataatatatcatctgctaaatctaatatgtcgtctaactttatgacagtgattgctataaaaaaaatcaaagacacatatggattgcagctaatctcatggcaaggtgacccatgtgttcctcgactttataagtgggacggtcttgattgtacagacacagacacatatatagcaccaaggatcacttccttgtgagttgtttgcgtaaattgcgtaaatattttttctaacgatttatattatcctttgttttaatgttgtgtcttgacatacaaacagaaaattatcttcaaaggggttaacgggaaccatagcagctgatattcaatatctcacctctctagaaaagttgtaagtgtgataagtgttgcctcgaaggcttttgtgctcgggaatttcttttgacttttgatttcttccaaactacagggacttgtcagataacaagttggtgggagtagtgcctgaatttctagctaacatgaaatcactaatgttcatgtaagtttctcagatatttttggtcgtagtattccttaatataatgttcaccgtaccaatctatgaacatttcttctatatattttaatagaaacttgaccaagaatgatctgcatggttcaattccacaagcacttcgcgatagagaaaagaaaggactgaaaatcttgtaagaaggaactcaacttatgtttacaaattttaattcaaaacccttcaccttgtgcattcataatcaatgcttttgttatgtaggtttgatggtgataagaatgatccatgtttatctacctcttgtaacccaaagaagaaattttcggtcatgattgttgcaattgttgcttcgacagtcgtgtttgttctagtagtatcactagccctcttttttgggctcagaaagaaaaaaacgtcaagtcatgtgaaaggtatttgcggaaacttatcacacagaaaacaaaacaccacatattattaggtgtcattatcttactaattttgcattctacagctataccaccatcaccaactacgccattagagaatgttatgtccactagtatctctgagacatcgattgagatgaaaaggaaaaagtttagttattcagaagttatgaaaatgacaaacaacttccaaagagctctcggtgaaggagggtttggtaccgtatatcatggtgatctagatagttcacaacaagtagctgtcaaactactctcccaatcatcaacacaaggctataaagagttcaaggcagaggtatgcaatgctataaatcttcttaaaaatatgggaaacaagtatatatcttaataattatgtttcaccaatgtgttttgcttgtgtctattatatacattgttggccaggtcgatctccttctaagggttcaccacataaatttgttaaacctggtcggttattgcgatgaacgagatcacttggctcttatctacgaatacatgtcgaatggagacctaaaacaccatttgtcaggtgaatattgatgatagcatttgcattttaaactttaagttattacgacaaataactcaaatgaagactcactttggtggtcaaattcaggagaacatggtggctctgtcttgagttggaatatacgactacgaatagctgtcgatgccgcactaggtttgtcctaattcagaaccatttaattacattctctttttcatggcaaacatttccaatcatcattgtacattaatgattcaatataaatttcttaactcacaagttagctcatgacacattaaaactcgttcgtataactctcaacctcaatttagctccatcacataactcatttgttaaatgatccttaaaaaaaacatagctcaacccatgaaaactcgagctgagatgagccggctcatgaactaatgactcattttgaaacctatatacttgtaatattacttaaaccaagttatacaaccgtctaagatcttttggacgttttttagtattttgaaaattgcaaaatatatttgttaccaaacaaatagccgatcataagaccagtcaattgttcgtttgattcaaagaataacattatttcggaagatgaagaagcttgaaagcttttagttcttattcaataaaagtatgccttctcgaaaacacgaaggaggctataaataacgacctaataaagaaaaccctaaagtgtttggaaaaaaataaaaacccaacacgaaacttaaatcccaagaaaaaaataaaaacccaacatcaaaaatcatggtacattagcgataatgaccatacaaatagttcaaactttaagataactggaatatcttaattctacaaggttttcatattcttatgataatcttagagatcatatacataaaaggcacaattacgatatttatgtagggttggaatacttacatattggatgtcgaccatcaatggtgcatagagatgtaaaaagtacaaatatactgttggacgagaatttcatggcaaaaattgctgattttggactttcaagatctttcatactcggaggtgaatctcatgtgtcgactgttgttgctggttcacttggatatcttgatcccgagtaagtatttgtgttcacttttggatgtgaatgtttcattaatataaccggtgttctcacgccaacgtctagactactgtggcagtgaacttcacctcaccacaacttgcgtgctgaaatttgtttccacattatcttagttgatatatacaatatgaaaattaatccattttcttgccttcccagatattacagaacaagtcgattggctgagatgagcgatgtgtacagttttgggattgtgttattggagataatcacaaaccaacgtgtgattgacaaaacccgtgaaaagccccacataacagaatggacggcatttatgcttaatagaggagatattaccagaatcatggatcctaaccttaacggtgattacaactcccattcagtctggagagctcttgaattggcaatgtcatgtgcaaatccttcgtcagaaaatagaccaagcatgtcccaggttgttgctgaactgaaagagtgtcttatttctgaaaactcgctgagaagtaagaatcaagatatgagctcacaaagatccttggacatgagcatgaactttgataccaaggatgtcccaagtgcaaggtagctaggctatgcatctttacttgtgatatagttacttggtgagaggggtgcttcaatttttgttttgagatatcttaactaaataaaagacatatgtagtaatctttttatcttgcaatttgtcttttatttgaacttgttgttttggaatttgctcagttacaagccagattcttaggctaattcttcttgggaacaaaatcagagccaataaatgactattgctatagtagcaacaaagtaagtaatttgtccctggttgattttgtgcatgatgaacaagtgggaccgcaagctggtgcgataatcacacaaacttgataaattaaagaaattatcagaaagatagacagaaggagatttgtagacctaatttcttgtttcataaacaatttcttgtgaaattttataccatttttgtttttgacaaaattacaaagaagaatagaagcagagcaaaggaatctacagaaaattaaagaacaacattacaactctacttgtaaaggatcgcggctgagtgatcaaggccaagttaggaggagaaacaccgattctgagtccacgaagctcggaaatttgcgttgttgccgcagtaccgaagcattggaatcttcatcctagttgccacgagcatgactatccaaggtccgtccacaagacctcaaacatagaagcctatagcttctccaagaattaacgcaaaaacgaacaagcaaacatgggctaatacactagctcaacgagaagtgatgccactaagacctattaaccgcctctattcacctcaactaaccttgccaatgcaccaagaagctaactattcacaacaagaacagaaactaacaacaccttaacaacaaaactcgaccttagaacaaccggagatgatgcgtcagggacaaagacaaaaggacatggagaagccatgaccattgctgaagaagctaccacccttaacagcccaccaaaggaggagacacattgaccaccataaaacagaaaccccaatgcctctgatcacaacgaacaaacctaatgagaaaaattgaccccaaggtttgcctccaaaggggaagcccgccggatccagacacaacaccaccggagtttgggaaaaataaggaagagagacccgagaagagaagaccgtctcaccatatgcttaccggagaacccaacacacaagagggacacaacgatatctgaagaatcacggtgatgcaccaccacaatctcagatcgagtgaaagatcccgccgctaggagaaaaccgctgcaatagacgcctcaccgaagccacaaccataaccgaagagagacacgccgcacgaggacagatctgtagccaagctcaccggagaaggatcctgaaacagcaccgtcaacaagcaccaaattcaagagctcaccggaaaaatcaggcgaactgtcccttgcgtcgagcgtagcgagacctctcgacgcttcaccaccatgctagccaagggttggaaaccaccgaattgctagtcatgtggtatacttactacgaaaggatgcgagtaagacacctaacttgtcggagaagttacaactcttatcaacggtaatgtagagtagttacgtgaacatgtatataagtgtgtgacttgtcttaataaaataacaagtttcagtttaatatcgctctctcgtgtctctctcattctcgcccatgtcttttttattagttagttaagaaacagaacactagttatatgttctccttctcttgcaacaagtgaaacacctgttgtcagattcatctaagctgacttcaaattccatatgagaactcattgaacttggtactatcagagtgattgtaaattttatagaaaattctggaaatctgaggaattggttccataaacatgatatagatagagtacctaattaatacgaacaaggatactcacaagtatccaccgtggaactcgaatggtttaaattttgcaacaaggtttattagtgttatgagttttttttttttttttttacgacaattatggggttagtgctttaaatgggggtttgcataattttaagaatgtttagtgactaaaagttttacattatgaattttattgacgcactcgaaaattctgaaattattaagagtagcctcatatagatttacgtaattaattggatgcatttagaatttgttttgaaaactttttgaatttacgatcttagaacgaactttatatatacctcgcttcaaacgctggttcaattgccagctaaggcaccgtctcaaatcactgctgcagtcaccgtctgaccgtatcggtctcactctggcgaatcaaaagcttcagcgtcgtcaaagctgttaacatttccttttcttaggcctaaatggttaattcaaatcaattttaatgaattcaaagttttatttggaaagttagcaaaatattggattttgtttgactttctatcattgtttataaagtgtattttatatattttaggccgttgctcgcttgcagaggcgactataaggccaatcatgcaaaaaatacgtttatggccgctaataattatataattttggcaaattctaatgtaaacatcttgtgccctagtatataaaactttagttattgtgtcattgttttctattgttttaggttagtgagtaaaaagaagaacgaagattgtaacacgtatcgtgaaattcagaacagtagaaagtgatcgacatcacgtaactcgtacgttgaacatgaagtcatgcatcattataaagtcgtatacattttttttttccttgtgtttatatttttttgggatttgcaaaattattctttttatattattttttgtaataatattcttatttattgtctatttttaaaaatactatttttcttgaataaaatgaccaaattaccttgattcaatgataacatgtaattaaaaactaaaactttttcactaaatgcatttaaaatcattttaaaacttttaacaatgaccaaccaaaaaatgcatttaaatattcttgtaaattttttaaaaagctttgtaaagttgtaaaacaccttttaaaatcattttaaaactttttaaaatctttataaattttttaaatacatataaacactttaaaaacctttgtaaatcattttaaaaccttttacaatggttttaaaagatttacaagaggttttaaaagattttaaaaatctttttaaaactcttataaagtttttatatcattttctaactctaaaaaattattaatattttaaaactcttatgaacccttacaaaaggtttttcaaaaatttacaagagtttttaaagattttaaaatcctcgtaaatcatttaaaaagtcttgtaaatcctttaaacccattgtaaaccatttaaaaatcttttagaaaatcttgaaaaccgtttaataatttttgaaccattttaaaactcttgtcaaccccttacaaaagggtttaaaaatacttatcagagttttaaaactcttgtaaatctttgaaatacccttgtaaatcctttaatacccttgtaaaccatttaaagttttttaaaaaacccatgtaaaccctgtaataattttgaactattttaaaactcttatgaacctttacataaggttttaaaaacatttacaagagattttaaagggtttgaaaactcttgtaaacctttaaaaaaacttttaaaaacccttgtaaatcctttaaaacccttgtgaaccatttaaaaatcttataaaaactattgcaaaccctttaataatttttgaaccattttcaaactcttgtgaacctttacaaaaagttttaaaacgatttacaagagtttataaagggttttaaaacccttgcaaattctttaaaaatctttttaaaatcccttttaaatcatttaaaactcttgtaaataaatttcctaccaaaacttatctgccaaattgctttttttcaaaaacatttttccacaaaaaaaaagaaaattgttaggaaaatgttttttgccggaaaattttgtgtaggaaactttttgtgggaaatttattttcgaaatattgtagacccgaaaaatcaatatttcattttgttaacctataacattttctaaatatgggtaaaatgatcattaaaaattaaaagagggtataaatgaaaatgacaaactggaaacggcatgattgaaaaaagaaagtgttgaaatgatattcttagcaattattctattttttctgagggtcggataatttgtagaaaattctaagaattatgccaaatattgttcattttttatggtagcaaatgccacttgtttttgctttctaaggtaccacaacctacaacccatcataaaatgaccgatttacccttcaccaatatcatatatgtatataacaaatacaaaaattaattatatatagaaaaatatcactcgatatgctcagaagacttgataattaactctcttcaattttcattgttccatcactactgttaacttttttttacgtatgtacccctataatatcaatttattcaattatagattgtaaagtgatattattgcatacggtaggagaagattttatgtagatattgttttgggagttgtattttttttatttatgttttttttttctttcccacctagcgatcagtcatcttttttgatcctatgaagaagaaaggttatcgcgatactaaatgttatcagaacgtgttcgtagttttgattcttattgtaaaacacaaatgaacaacatgtggcatcgtcgttatcgcgatactaatgttatcagaatgtgttcctaattttgattcttgttctaaaacacaaatgaacaacatgtggcatcgtcgttattattttaattatctgctagtagttgtatcgactaacattgttaccatttaaactcgtagtctattgtttgtgaacttttttaaaaacgttaactaaaatgatatagtatttagccgaaacgagattatcctgatactaatggtagcggatagaagcttatcgcgatacgggttgttaccaaaaagtgtttattagttttgattctttgtgtaaaacagaagaagacaacttgtggtatcgtcgttattatttttcttatctaatagaagttatatcgactaacattgttaccatttaaattcataggctattgtttgcggattagttataaaaagctacaaacaaatatgctcgcgtttaggggataagagattttcgtgatttattattataacgtgttactagctttgattcttgttgtaaaacacaaagggacaacatgtggcatcgtagttattatcttaattatctactagtagttatatcgactaatattgttactatttaaactcgtagtctattgattgtggactttctttataaagttaacggaaatatcatcgtgtttagtagatacgagattatcgcgagaccacatagtttctatttaaactcatggtttattgtttgaggattatttttaaaggccatacatatcaataatgattacaatatctttatatttttaatgtcggcgggagatatcttccaggatatctttaccatgcaacatctatgctataactatattttggttttataggggaattttcgtcagaaattatgttggagaaaagagatgattaattactcagttttaataataaaaataattttaaagttttttttgaattttttgttggtcaacgccggagtcaattaatcgatttaccggaattgtatgtcaatcgtgttaaccacatgacgttgtatagtttatatatgtggccatacaatatatttatttcatgtagctgagtatacaatagtgtagttgaaatgtgtgaatatgcattctcctatacttcatgtagttagcaaactttttttctagatattaatatagctcaaaatatatatatgtatatataatatgtctcacacatggcccatatcgtgacaagttctatagtaactatttacacttattttcctttttatttttgagcaatattatttttcttttgggcctattcaagtggttgactagtaatcaacgagaaatagttacatatatgttgcccacaaatagtagttacaaaaaagtgtctgcgaagatcattttgtgtgagtgactatgaacaaattgtccatgagcaataattgtagacaaattgtctacaatgttcatttgtaggctagatgtctaagattaatagttagggtaatattaatagatagccaaataaaacatacaaattaagaaagtagcagagagaaagttttatgttgcaaaataaccatagacccacgttgtcggaagaaatgaaataacaaagctacccttcatttgttgtaagatgaacagtaaacgaaacacatctgtgtaatttttcaaaatagcatgtaacattaaaattttacatgttatatttagtttaaaaacatgctatttcaaaaaacgtcatgaatgtttaagaaaaaacattgttatgaaatttttttacatgaacagaatcttaaaaaaaaaaattatatgtgattttaataaaaaccatgtattactaaaaaataagaatatatttttaaagaaatcacgtgtgatcttaataaaaaacgtgtattactagaaaatatcatgataagaaaatatattaaactgaatagaatgttttttccaaaaaataccatgtgtttttatgagtactatataataagagaaaataacaagataaaaagaggatattatgttatcgcatgtatttcagaaaaaaccatgttacaaagaatatttatgtaataacatgtgttctccaacatatttccgataaggtattgtgactcaaggttattttgtacattctttttgaatccatagtcatttattataaattctctagtagttattgataagtttaccacaagtggataagttgtagacttgtagcctcgtaggcaacaccgaggactagtggacaagttattcaccacatatcttctcagtatgttgtttcgacaatggacaacacttcaagtccgccaaatttattttcaatatgttgtttcgaatatagacaataatgacatattgtatacgagtagcaattgtagactaattatctacgaatattagttgtccaccgtaaatgcaacccaacatgtcctcaaatattttcttaaaaactaatactacaattatataaagcaaaaaggcatcaacgaggagaatgacataatgtcgagggtatttttgtcttcttatacaattcttaaaattatgtttggcatattaaaaaggagaatcaatttggcatgtgatattttccgcaaatgttacgttgtagttaaagttgcattttaaaccaaatttcctaatttgtatctaaatccgaaaccttttggagactatttcatcatttgactttgcttacatgaaatgatgcaaactattggagtacctactgacccaagggcttctgacacctttttgaacgacttaaatatcggaaccataagtcaatgaccaatagaacggccacttccgtctctctttcttataatttcttcacccgtcaagttgataagttctttaaataaacaagacaagttgaatatttctgaccaaaagaataacaaatagaaagtgttgccaactaaaaaccgtatttttctcatttgtgaactgactttcctttgtagtacaaaaacatgttctcacgttttcacatttccgagacgtgacttggtaagctctttttcttgaaatgtccaaatgagttttgtgcggacaatgcttataaactccggttagggttcatatttttcttgtgaatttaagaaaatatggagagtcatcataggtttttgttggtggtactgatattagtttcctctaatattcaccgtgttcaagctcaagcaggtacccacactagcttttatgttcagcatataggattttgatatgccgtttgaaatgaaggaaatatgaatgacccattttttttttcttgatgagctggttttatttattttaaccgtgtttgtatttgaatgttttgaagttgtttaaaaagaattattattgcacctatcttcattttcattttgaaacacttcaaattaagttacgtctgtctgggtttaagttttttttaaaaaggatatgaacaatacgaaatcaaataaaacataaacggttaattcgatggactgaaataaccaccgcgagtatcaaaaccgaacaaaacaaactagttatacttgtaatatggcaaatatagtttatattaataagagtgttttcacgcccgatccagaaatcgtgcggtccgatcggttaacccgcgatccggacacctctccatggtttagtgttaacatcttgtaattttaataccaaaaaacaaccacaaaaatctgccattaactcgtgatctggtgaaccggttcaaccgaccgggtttgaatttaacaaaattcatttaattttttgttttttggaataaaatataggagtttagtgtattcaatgttcagttattttaagaactttttctagttcttccttttctcaatcatcatgaagacactaatccttaaaagttaaatggtatcaacaacttaagagctagattgttttacaattaaactactttcgtttttaatttgaaatattagatatttcgataataatatctacaaatttactccatataatttaaggaaatttatcatagtgacctatattttgtgttttattactagaatgacatgccaaaaatatgggttatatgtgtaatatttatgtctaaaatgcccttgttttgctttgtagaataaaataatattataagaatgccattaataaaaacatttatttttaaaaaaactaaaatttatttacgatattgctactctgtctttttactagattttgataaatttgttgctctggttgcgacaattttgttttggaccacatattttttggtccaccatagattttgtttgacaggcttttttgtaccacaaacttctttgaatatttgaagcatcttgatgattttttttcgggacagatttgttttatgtagtctccctagattttttttctaaaactttaatatcttgaatggttgtgtaagatacctgccacatatttgtttttgagcagcaatttttttattgtgttggcaacatcttgttttatttaaacaaaaaaataccgtttaataaaaaaaaataaaccaaagaaatgatttataatgaggatagatttgttttatgtaatcacatactttataaactagtctataaatctggcattttcgattcacataatgaataacagatttgtttttaatcatgctatttatatttttcggatccaaagcataacatattttctcatatcatattatgcccgatttaattatgactagaataatttttttagtgatgacggacttttcgttagcagatttgtttttaaaattttgatacatctagtttcatgagacttattatatagcctctagtaaaactaaagtacaacacaactccaaatcttaccgttttgattgtatgtttacactagtttgattgcatttggttacgacacatttttactagatccaacagatttgttaagtttaaatatcaaaattctttatttatttatttaaaaggaatttaattaaaaacgtgattaaaagttagttagtctttctacataaaattcgggtttgtattatagttatttacttggattaggagtcatttgtcatttatgctaagattttagtcaatctggataaatctcaatactcctatctagaagtttatctagtaatactagaagtttgaccttgaatttatgagttcaatgggttgaacctggtcgctggtttaatggtatctctctttttccttttgagatagaagaaaagagacgagaaaaaatttgataccatcagttctgattttttcattttatttttggtttaattactattaacctttttatttatctctttaaacagggttcatcagttttgattgtgggttatcgccggatgaacagtctccttataatgaggaaactggattacagttcttatcagattcaagtgtcatccaaagtggacaaattggtaaaattgatgcaagtgtggagtggaagtacccaaagtcacagacaacgttgagatactttccagacggaatgcgaaactgttacaatcttagtgtgcataaagaaacaaagtatttgattagggttacaagtaactatggaaattacgatggtcgtaacgaacctcctagatttgatttgtacttaggccctaacttctgggtaacaatagatttggggaagcatgtaaatggtgatacatggaaggagattattcatatcccaaagtcaaactctctagatgtgtgtcttatcaaaacaggtacaacaacgccaattatatcgaccttggaactaaggtctctaccaaagtatagttacaacgcaatatcaggttctttgaagtcgacactgagggcattcctaagcgaatcaacagaagttataaggtacgtcaccattaaattgatattaaggttttttgactcgttccatcgtccattgttaataatacaagattgtgttgaagctcaggtacccaaatgatttctacgatcggatgtgggttccacattttgagacggaatggaagcaaatttctaccaatctcaaagtgaacagctccaatggttatcttctgccacaggatgtgctcatgaccgccgcaatacctgtgaatactagtgcacgattgagttttaccgagaatcttgagttccctcatgatgaactttacctgtacttccacttctctgaggtccaagtcttacaggccaaccagagtagagagttcagcattttgtggaacggaatggttatttacccagattttatccctgactatcttggtgccgccactgtgtacaacccgtcaccatctctttgtgaagtagggaaatgcttattagagcttgaaagaactcagaaatcaactctcccgcctctccttaacgccattgaagttttcacagtgatgaattttccacagtctgagacaaacgatgatgatggtactttttttcttcttcttaatggtagttaagtattgtatggggaatgtggtctaaatccaattaacctgtttgtcgggaaattttatgacagtaattgctataacaaagatcaaagacacacacagattgaatagaacctcctggcaaggagatccatgcgtccctcaactgttttcgtgggccggtctaagttgcattgacacgaatgtatctaccccaccaagaatcatttccctgtaagacctctataacacaatcactctttagacttgtgagaaaaacttgtctaactaaacttatacttgtttatttttcttcttgtttggacttatacacagaaacttgtcttcaagtgggttaacaggaaacatagcaactggaattcaaaatctgaccaaactgcaaaagctgtaagtatgaccatttaaagaaaaatgttatatacgtccgttacctttcttattgatttcttacaaacttcagggacttgtcaaataacaatttgacaggagtagtgcccgaatttctagctaacatgaaatcgttgctgttcatgtaagtttcccaaaaggttttggtggtttttttcccatggatcatcttcacctaagtatgtagatttctctggttttaacagagacttgaggaagaacaaactgaatggttcaataccaaagactctacttgatagaaaaaagaaaggactacaattattgtaagaaggaaattcatccacgcacattttaattcaagatccattgccttgttaaattcatcaaaacactaaaagatcgatatattatttttgtagtgttgatggcgatgatgataagggcgatgataataagtgtttatccggttcatgtgtcccaaaaatgaaattcccattgatgattgttgcattagcggtttctgcggttgtggtcattgcagtggtaatgattctcatttttctgttcagaaagaaaaagaaatcaagtttaggtatttgcatagactcaccaaatattaactaacaaactatacaatataaattaaaatgtcactgatattgttgtttctctacatatatctatccccttttcttgttatgccacaaataggtattacgtcagctgctatatctgaagaatcgattgagacgaaaaggagaaggtttacctattctgaagttgtggaaatgacaaaaaacttccaaaaaactctaggtgaaggagggttcggaaccgtgtattatggtaatttgaatggttcagagcaagtagcggttaaagtactctcgcaatcatcatcacagggctataaacacttcaaggcagaggtatgatatgccataaatcgtctatagaatcgcacaaaatttaaaagaaatcatgatctatatagatatatatttagcatcacgttaagcaaacatattttgtcattgttggtctataggtcgaacttcttttaagagttcaccacataaatttggtgagtcttgttggatattgcgatgaaagaaatcacttggccctcatctacgaatgcatgtccaatggagacttaaaagatcatttgtcaggtgaaagatgtatatatgcaaatataaatatatatatatatatatatatatatatatatatatatatatattatataaaattcataggacggttaattttgacaatctaatacaggaaaaaagggtaacgctgttttgaaatggagtactagactacgaatagctgtcgatgctgcgctaggttcgtactaactcaaaacagttccagtgacttgtcattttatatcaattagttactaattgtatgcatttgatacatctgttacaaacttctcatgatgaattatttccatcaatttttactcactggaatttctgacatgatcaactaacaacatgaatgagtctcctgcacaggattggaatacttgcattatggatgtcgaccatcgatagtgcatagagatgtcaaaagtaccaatatactgctggatgatcagctcatggccaaaattgctgattttgggctttcaagatcattcaaactcggagaagaatcacaggcttccacggttgttgctggtactcttggataccttgatcccgagtaagtactattagttcactcccatgataaatatgtgtgtaatttatgtctacattcatcttcatcgtttatatagaggtatacatataaatcctacttcatctctttgttttccagatattatagaacatgtcggttggctgagatgagtgatgtatacagtttcggtattttactactagagataatcacaaaccaaaatgtgattgaccatgcccgcgaaaaggctcacattacagaatgggtaggacttgtgcttaagggaggagatgttactaggattgttgatcctaaccttgacggtgaatataactctcgttcagtttggagagctcttgaattggctatgtcatgcgccaacccttcttcagaacatcgaccaatcatgtcccaggttgttatcgatctaaaagagtgtttaaatactgaaaactcaatgaaaataaagaaaaatgacacggacaatgatggttctctggaactgagctcgagtgatactgaggcggtcccttgtgcaaggtagtatttacatagacgctttgcctacgttgatgtgtttctgttggaagtgatcaagtcatgcatcatcttactttattgttttagaagagtcatatattatatagttaagtaactgattaatgtatattcgtatcacacatcgaagagatacgaatataattgttaactacaaaacaattacatgtgtgtatgtgtctctacattacgttgtcttctagagacgtgttccttagtgaaagtgtgtcatataaacctataaatacagtttgtatatctaataaaagtgtgtggttttcgttttataaaaacaaagtgaaatatagagtaagacaaaacagagtaaaatctgtgttgaccgatccttaacaactttgagagttcaaagttctacatggtatcagagctatggagacaacaatgcagcaagttattccaatcttcaatggtgaatcgtatggcttttgaaaaatcaagatgataaccatcttgaaaacaaggaagttgtgggatgttatcgaaaatggaattacgttgagttcgtcgtctgaaaactcaccaacgttaactagagagcgtgatgatcaagtgatgaaggatatgatgactcttcagattcttcaaagtgcagtttctaattcaatatttccgagaatcgctccggcgtcaagcgcaagagaagcttggaacgctttggaaatggagttcaaaggaagttcacaagtaaagatgattaatcttcagaccttgagaagagaatatgagaatctgaagatggaggagagtgaaaacataaatgatttcacaaccaaattgattaatatgagtaatcaactaaaagttcatggtgaagagaagaccgattaccaattggtttaaaaggtttttatctccttgccgcaacagtttgatagcatcgttgcggtccttgaacaaacaaaggatctatcaactctctctatgaccgagatgataggtactttgaaagcgcggagaagcgcttgagtctccgagaagaatgtatcaatgagggtgcgttttatggagaaaagcttggctcaagaggagaaaacaagcaaaacaaaaatcgccatgggaagaccaacatgtggtgtggcgtgtgtaagaagaacaatcacaatgaggtagattgtttcagaaagcatttcacaaagaggtggaagctatgaaagaagatgctatgtgtgcgacaagcctggacacatagccagagattgcaaacttagaaaaggtgaaagagaacatctaagtattgaagaatcaaaagatgaagaagaagatgagtgtcatatgctctttagtgttgttgaagaaaaagagatctcaacaattggagaagaaacgtggttggtagatagcggatgcaccaatcacatgtctaaagatgttagacacttcatcactttggatcgcaacaataaaattaccataaggattggtaatggtggaaaggtcatgtctgaaggcagaggaggtataagagtatccacaaacaaagaagatcatgtcatcaaagatgtattttatgtacccgaactagcaagaaatttgcttagtgtctctcaaatgatatccgtttgagtcatctttgaagataacaagtgtgtgattcaagatttaaaaggaaggaagatcttggacatcaagatgaaggatagaagtttttccaattcgttggaaaaaatcaaaagaagaagcgtatgtggctttcgaaggaaaagaagaacaaggaggagggaatgatctaaacgctcaaatagatcaaaatttggagggagcaatggatgacgtgaagtggatagaagacatgagagaagagctgatgatgatagaaaagaacaagtcgtggcaagctgtggagagaccaagcaattggagcagatcagttgaggacaagaaaagtacaagtggctatgtctttactcctggatttgttggaattctaacaagcagaagaacgttgctcaatcaacgaaagaggcggagctcttaaacacatcacggttcgaagttctacgagaagagctagatgtaatgatgaagccatgatcaaggaggagtgttggaagtgatcaagtcatcatcttactttattgttttagaagagtcatatattatatagttaagtaactgattaatgtatattcgtatcacacatcgaagagatacgaatataattgttaactacaaaacagttacatgtgtgtatgtgtctctacattatgttgtcttctagagacgtgtctcttagtgaaagtgtgtcatgtaaactataaatatagtttgtatatctaatagaagtgtgtggttttcgttttacaaaaacagagtgaaatatagagtaagacaaaacagagtaaaatttgtgttgtccgatccttaacaactttgagagttcaaagttctatataagatatgagcctctccacctattgtcaattagttttaggttggaagctcacagtctaatatggtattagatcccaatctgcacatactcaacccaatccacatcggtccgacccaatatttggcccgtcgatccatgcccaaacatatagagatcaatagctggaagagccatcatctcgagtgagtgtattagggatattatctcacattaaaaattgagtaggatcttaagtgatatatataagatatgaacctctccactcattgtcaattggttttaggttagaagcccagacaaagtgttacacaatctggtagaataactagagaacatgagggaaatttaaaatttcgttgctctcagaaaccatcaaaatttgatgttttaatttaaaattttcagaaatttagggaactggctcaagaatatcttgcacatattagattaaagtacatgataaacaattataaaaaaagtatttcttaatgatgtggacgtcttcgcgggggacaacaccctgtttgcaaacgtaagatacaaattaatatttatttacgaactcataaataataagattgttgctgttttgagcgaatgaagaaacaaaacaagagataaaaattatctcttctcttttgaataagacaagaacgaaaataactttttattgaatctgaaacttgttagtaattacatgactatacaatgagtttaataagaaacaaacagatacaacaacacagtgagttgtgtctctgcatacttgtgtttcttgacaaatacataaaaccttaatataattagaaattcaattatgagaaatttgcataaataactaacaaaaacttattatttaagaaagtaacatcaaacaaaaaaaaagttgatatgttatgtattttctgtattaatgacaattttgccctctaaactacatacaccttttattttcctcttctctatctattgcatatcacgttgtctctttcattagattctccattcttcatgtgacacaaaatgctagattctctaacctcacgaaaggtctctcttcctgttaaactcttttctttgcaacccgttgaaaacactaaatctatttataacacaatatttgagtttgtaaattattagtattttgctctcgttatttatttgttgatatgtgggttcttttttctctctctctctacctagtaatctcattatatatatataaataaaataaaaaactaactataattacattactaacaagtaacaattattattacactactatctccaccgccatcgtcaccgtcttccccaccagtaccttcaccactaccgtcattgccgataccatcgtcatctcactactaacaattagtattaccacatcaacgtcaccattagtgccacagccaccactaccatcgtcatcgttaccaccactattactactgtcaacgtcaccgctacggtttacttcagttatttggattgccaatgttgtatctattagggtatagtatttttttgtcacaatgatttaactcgatcttttggattgtctacgtatagttaatactatgagaatatgtactagataactatgaaatcgataatattatacaaactaattatgagctacagtaacatgtcggagagatagagaaaataacatatgtaacctccattcaatttttctctcttttgtttatctttctctcaccatcattattaaacctcaaacttgatctttccaccatggcaccatcatcatcaacaccaccctcaactccaccgtcagtacgatctttgtttcctctgacattgcaatagaactctatagaaaaaatttactaatccttttagtcatttagaattctcaattttcttccacctccattgatttcaagagccacatgtctttttctactcttgcatatctctttcacttccatatcctcttatttctctctgatttcgatattctttgtaacccatcgtcatgttctacaattaccacacgaacctgtgactcataaattcgtttcttagatccaaaatctgtatgaaaaatacaagtagtatttttggaaatcatgctaataaaacaaatatctatatatttatcaatatttcgtgagatctaacaaaatctcatgtattttaagtaattttcatgttatttaacaaaatacatatacttttcttttagatacatgttattttcacttaaaaccgtgtttctttagaattgtcatattctatatcaattctattaaccaaaaatagattgaaaaatacaagtagtatttttgaaaaacatgttattaaaacaaatatctatatatttatcaacatttcacaagattcaacagagttacatgtatttttacgtaatcacatgtaatttttaaaattctcatgttttttttgttttttcttgatctccaccactagagatcttttatctttggtttgatcttctccatcaccacttcctctgcaaccatcatcatcatatagagttatcaacatcaatcaccaccgcctttaccaaatttgttataacattcggttcttcattacggccacctccgtaacctcatcgtcactttcattcgaatcacttccaccatggtatctatttttgctcccctaatctttcaccaccattgcttcctctgaaaccaccatcatttctataccacattcatcatggttctaagaccattgtaccgctttcaccatcggagctaatttttcttcaccgaatctttacaccaacttacaaagcaaatatatcattttataaaaactataatttcagaaggttaattggtcttttactcacccctaccccaccataaaaagagtcatttacccaacatttctgacatatagttattttcttaattatgatgtcaaatttggctatctactaataacaccctaatattatttagttttattctatactattttatttgtatgttttagataaatattattcacttttttagataatttgtattagattttaaaattttaaatcatgttatactcagaaaaaaatctatgtttttataaaactattgcaagatttaatcagttatttttttaagtttaattcaacaagcaaaatcatttggggtaatattagtttggccatatcatcactattttctctcttcttctacacatgtcactacgtactctttctttttccactgcacgtgtctttcactgctgtacaattttttgtcttttcactaatccaatatattactttcttaatatttttgaataaaatactatattcttaattatatattggattttgattagttttgcaattcacccttcaattatctaccaacaaaaattgcctcctaactctaaatgtaaaaaaaaaaaattggcttcaaaaacgaataatacatgatcactagattttaacccgcggtataccgcgggacgatttattttttaaaaataatatatattaaaatttgcaaattttatttttataaaatatttatattttacagtttataattgttattaagtaaggctataccacgaatctatgagacaattgttaaaaaactgaagttgtaacccctattaaaacaacatattaataatattttaaaattttataaatattgattcaaatacatccaccatataacccaattccaaaataaaacccgttctataatttctttacccgtcccgtgattttttttttaaagtactaatttttaaaatttaagaattattttttatagataaaagttttgcaaattatatcattctctaatacatttatattttatatatggtaacattatacataccacataacatttttggttttatataatcttttctaaattaagatgatttgatatgtttaatattagtggtcttaaaaaataataaattaaagatttaacccgtattgaaacggtgtattaattatattttacttttttattaatgttgattcaaaaacccgtcactccaaatctatcttgccaaaaagccatttattttattaatattaattttattaatgatatgattctgaattataatctaaatattttagctaataacataggagtataccatttttatttaataggggaatgtaccatatgaaccgaatgcacttttacccaaatccaccaaaaaagtcttgtaaaaatactatagagataagaaacgatagtcggttttgataggtataagattagcaaatatattagttagcttaaattagttaaagaatacaaattaaaaatatatattatactttattcgaatatagtatcaaaacttatataacacagagatttgataaaattttaattgttgaatacttttttttgtgctaatttttatgtgattaagatttaatttaagatttaattgattttgtatataaaatattaaaagtaaactgtgagttgtatatgttttgttgatattatctatattttttagtgtttaagattatacacttgtagtttgattgttaatttaagagtttcacatgtagtataccatcttgtattaatatcgatctaaacccgtcaattctaggatttttcagcttgcattaaaaattgaatcacatcatacacataaaaaaatctaatatattattaattattgtattatataagattataaattttcaatataatatgtatgaaattgaatataaatatttcaaattatgacccgttactcagtagaaagttttcttaaatctatttttcacccgttataatattttttcatgtattgaacagtttatattcgttttcaaaaattcaaattatggcatatgcgaaaaaactctaattatttttttataatgatgatattatttttcgcaaaaatagaatcatatatagatgagaagtgaactataataattaataaaaaattaatatgataatttagatatcaaatctaatttgttgattttaataggttacttttttggaaattaataatgtatttcgtttttctaattaaattaaattaattaaaatttagatatcaaatcttatatgttgattttgattggttattatttttgaaaattaataatgtatttcgttttttaattaaattagtaattgactttttaatctttaaagagataaattaatttactctttaaaattttatttctaatgacatacttatgtaattacttacaaaaattaaggttatatttaaaatgtacttcccaaataatatagtaggatgaataatccatttttttccatgtcaacatttcttcacctctcgtgttagttagtagttccgtactattgtagaccacttggatatcatacttcacgtataactaacaataaaaaaaaggcttattgtccactaaaaacgtacttaatccttaaattctttttgcgtcttagttacagcgatgctagtaacggtgactagtctactttatttgctattgcggtttggtgtggatggaagtggcggtgcagcaatgttttcggggataacaggaaatgcagtgatagggtgctttttatcaaggatgtagctgcggaggtttcgttagctaccacgagagaaggaactaaggccgtcgactactcgagttaatatgcagatccgttggatggctcctatagagggttggtacaaaatgaacacagatggcgcctctcgcgggaacccaggtgtagcgtctgcgggtggggtgctacggaatagcgcgggagaatggtgtgggggatttgcggttcatattgggaggtgttcggcgccattagcggagttgtggggtgtgtactatgggttgtatatggcctgggccaaacaacttacgcacttggagttggaagtggattcggaggtggtcgtaagcttcctcaaggcagggataggtgagactcatcccttgtctttcctggtacgtttgtgccaaggctttttattaaaggactggcaagtccgtatttctcacgtatatcgggaagctaacagtctagctgacgggttagctaaccatgcgttctctttgtcgttgggtcttcatgtttttgatgaggttccgatttctgtagtcacgctgtttagcaaggataataacgggcctgcgcgcctaagacaacttcgtttgtaattttttctatttagttcttaataaaatccggggattttccccggtgattcaccaaaaaaaaaaaaagtaacggtgatgacaattttgatttcaaaatatttgggtttttttttctctcccattttaccactttttcatattcatattacattgtgtagaaattattcatatgagcgtttgctaatattttcaggactggtcgagcgattcactgccaaaattgtgaattttgtgcttacaagatcttcccaactcggaaatgaatctcatatttcaacgattgttgctggtactcctagataccttttgataccgagtaagaattttaaattaacaagtggaatcttttagtcgatgctatactatcctagatgtgaacttcaccatgccatgccatgttgaaatttgtgtccatattcatattagttggtaaaataatgggcacatgaatcatactacatattattgtcttgccagatattacagaacggttcggttggctgagatgagcaatgtctacagcttcgggattgtgttattggagatgatgacaaaccaacgtgtgattgaccaaaaccgtgaaaagcgacacataacagaatgggtagctttagtgcttaacagaggagacattaccaagatcatggatcctaatctttacggcgattacaactcaaattctgtttggaaagctcttgaattggctatgtcatgtgcaaacccatcttccgaaaaacgaccaagcatgtcccaagttatcagcgtactaacagagtgtcttagagcatctccaatggagagaacccctccatgggctctctccatttttatatgattaaattttctaaaaaatgtataagagagcttttggtttgtttttttagtttttcgtactctaatgataagctctctgactcgggttctctgaaaaatacaaattattttaaaattattttatttcatataactttgttattattgcaaatcagaaaatattaaacatacattattttgaaacgttttaaaaaattgtgcaaataaaaaaaaagtgttttgtctatgtaaaaacaagaaatgttgtttgtgtttttgtaaaaaagaaagtgtttttcttttgtaaaatcaagaataaatgttgtttgggtctttgtaaaaaaaaagaagaagtgttgtttgtgtagaagtgtaaaacaagaagaaaaggttttgtttgaaataatatgtacaatcatgcaatacggttccttttggtacaagacattcaaaatgaggtatctttcaatatagtacaagacattatatttcaagaactgcaatatctcctcaccgtgtcctttatcacctaaagcggcaccaaatttcctgaactaaaattgtcaattaaatcacccaatttgatctttacaataggtttctgaaacaaagtcactatcatccttagattttcagcaccataacttttcttcttcctactaccttctctaataaagaactaccaaaatattactaaaccaacatacaaagatccaacagctccaatatcaacaattttattaaatactactgaaggtcatgcctcaagaaaactcctccataactcttctttcaagtcaatcaaaatactatcaagcaagcaagtaaaccttgatcttatcccctttatggggcttgtactgtaaaataagaaaaaatcaaagtaactgcatcaaccaatagagtatgcagggaaagcgtaacttatttcgtaaactgaagttcccataaccataactacatcacaaaaaggaaagcatgaataagataaacagagaaatcttgagaagaaatcgattaaatttagaatagagtttcatattagaatttagaatcgtactagtaatgccgacactccaataagtccaccatggtgctccaccgttaccagcatttgaccagagcttgatcactggccattatcatattacagacaaatacaacattttcagctccattagtctgtattcgatgataacaaaatagagatggaaatgaacaagtgctcctaaattgattcaatcacataacatatgcaaacaaatcacgactgatttttatgattgaaaacagaacagattaaattcaagccaaatccgagaaagtcaaaacgattcaaactaatatatctatcaatattgccaaaacgtaatcatacaaacctataaaccttaaacgtaatcatacaaagcaaactatagccgatttgctatgccgtcaaccattactctacaaatcagatttgttattctgcgatttcacccaacttctgccgatggtcattagcgttgatgaatccggcgttggaaacctcagataacacgccaacaaacaatcaccatcgtcaattcatcggcttatcaagagttcaccggtcgcgcgagagagaaagaaaatcgatttcggacaaaacaatgaagactacgcgttttaatttttttcttttgttaaaagaagacaaccaataaatataggacacgtgtccgcctctctgcttccctcataaactctcttcagagaaacgcctctctcgttttcttttcgttttgatttatttttaatcaaaaaaatcaagagagcctttgaaaaatagctttaaagcccagcgttagagatgctcttacttctaaaaacttgatgagaaataagaatcatgacatggaatctgatagttcccttgaactaaccaagagctttgatacagaagttgtccctcgtgctaggtagcttttgcaaagaagcctcgtatgtttgaagtgtttcttggcttgtggtatgattctttggtcaaataagtccttaaactttttgttttgagatatcataactaaaaaacaagggaggagcagtcctttaatcttgtttttctctcttgtatgggaaattgttgtttgcaatttcgttccagattcattggctatttatttctttaaacaaaaacttatagccaacaatcatattggctgcaaaaagaagaaaatgatgctacaaatgtctcttgaattttcttttatttgatatgacttttcatcgttattaaaagagacaaagcctgagttaccctcaacaccatgaaaagactaagtgttgttcatgatacatctggtttattatgctgccttcaatgttttcttattggccatcaaatggccgctccatgtgatagctcgattgacctcttggcatgaatttatctttgctggtttcctttttttttttactctttttatcccatcttagttccctccatggacaagatccaacaaatttcaacacctaaaaatgactacaatatgaatatgcaatgcatgtttaatgacgataaaagacaaaatataactaaaatgcaatgaaaccaagaaaatggtgaaaatctaagagttaaactaggtaaaatacaaacacatcaatttcccatacttgcctttttatttgtaatcaaacaaacaatgcaacaaatttttttatgaaaaaggtttaaaagtggagagttataaccaaaatgcgtagcttaccatttctaagctcgagatgaaagatcttggaaagacaaaattttgtctaggattacagattgagcacctgaagaatggaatccttgtgtatcaaatgacatacacagaaaatgtgcttaagagattctctctagacaaagcacatccgttgagtagcccaatgattgtaagaacacttgatgtggataaagatccattccgtcctcgagaagaaaatgaagaaattcttggccctgaagtaccatacttaagtgcaataggagcattaatgtaccttgctagtcatacaagacctgatacattttcggtgaatttgttagcaagatttagctcatgcccaactcgaaggcacgagaatgggatcaaacatctccttagatacttgcatggtacaaaagatatgggtatattcttctgtaactcgtccaaagaagacttgattggttttgcagatgcaggatatctatctgatcctcaaaatggtcgatcacaaacaggatatgtgttcacctacggtggtactcctatttattggcgttctatgaagcaaaccattgcagccacttcctctaaccatgtagagattttggctatccatgaagctagtcacgaatgtgtatggttaaggtcaattatccatcatatacgaggagattgtggcatacttacaggaaaagaagtccctacggtcatgcacgaggataatgcagcatgtatctcacaactgaagaaaggatacatcaaaagtgacaaaatcaaacatattgtaccgaaatttttcttcacccctgatctacagaaggatggcgaggtacttgtcacacagattcgttcaagcgagaatttggcagatttatctaccaaggcgctaccaactgctacttttaagaagttattccaaaagctcggattgcgtcgtctcaaagatttgtgatgtattcatgagggggaatagatgcgctacactctttttctcttaaccatagttttttccagtggatttttttggtaaggttttttaatgaggtagcattacatgcacatttgcaattcctttatataataactagatattaacccgcggtataccgcgggcctatattttcattaaataaaaaataattgattttttttaggatgatttataaatttatgctattgtttgatttaaatgtatgatacaccgcgagaaaaaaaattctaactcaaattttaaagttttaagttgtattttttttattttgttaagtgtttaatattgtatataaaaattgtattttgattattgtttctcggatttcaccgtactacaccatcctatattaatatcgactcaaacccgtcgattctaggatttcacccgtggtagtatttaattgtataattatattttgattgtcattctaggatttcactcctagttctattgcaaattattatcaacccaaaccagtcaattctaaaatttcacccgtagtataaagtttaaatatttattatatttaaacttcttataaaagaatcgaaatgtgttttcaaaaaattaaagttttttaagtgtatttttttctaatattgttaattttgtttagtgtttaatattatataattatattatgattgttaattataaggtttttccgtaacataccatcccatgttattatccactcaaatccgtcccaccatataaccccgtctcaagaaattaaacacaaatttatcattttattataaatttcaaatatttataaaattaaaaacttcaaaaaaaattaatagtgacccaaacttcatcattgaattttgattgttatatctaagatttctttcaaagtatatctaggatttctctcgtagtatatcgtcccgtattaatatcttttatattctttataatgtttaaatttcttgtaaaattcaatttatagttttttgaaactttttaaagtttcaattctttaaactaaagaaccctaataaacaaaccattttaattttggacacctcgtaaatcaagcttcatgctcattcgtaatcgaaatcattttttttttttttttatggtatggctctgaaccattgtccaaattttttaagcaatgtgagatattgtacaatcgtaatgttatccacccaaacacgtcctaccatataacccagtcccgtgaaattaaacataattttgttattttcttataaatttcaatattataaaacttgaaacttacaaaaatacaatatctgttatatttaagatttttcatgtaatatatcgtctcgtattaatatatttaatatctatttataatgtttaaatttcttgtaaaattcaatctaatttttaaaacttcataaattttaaagttatgaatatttaaaacatttttaaagataaactttataaaaagtttttaaaattataatatttaagttttgataaagttataatatttataattttttgaaacattttaatgtttcaattctttaaaataaaaaacttgagtaaatcggataactattttaattttggacgcctgataaatcaacctttctgctcattcgtaatcagaatcattttggtccttttataatatggctctaaaccattgtccaatttttctaagcgatgtgggacattgtacacatattatttcttcatcggttgaataatatatgttcgtttaaaaaaatttgaattacattatatgcagaaaaaatataatattttattaactataaattataacatgttatatatttataaaaaaaaatatttataagtataacaaaataaataaagtagaagatcaaataaaagtgaaagaagaattatatatttatgtttaaattaggtaaaaatattttaggaaattagttaaggtaaataacaaatatgcttagtttagagatattatttattttaaatttggtaattaaatcattaatttcgtttttgaattattagttcttaggtaacttttccaaaaattaatgttatccaagatccgaacagaattaaacatgttatccaggatccgaacagagttaaacctggtaaaacccacccatttgaattaattgttgaattatggctcaaatcttcaacattatcttcaaaaaactgctacaaaaatgtatatatagatacggaaaaacggtctatttctccacgagaactatgacatcatgccagatagagcccgatctatgaccacgatccagatgaccccgaaaagataattctcgatctatatctccatgaatctatagttcaaaacctatatcaaccccataagcataattttcacctatttacccacaaccattggttttgttcggtttactatttctataaccaactaatgaaaacactaaaccagaataaacctaatttaaccgagtatcactaaataaataaacaaattaattaattaattgaattattatgaaacagtaacaacacgatgacgttcttcttcctttcaatggtgatggtgatggtgatgttggctccagtgatggtggctatagatatattttccagtttttccccttttcttcttatccctcatctccgctcagatctgctgcttaagcaaagcttcatcgactttgattaaactcgaattgagaccttcccacattattccacccattgaaatcacttgcttcattttgtagaagattaataacgttgaatcagccattgtcgacttgatggtttgtgttgattgttttctgttttttgtaattaccagattgattttaagatgagcaattgaaagaacagtaatagaattggataaaacttatttaataattgagatgttgattttgtttaattgggttgttcttttgtgaattgtaaaattcatgcggaagctcacctcgatcttctctttcttagccatattcttagcaacgattccagttttcaggtcaatgtcgatgttaacgttattagcaatgagaatgcgtttaaaatgctttgttgaatatctcttcattagttacgacaaatttgtatgtggattcaaaataaatctaacacccatcgtaacaatcaaagagagataaactattttttcaaataaacataatctggaattttatagggaagaagagagaagacaagacgacagcaattttgttatttctttttttattattaatttttttttttaagaaggtttgacatataaagtggtttggtatcggtttgagtggatttttatcgggtttggtcagcaaaccgattaaacccaaatatatggggaaatagatgaaaactatcaattttggggagataaaagatcgagaagtatctgttcggggacatctggattgtggtcatagttcgggctctatctagcatgatgtcatagttatcgtgggaaaataccgtttttccatagattatcagggggaatgttatgaataatagatattatatggatgttcattaagagcccattagaatattctagaaatctttacattatttggttaccctaatatgtatctcctatatatatcctcttgttactcatgaataatacacaacaacaattcctaaacctaattgttctataacattgagtacttttagtaagaaaaaaaagaagagattatttgtgtcagattgacttatgctagatactaattaattcaccttacaacttaattttaacgtcaaaaagtgttattcttgctaatttcacttaagatttttaagtttatcattgtttgcaacatatttttttttgttaaagggttttaattgtctgcagcatattgaaattataagttgcaaaatcggaaagtagaaagaattcaaagtgtatgttaaggaaaaaaaagaaaaaacatcgcaagtgttacactagattaaattcatctcatttggagaaaagatcctaacgaacggcgaacccagtatctccacctaagatatttatcactagaccaaaaccacgttggttgactcgacaaacaatcaaacttgtctcaaattggatattacatagaaggtcaggaggattaccaatctgaagaaatgaaggagatgattcggtcacgaatgggacaacaattattcataaatatccaggtaagagtttcatgctttggtatactagtttatactaatgaaccagtggctttgaaactctggtttgattgtaaatttgactggactataagcatttttgtgttgataactagtacgaataaacaaggcaagttgaataaaaaatactgcccactagcaattaggaaacatatttattcatcagtcaattgcatttcctttgtagaacaaatccattatttgataatcgcataggtgtgacctgttttacatgatttcaagaggcttgactttatttttttaaagagaaaagctgaggcatgacttggcaattagctctttcacttaaaatgtccaaatgagttttgtctacacaatacttataagctttttgttagtgttcagatttttcttgggaatttaagagtaaatggagagttcccataggtttttgttggtggcgctaacagtagcttcctctattattcaccttgttcaagctcaagcaggtaactacattttaattcaaacgtttaggatttttatatacattttgagaaaagtgaaatgtataatattatttggataagcagtgtatatcttattaagtggctatgtttgtaaaaacgcctaagcatagaatctacaccgttgagtttgaaccattatattaacctcttctatctctttcaatagggttcatcagtttggattgtggattatccccgaatgagcaatctccgtatgttgagctggaaactggattacagttcttatcagattcaagcttcatccaaagtgggaaaattggtagaattgatgcaagtcttgagtccaagtacccaagatcacagactacgttgagatattttccagatggaatacgaaactgctacaacgttaatgtttataagggaacaaattatttgatcagggctacaattaactatggaaattacgatggtcttaacatttctcctagatttgatttgtacattggtcctaatttttgggtgacaatagatttggagaagcatgtaggtggtgatacatgggaggagatcattcacatcccaaagtctaactctttggatgtgtgtcttattaagactggcacatcaacgccgatcatatcagtattggaactaaggtctctaccaaataatacttacatcacagaatcaggttctttgaagtctatactaagatcatacctaagtgtatcaacaaaagttataaggtaagtcaactatttgatattaaagttttttcttacccatttactttttttttagtcattgcaaattgtttgtagataatgatgtacaagattgtggttaccgcaggtacccagatgatttttatgatcgaaaatgggttccatactttgagtcagaatggaggcaaatatccaccattctcaaagtgaacaacaccattaatggttttcttgcgccgcaagaggtgctcatgactgccgcggtaccttccaatgctagtgtgccattgagtttcaccaaggatcttgaattccccaaagataaactttacttctacttccacttctctgagatccaacctttacaagccaatcagagtagagagtttagtattttgtggaacggagaaattattattcccactttgagtcctaaatatctaaaggctagtactctttatagtgtgtcaccatttgtttgtgaagtagggaaatgcttattagagctgaaaagaactcaaaactcaactctcccgcctctacttaccgccattgaagtttttacagttatcgactttccacagtctaaaacaaacgaagatgatggtaagtttttttatggatagttaaataatttatgtggagtacatatgctcttttgatgaaataatcaaaacatctttatatgctaaatctagcgtaaacttatgacagtgagtgctataaaaaacataaaagacacccatggattgagtagagtctcatggcaaggagatccatgcgtcccacgacagtttttgtgggaaggtctaagttgcaacgacaagaatgtgtctgcatcaccaagaataacttccttgtgagatatctactactcaaccctcgttagacattttagaaaacattttctaactagtaactacacgagacgttaattattatttttgtttggatctaaacagaaatttatcttcaagtgggctagtgggaaccataccttctggaattcaaaattttactcttctcgaaaagttgtaagtatggttaagtgaatgaaaatagtttgttaatgcaagtgaatttttttctaattgatttcttacaaattaactttagggacttgtcaaataacaatttgacaggactggtgcccgaatttctagctaaaatggaaacattgttgttcatgtaagttttttccgacatgtttatactttctcatggataatttcacctgaacttaaggacaattttttttttggtttaaacagagacttgaggaagaacaaactgaatggttcaattccaaatactcttcgtgatagagaaaagaaaggactacaaatattgtaagaaggaaatccattcgcacacattttttttgttcaagatctcccttgtggcacaaggcttttgcattcaaaatactaaaaggtagatgaattattttgttttgtagtgttgatggtgataatacgtgtttatcatgtgtcccaaaaaataaatttccaatgatgattgctgcgttagctgcttctgcgatagttgtcgccatattggtactgattctcattttcgttttcacaaagaaaaagtggtcaactcatatggaaggtattattaattacctaattattaacgcaacaatttatatattataaggtgtcatggatattgttgtctcactagattgttatttgcatatatctatccccatcagtaattttgccaacaatggatattatgtccaagactatatccgaacaattaatcaagacaaaaaggagaagatttgcttattcagaagttgtagaaatgacaaaaaaattcgaaaaagctctaggtgaaggagggtttggcatagtctaccatggttatctgaaaaatgtagagcaagtagcggttaaagtactatcacaatcatcatcgcaaggctataaacacttcaaggcagaggtatgatatgccatagatcttcctacaatatgaaaagaaaaaaaatcacacaaatgtatttttgttttatatatttcacatcatgtcaaacaaatgtgttttgttattgttggtttgtaggtcgaacttcttctaagagttcaccacataaatttggtaagtcttgtcggatattgcgatgaaaaagatcatttggccctcatctacgaatacatgcccaatggagatttaaaagatcacttgtcaggtgaaagatgaatatatatcattattagaaatatttaattcataggacgactaattttgacaatttgatacagggaaacaaggtgactctgttttggaatggactaccagactacaaatagctgtcgatgttgccctaggttcgtactaactcaatataatttcagtcacttgttcatatttaaagatgtcatcatgactcagaagtagatatatatgattcaactatatggacataaaagtatatgtaaatacatcttaatataagtaaagcaccaaatccatataaacactttccagtaaaataattgtatccacaatttgacacatctgttataaacatattaaaatgataagactattattttacatgaagctttcactcaccggaatttttagcatcaattaacaagagtgagtctatttcataggattggaatacttgcattatggatgccggccatcgatggtgcatagagatgtcaaaagtacaaatatattgttggatgatcagttcatggccaaaattgcggattttgggctttcaaggtcgtttaaagttggagacgaatctgagatttcgacggttgttgctggtactcctggttatcttgatcccgagtaagtactattagttcactcccttgatatatacaacatataaattatgcatgcattcatcttctttgccaaaatgtatacatataaattctccatctcctttattgtccagatattatagaacaagtcggttggctgagatgagtgatgtatacagttttgggattgtattactagagattatcacaaaccaacgtgtgtttgaccaagctcgcggaaaaattcacatcacagaatgggtggcatttatgcttaacagaggagatattactaggattgttgatcctaaccttcacggtgaatacaactctcgttcagtatggagagctgttgaattggctatgtcatgtgcaaacccttcttcagaataccggccaaacatgtcccaggttgttatcgaactaaaagagtgtttaactactgaaaactctatgaaagtaaagaaaaatgacacagacgctggtagttctctcgaactgagcttgagcttcgatactgaggtggtccctactgcaagatagttatgtgcatagacgcgtaccttgtgtcgacgtatcctacttgtgcgtattgttcttggcaaaagaatgtttaaattctatttctagacgtcacaagcttataactacataagagacataaatgtacaagtcttttgatcgtgtatatgaatttgttgtctggaatttgagtacctaccttccacattcattaactatttcattatgaaattagatcacactaattattaaggttaggaaagaaaattatggatagttttgtgcatgatgaagcagggggataaagccaagtgttacaaaatctagtagagaaacaagagaacataaggtgacaactcggtgagctcagaaaccatcaaatattttcaagtattagttaaaatatatttcagaaatttaaggaattggctcaagaatatctgtacatattaaatgaacttacatgatacaacagtagtaaagaaacaaaaatcttcaatgatatggacgcatgtgccggtgatagcacccagtttacaaacgttataaaaaaaaaaatacaaactcaaaaataataaaattgccttaaaactcttaatgcaaaaaaaaaaaaaaaaaaaaaaaaaaactggcttcaaaaacgaatattacatggacaatcagaatgttgcacaagactcactagccatatacgacaaccaagttgcataaagcaaaataataaatcatgtcaactctttctatgtcaacatttcttcacctctcatgttagttagtggttccatactattgtagcctatatttgtttagttattagtagtttctttgtgataaaactagaccacttggatattatatcacatagactaacaaaaaacggcttattgttcactacaaacgtattttaaattcttctttgcatcttagtcatgttctcacgtttttttggcaacttgggaaagtcttttcttgaaatgtcgaaaaataattgtgttctccactgcttatcatcatagatatattgttcagaacttagggagttagggcagtgcaagtcttttgcctcggcactaagagaatatggagaatccccatgtacttttgttgctaccacttatatcatctttatctattaatattccccttgttcaagctcaagctcaagttaacgatggtacctatttcggttttataaatttcagtttgaaattatttgatttttccttcgtttttatgcctgaaaatagttataaaatcgtacctaccgatgtcgaagtcatataattgatttagtcactagctcaatgggttggaccaactggaccgtgcctggatcgcttgttaatcatcaatcttcctaattcagttcttgatatcgtaaaaacaaaaaatcgttgttaacacattgtttgctaatttgtatcattttccaaaactatagtctattcaaacaccattgacatcttaaaatcaacagggttaataagtctccaaattccagttctcgaaattccaataaaatttgttgttcttgctgctgccattgtgatcattctcgtggtactggttctcatttgtgtgtgcagaaagaaaaaagcaccaagtcatgtcgaaggtagttgaagagacactcatcaacaaaattatacgttacatgttttatttttatactaaatatttctttctacagatatacccccttcaccagtttcattaactactagtaaatctgaagactcgatcaagacaaaaaggaaaaagtttacttattcggaggttacagaaatgacaagtaactttcaaagagctcttggtgaaggaggctttggcattgtctatcatggttatttgaatggttcagaggaagtagccgttaaagtactctctcaaacatcatcacaaggctataaacatttcaaggcagaggcatgtaatcccttaaatcttccaacaaagttgtaactaaaaatctacgtgacacttctatatatattatttatgcatcatgctaagttaatgtttttatatgtttgttcattgtttgtatgcaggttgaacttctactgagagttcaccacacgaacttggtaagccttgtcgggtattgcgatgaacgaggtcacttggctctcatctacgaatatatgtccaacgtagacttaaaacatcacttgtcaggtgaaagattattatttcttccttttaaaaaattcacatgataactaattttgatgatttaatgcaggaaagcatgatgtctctattttgaagtggagtactcgattaagaatagccattgatgccgcactaggtttctactaactcaaaatagttcttagtcactttgtttgtttagccaaaacgtttttgagatcactgaatattgaacaaatatatcttatcctaacttaaactaacctattttgagtcacctgttagccaaattttgaagaatttgttatagtgatgctaataccggtggtgaaatttttgaattcaaaatattgtcttttttccccactttaccttttttcatattcagattacattgtatagacattatacatatatatgagtgttcgctaatatttttaggattggaatacttacatattggttgtcgaccatcaatggtacatagagatgtcaaaagtacaaatatattgttggacgatcaatttactgccaaaattgcggattttgggctttcaagatctttccaactcggagatgaatctcatatttcaacagttgttgctggtactcctggataccttgatcctgagtaagaattttaaaataactttcgagcttttttaataagtggaatcttctagtcgatgctatactatcctagatgtgaacttcaccatgccatgccatgtttacattttgtgtccatattcatattagttggtacaataatggacacatgaatcatactacgtattaattattgccttgccagatattacagaacgggtcggttggctgagatgagcgatgtctacagcttcgggattgtgttattggagatgatgacaaaccaacgtgtgattgaccaaaaccgtgaaaagcgacacataacagaatgggtagctttagtgcttaacagaggagacattaccaagatcatggatcctaatctttacggcgattacaactcaaattctgtttggaaagctcttgaattggctatgtcatgtgcaaacccatcttccgaaaaacgaccaagcatgtcccaagttatcagcgtactaaaagagtgtcttacttctgaaaacttgatgagaaataagaatcatgacatggaatccgatagttcccttgaactgaccaagagctttgatacagaagttgtccctcgtgctaggtagcttttgcaaagaagcctcatatgtttgaagtgtttcttggcttgtggtatgattctttggtcaaataagtccttaaactttttgttttgagatatcataactaaaaaacaagggaggagcagtcctttaatcttgtttttctctcttgtatgggaaattgttgtttgcaatttcgttccagattcattggctatttctttctttaaacaaaaacttatagccaacaatcatattggctgcaaaaagaagaaaatgatgcaacaaatgtctcttgaattttcttttatttgatatgatttttcatcgttattaaaagagacaaagcctgagttaccctcaacaccatgaaaagactaagtgttgttcatgatacatctggtttattatgctgccttcaatgttttcttattggccatcaaatggccgctccatgtgatagctcgattgacctcttggcatgaactcatctttgctggtttccttttttttgactctttttatcccatcttagttccctctatggacaagatccaaaaagattcaacacctaaaaatgactccagaatgataaatatatgcatatgcaatgcatgtttaatgacgataaaaatacaaaatataacttaaatgcaatgaaaccaagaaaatggtgaaaatctaagagttaaccatgtaaaatacaaacacatcaatttcccacacttgccttttaatttgtcatcaagaaaacaatgcaacaaaaaactttatgaaaagggtttaaaagtggagagttataaccaaaatgcgtagcttaccattgctaagctccatagataaaagtaaaatatttcatcaaccaagttttactctaacgaatcttttattcagaggtcatactaagacttttggtaaaccaagggtgcagatttatacgtgttttaatttgagaaattgtaatttgattgggtttttaacaaatatttctattaatttttactagataatgccctaactagcttactcgttactgatgcttcctttgtaattaacatatacttgacgaaaaaaaaaaaggaaattaacatctaaaaataaaatcaaatgtaaatagtacttaaacatgggaacgactagacgttgatgacaagacatgctcctgtcgttataagaaaaaagacaagatcacaagctcctattattcataggttcattaagacaagacaaactagaaatttaaagattatgtgtaaaacttatgctatagagaaaatattttattcattcatcagttgaattctttatgtagtcttgtagaagtaagacatgttctcacgtttcctgacgacttagtaagattttttggttgaaattgtttcaaggaatatttctcagatggcttatcaacaatgtctgtcttaattttctttgaacaaaagtgaatatggagagtctcaagaagcttttgttggttgcattaatagcaacttctgccattcaccttgttcaagctcaaaatcaagacggtaccaacatttcaatgtttcaatagaatttgtttccttttacaaatttttatcacctttagcactaggggtaatatattatggaacggatattcaattttggtttttgtaattcgttcggttatgccacaatcggtcctctgatcggtattctgctatgcaactaagcatacaactgttaaagtatttcccacccgttcgtacaaaacgttataaataatttcaaacactagaaaaagttacaaaaattcaaccaaaaattgcaatacacttatcattttttcttaaattttaaaactctttgatgaatacaactaagataactatacaattatgtttttttcaatacctttttgtgtgcatgctagattactaatataagttaaaaaaggtcttagttcacaaactaatcctttatttatataatgggatagtttgatgaggaatttttatctagttttggtaatacgattttaatatcttaacaggatttatcagtgtagactgcggattatctcctaatgaggtctctccttatattgagccgtttactggactacagttcacaacggattcaaatttcattgaaaccggaaaacttggtagaattcaggcaagcctagagccgaagtaccgaaagtcgcaaacgacgttgagatattttcctgatggaatacgcaactgttacaatcttacagtgacacaaggaaccaactatttaatcagagctagagcaatatatgggaattatgatggtcttaacatttatcctaaatttgacttgtacataggccctaatttttgggtaacaatagacttaggaaagtatgtaaatggtacatgggaggagatcatctacataccaaaatctaatatgttggacgtgtgtcttgtcaagacagggccgtccacaccattgatatcatccttggtgttaaggcctcttgcaaatgctacttacatcactcaatctggttggttgaagacttatgttcgggtttatctaagcgactcaaatgacgtcatacggtaagtcatcttaaagaaacgcggttttcggactaggacattgctcttagcatatatattttgtaaatgttttaactattgaaaagagcggttacaagctctaagaatattttatggctactaattcaaaattgtacaaaatgtagatatccggatgatgtctatgatcgtatatggggttcatactttgagccggagtggaagaagatttccactacacttggagtgaacagttctagtggatttctgcctccactaaaggcactcatgactgccgcctctcctgccaatgctagtgcaccattggctattcccggagtactagatttcccaagtgataaactatacttgttcctccacttctctgagattcaagtcttaaaggccaacgaaactagagagttcgaaattttttggaataaaaagcttgtttacaatgcttatagtcctgtatatctacagaccaagactatacgcaacccatctccagttacttgtgaaagaggagaatgcatactagagatgatcaaaactgagaggtcaactctcccgcctttgcttaacgccgttgaagttttcacagtggttgaatttcctcagccggaaacagatgctagtgatggtacgttagcaataatcttacaacgtttgaaaatatgttttaccataactaatcttaaatgctaaatctaacatattttcaaacattgtcgaattttatgatagtggtggctataaaaaacatcaaggccatctatggattgactcgagtcacatggcaaggagatccatgtgttcctcaacaatttttgtggaacggtttaaattgcaacagcatggagacgtctacacctccaagaatcacttccttgtgagaaaaccttttcatataataagaaacgtttaagaaaaccttttcatataataagaaacgttttctaactgcattattactttttttgtgctatgatgtttatatagggacttgtcttcaagcgggttaaccggaagcatatcagttgttattcaaaatcttacccatctagaaaagttgtaagtatggtgtttattagtcttaggggaaaaaaaaagtgatatatatacttcatgaaggtaactaattatttcagtgactttgttttcttccaaactatatagggatttgtcaaataacaacttgactggggaagttcccgattttctagcaaacatgaaatttcttgtgttcatgtaagttcctttacatataaatatattttgtttagtgatattcttcttgatcatggtcacctatgtatgaatattcctctggtttaacagaaacttaagcaagaacaatctgaatggttcgattcctaaagctcttcgcgatagagaaaataaaggacttaagttaatgtaagatgtaacttatgctgaaaatatttcattaaacattcatggccgtctacatatccataatatctatttgcttttgtagtgtcgacaaaaatgtggacaactgctcatctggttcatgcacccaaaaaaagaaattcccattgcttattgttgcattaactgtttcgttgatcctagtcagtacagtggtattggttctcatttgtatgttgaagaaaaaaaacacatcaaatgtgaaaggtattgtccaagtcatcatgtgaaagtacacaaaattcattcatgtactaactgcgctctctacagatttaccctcacaatcaattccgccagaagcaaatcatacattggatggtgtatcggaaacaatgatcgaaacgaaaaggaaaagatttagttattcggaggttatagacatgacaaataacttccaaagagctctaggagaaggagggtttggtgtcgtttatcatggttatttgaatggttcagagcaagtagctgtcaaattactttcgcaatcatcagtacaaggctataaagaattcaaggcagaggtatgaatattttcttagaaaatctcaagcattatgttagaccaatgtgcttcattcattgtttttttcattttgatagttaaacacttggctctaaaaaagataattaaacacttcattcattgttgttttgtaggttgaacttcttctaagggttcaccatataaatttggtaagccttgttgggtattgcgatgatcgcaatcacttggctctcgtctacgaatacatgtccaatggagacttaaaacatcatttgtcaggtaaaaacatatgtacattaacattttaatttacttttaaaagacattttaattattacaaacaattcttttgacgattgattttgaggataaattacaggaagaaacaatggttttgttttgagttggagtactcgactacaaatagctgtcgatgctgcactaggtttgtgttaactcataatgattttattaatttatttttcacattctaaacatttcctaggatcactagacatacgtacataaaaggacatttgcaaaatattaataggattggaatacttacatattggatgccgaccatcgatggtgcatagagatgtcaaaagtacgaatatactgttgggtgagcagttcacagccaagatggctgattttgggctttcaaggtctttccaaattggtgatgaaaatcatatttctacggttgttgctggtactcctggatatcttgatcccgagtaagtatcctcagtctactaatagatgtgatcaacatgtttgttccataactaaaattttcacatagaagtctagatttactaatcctgttagtgaactatataacacgaaacaaagagatgattttttttttcaaaaatgctgaggtttgtgtggacggatatttttcgcgtttaagaatgcatatgagtgaatcttttactattttcttaccttaacagatactacagaacaagtcggttggctgagaagagcgatatctacagttttgggattgtgttattggaaatgatcacaagccaacatgcgattgatcgaacccgcgtgaaacatcacataacagactgggtggtgtctttgattagcagaggagatatcacacggatcattgatcccaatcttcagggcaattataattctcgctctgtctggagagctcttgaattggctatgtcatgtgcaaaccctacatcagaaaaacgaccaaacatgtcacaagttgttatcgatctgaaagaatgtcttgctactgaaaattcaacgagaagtgagaaagacatgagttctcatagttctgatcttgatcgtagcatgaacttttacaccgacatggttcctagagctaggtagcatgtgcaaagaagactcagtcactttgatgtatctatgcttgtttttattgtttttgccaatatttcaaagccataggctttatactctgtaacagccaaaaagtttcattattttctaatgataataacagtttagcaaagaaaaaaatgtatctatgtttgtgtgcatggacttggtcttgttttagtttcgatttttttatttctaggaactttgcacgttgtggtaatctcgcgtacaactattgagtatcaaaacatattttcagagttctattctaccgatacaaaagattttgtttgagcaaaaaataacacttaacctcgggttcaagcttgttaatgttttaattcatgtcaccgagttttgctttgttcattttgcgactacgaccaatagtcaatggatccaacgactaatcgagcaaaactttcattcattaaattttttcagcgattaatcattttttttactatggggtccgattggtgatcactttttaaaaaaggaatggacaagaacaacatgtttcttattgttcctcttttttttcaccattcagcggtaattttttttccaaattgtaacatgtggaccccacattattcctattcatttcttattttttgaggaatcgtagaagaaaattgttccttcccaaatttgatgagaaacaaacaggaaaacaaattaaatatttataaattaaaaattaaatttatgaaaaactaaaagaaagaaaaaacgtttcttctatttttcctctacactcattcctcttcattcctattttatcattttttttttcttttttgttcttttttagtcatgttcctcttcattccttgtatttctttataggtcaccaatcggatcctatatttttagggatagtgaaaaagagtggtaaacgtaaaactttgagctttttgattgatcaagtttatatatatactatcgtcttaaaaagcccattatgggctaaatttaggccgggctacaagcccagaaaagaaacgagtctttcatacaaaactggttcagatttggtcactctctgacgcgagaactagtctcaccagacaacaacaacaacaaaacttaagggaaagataatcgtttgtctgtgcagagagagagagagagaaaatgaggttgttcgatccatggccagtgttcttcaagagagaatggaaacgttgctggccattcctcaccggtttcgccgtcaccggcgttctcatcaccaagctaaccgccggactcactggtaaactcttcgtcggatctcaccgattttaaacatctaacttctcccatttcagctgtatttatttgattcagatcggatgtttatttctgtaatcatttctcaattttgattttgattttggaaaaccctaatttccgtaaaatggtgattgatttgcagaggaagatgctaagaactccaagttcgtccagcaacacagaaggtatcaccaatcttgaaaattctcacgttgaaattgaaatttcttggttttggcatatgatttagattttagagcattttggaatcaatggatgattttaaattgaaattcttggtttggtatatgatttgatcatagagcattttgtagaatcgatgtagttaaatagctcttgaggttttagggttgttaccaatggatgattattcgtgtcttaaggtggtattatgtcataaatcccaaatcaaattcgaaattattcgtgagtcctcactttttgattgattcatagtgagaaattcaagtcttaccgctaaaataggttcattgccaagtagatgaatctccattagatgttcttttgttgttcttgcgctgttgtgtgatatcaaggaataatagtgttgattgctacattggtattgactatgtttaaactcttagccaaactctaaaggtttcaacttgtttgttatttcaggtgattcactgaagcaaaatgtagaagctgacaaggcatatagatttgggactatagtgaatgcttcagctttgaaacatgttcaataacaaagaagatcattctatatactcttttattttctctgagtttcgaaatcagcttttccttttctgaaacttagcaatggaatggtttttgttcacagtatcttattcccatttgtttggaaatggattttatggcctttttgaatcatgcgaacgcacatttcaataaggatttggttccccaatgaatattaacgtttgttctaataatcctttggttcttaatctcaactaaccattgtctttcgaaatgctaatctctttgtgctatagagtttgtcttttgtatttagtttctttggttgtacatagtttcttgtcaacgactttgtatccgctattcattctataaaaacaagccacaagattagagaatagacatgtttggattttgagctattagtgtttaacgtctatagttgaatgacttcgccattgtttacctcactcaagatttgaaaaaatggagtcaccgtagctgcgtaagctatggcaagaaagtaaattttatcttccttaaatataaaaagcattcgttcataatctttatttttctctaggaataatttcgactgtggaaagtagaaacatattatatgaaaccaaccgcttgcaccatggaatatgaaaagtagaacttggttatgtagtgcattcacgtttgcgtgtgatcggtgatggagttttagttcttgtggactccgagccttagcctgaagtcttcttccataagtggaaggccttcacgaagcttcacctttggttcccatcccaacacttctttagcctttgtgatgtctggcttcctctgtcttggatcatccggtgtgttctcaaccatctttatctctatgctcgggttaatcagctgcaagtaaaccaacatttcattagcggacccaagaatttctaagtacttactcatatcatatcgagaaaccagactctcacctctttcactgtctcagccaactccaccattgtaaactcacctgagaaaccaaagagtcggacacaaagcataagttcaagagattggttgggttgtgttttgtctaatggaggaatattacggactttacctgggttaccgatgttgatgggaccagtgtcatctccttccatgaggcgcataagtccatcaaccatgtcagatacataacagaaactgcgagtctgtgtccctggtttctgaacagtcaatgcctcacccctaagtattcatgacaagaacaataacaagagatgagtaatttatagctcggaaaataaaatttgttcgttggattgagcaaagaggctcaccggagtgcttgtgcaatgaagttgcttacaacacggccatcatcgatgttcatgcgtggaccataagtgttgaagattctagcaatgcggatttctacaaagaagaaacaaaaacaatttaaggaataaaggacaatgagaatatgttgatgcaaattacagggagaaagttgaagcgagagcctgagaaaatgcaacttaccaattccatgttgcctgtggtagtcaaacatcaaggtctcagcaacacgcttgccttcatcataacagctcctaacacctatcataatagaaaccaagttataagaatgtgaattgacacgcagataagttgagaattaaaagctgataagtgtttactcctaccaattgggttgacatttccccaatagctctcaggctggggatgaatgagaggatctccatatacctccgaggttgaggtaagcaaaatcctgtccggtagaagagtaagttagtcacaaaggcgaagatcaacagaagtaagtaataaaaagagggtatcattttgcaaaccttgctccaacacgcttggcgagacctagcatgttcagtgtgccaatcacattggtcttgattgtcttcacagggttgtacttgtagaagataggagaagcaggacatgcaagatggtaaatctgatcaacctcgatcaaaagtggctccgtgacatctgttaaacccaaaaccaaaatataaatggatagaacaaaagacaggaatattccattctcaatagcagcaacaagccagagaatttcaaaaccataccgtgacggataagctcaaatcttggatgaccaatccacttcttaaggttgtcctttgaaccagtgaaatagttatcagcaacaatcacctggtaaaaaaaaatataaacatcagtacttaatcaaatcgcgcataaactactattgtatcggataggaatttcaatgcaaacctcattcttttcgttttccatcagcttatcaacaaggtgagaaccaatgaatccagctcctcctgagatcaaaatcctcatatttgactgcaaaatgaaaaaaaaaaaagcactcactttaaacatcttattaagaacatagtacaactttactatacaaactaaatcatagacaaccagatgcagaacatactagatcagaacatactacaaccacattcacagtgcacaatgtagcaaacgaataagcctagactactaacagactctacagttttcgcacaataatacgacagctcaaatctaagtagaatgaatgtccatgattcaatctcaatgatcattgagaccaatgaaaagatccatatacctagaatatgttttgattctatatcaacaagatcaggtaaatgcagaattccaaatacaaagatcaaatgatcaattcaaaaaactaaatagtatcacaccacaccaccatgatccgacctaaaaacaaggatcagaacacgagattcacactccaaccatataaagtattaacctacgcatgatctcgtgagagaactaaagtgattctctctgtaacggcagactccaaatgagcaaaacgagattcaacgcatgaaatcaacagaaactaatgggtatcgccaaaatcgaataaaaatcataactttacctgacaaaacttggaattacggagaggagacggtgaaggaggaggctttgggcttgtttgtttatcactagacgccattgatgaagaagaagatcacaaaccctgaatttttttgagaaaaaaaaaatcgaatcaaacaacagagaaaaagaagattccgattaaagaaagggttcgagaggagtatttacgagatcgatgagagaaccctaaaaacgaaaactttgtgatctgaagagagcgagaggaggagatcgtatacttttatagtctctcacaagtgtcgggaacttcttcttcctctctgtaaaattttgaatatattatctggaaaagttagatatttttatttttttgttgagaaattctttttttagacttttttttgtgtgtttgtttaatttgttttgggtgagataagattagtgacttaaaaaacacgaaaagtggaaaaatcaatatcaaatgttaatttgtggttactcgattacaacgacaacgtttgaccaaacgtattatctgatgtggcattttctttactcgtcaagaaactaaaattccacaattttagggaattttagttgtttattattaggcgaatttctagctaatttttttttttctttttgttaaagatttctagctaaaattttcaatatactcccatgttttatgaaaattaatttgtttgaattctcatatacattttcctatttgggatgaaaaatccgattattattattgagcatagtttaattattgttagttattgtagtttaagttcagattttttaaaaatgtttgtttatacaatgatacatcaaatagttttgttattattggtttgtttgtttgcttgctagatcgtagaactaataaaaagcttgttctctggttgacttcagttttgtacattacgagtataataatatatttttttattatatcatcagaagaaattaaaaattagtaaacgtcctatacatgtttgacaactataaactatttctttgatcagtgatgattttgtatcagttcttcgattaattttcttaaaatagaaaacgtaaaccttttaaatcagggtgaagaatgaataatcatttcttttcttttgagaaaagacaaaaacttgtacaaaaaatcatcgattaaactaagtttatgacactcacctatgattataacttgcagcaacgaaaagtaggggtgcggacatttcggtttaggttcgggttatttcgattttaataaatctataaaacttagtttggttctgtttggtttagtttggtttggactgaaaaagaatcatgaaatgatccatgactttggtctttgtgttctcagctttttaacaaaatatgattagcatgatccatcaaggattttagctacacatttctcaatttctaatcacattaaataaatctgatttttacaaaacattaccaacaatggcaacaattgtacacagagttttactgcagagggtgaccaaagtctcatcacgatttaactggaccataattactttctcccaacgtacaaatgtactcaaccgcaacaaccattaaccctaaaccaagacccaaaactacgttgagtccgcgtttgcaatgaccacgctggatgagagatggggtttattcactaatgactatgtatatatcaacgcctatcacacttactattactatgtatacagaagacatacgcatgtgcctgaaattaattatggatggttcttaccttatggaagcttaaaagggtctgctctcaggatcagcaaatccagctagtagtgcaccgaagagccatatcatgagtaagaacacgactgctgttcgcagaacttggctgcatatgttcaggctcggctcgtcttcataggataaatcaggtgtctgggcattgtaactccagtggctgtcgtctagcttctctgtttcactcgagcttcttctctttcttcttgggtgtgtttgtggctgtggtggatcttgttcgttgagatttgagcatcttttgcagttgcagttgctaccaaggtatgaaggaagtgtctggaggtattcagagaggactcgatggaaagtttccccttcaattctcagcttcttgcgtgtggttggtctaagaatctatgagagaagaacataagtttaggcaagggatatgcaacgatcatagatccgagaacaaagactaagaaaaccgaaaaattgaagttagcttaggtagattttttacttggatgaaagtctgggaaatgacacggacaacaggagggaggcgaatgatgaataggcagccaagacggttagggaagtgatcttgaagaatggaagaacaagatctcatcatctgcatgggaatcctcagaggagataatccttcacaatcgactaacactgtaagttctgaattctcaggggtcagaagatgcaaaacgccgtgctctacctgagatactgaaacaataacaatagtggaaaattaaaatgataccgtagcaaataaaatactggaaaatgtagtaaagccactaaggagtaaggacgtactgattgcctgagcgaaacgaggtctctcatgagatggcaactttagaaaagctagccccaaacgaacaatgaggcaaggtcgttggttcttatcatatccatgccaaaagagtaaacttgaccatgtctcaagttcttcttcagaaagaattctgtaagtctccctccaatgaattgtcttttttatcgaagatagtaaggatgtgaagtctccatttgacaccctgtagaatctatgaagctcgtcttcattgagtctacattaaaatgagactaaacgattatgatctaacgcagaatttaacactgaaactcaaaaaagggagaacttattcataaatcacaatctgaaagtacctctctggtaagctaagtctctgcttttccagttcttcatagagttttctaagccagtcttgtgaaattacaggaagtggagcctcatcttcaattctacatttacaaaaacataaagatatttagatactactcaaaaaacaaaatggagcattaatagtttcaagggatttgcaaaacttcaagtgcttcagattaaagctgtacagtctcagactattataatacaacataacaggtaagacttatacatcacataacaccttatatctgatggagactgtaaagtctgcgagtcagattgtgattctgattctgaagatgcatgagaattggtaccacctgaggcttcttgctttaactctgactggtctgtcagagcctcagctatcgtgatgaccaacaatggccgagacaacatctgcataacgatcacacacaataactgagactcgccaaagatcaatatactgtatcattctttcatcaatgccatagggagaaagtatcaaacctgcattgcattgatcaactccttgaaaggagcccatctttgaatccacttaagaggaggataacaaagacattgcaacgcctgaagactattccacaaatgaggacatttagcctttgaaacccttcgaacaacttctaaaacagcgattttaagcagaaacacagctgcattacgagcggttccacttccaaatctaccattactcccaaaagaaacatgcttagagattgtctgctgaacagctcttggaatagcagctactaagcttcttttaggtaacaactctttcccagaagaaacagttgccatcatagagtttctacttctaccagaattatcccccattaaaaatcgattccacacacttaaaataagcaaatacgccacgaaactcgaaacgagatcacaccaatttcatgtcgaaacaatatcaaaatctgcaaacaaaatttgcatatataagagaacggataaacggaatcagagaattcttataaagctatgaacaaaacgaaccaggatcgaaatcaacggaggacagatcggaatcgttgtagtgatcggagaatcaaatttcacggcggcgaaagcgagcgagatttcgtcttctctccgaagttcataaagcgaaacagaaaaaaaggaaacaagaacaacacggtgttggacacgtgtactctcccaactgttttgatagcgattgataggtaaatcaacggtccaggagcgacaacgtcacgggccttttaaatacgtggacccaagaaacaaacatcatgctgtttgtttaaatatttttactagaagccgaaaactgtacgaagtttctgaggagaacgtaggaacggcgtggagttttagcgtccaaatcaaggaagtaaacacactgaaaaacaaagcttcgacagacaaaaacaaagcttctatgaagaatagtataacttttaatgtcagtttttttcaagaacaacatttttttcgaccaaacacttcatttcacgttgaggaacgcgattaaaagatgcaagacgggtttattacaagtagtgtttggacagtttttcaaagggaatttttttcgataagataaatgagcttttgaactccatagaagatggtgttggagtgtgaaagtgtttctttgatcaaaacatttcttgagactttctgacacaacggctcactttcttcttgaactcatctctcttctctctccattctttctgcaagaggaaaccccacaaggagaatggttaacgagcaagctctggtacataaactatatgtaaatccaatgagacagtgttaatctgatgagttcatagctaatcaatagaaaacactcacagcagcctcaacgtttgctggagattcgtcgttgggaccagagagcattgatataatactcaacatgatactctcaacctgaaatcagcaatgttatttccactcatcaaatctaattgacatcattcttggttataagaagaagcttctcagatatcatacaaggagaatgttggatcattgtaaaacgtactgtgtgaacaggcgtccaacgctcacttgcaagctcatatccacttggatcatcaccaggaggatgtagaatagatatacaaacgcggccatcgggataaactgcagaccacaagacgaacattttcacaaaaccttagctactcaaacaagatcaatgagctaatgagcgcataaccgagagaaagaactaaccgttaggatgccaaatatctgaagtaaaccgcaccgtaggtgggctattaggatagttttgtgggaatgacataatggcatagaaaaatcctccttcactgcatttacaaagttccataacttatgcttaatccttttgttaatgtgacaagactaagtaaatctccatataaacaaagcaattcatttcaattccacaagaacactactccaatctaatccagcattaaccaattcgcttcaaaaccgacaaatcgatccattctaagctcaaatccacatgaatcatcaaatccggaacatagattatagcgaaatctcaatggaagctgatgaaatctcatggatcaaaaggaacgtactagagagtatcaggaggtccaataatagttacgctccattcgaatatattcttctcatcaactaaaccagcagagaatccatctacaggatgcttacaaagatctgaaaccaaaaaatcaaatcggattcaataagagagaattcaacaccaaattcgtagaagaaacagattcgttgagattcgcgagtgtttgtgtgtacctttaagctgtttctgaagaagaagacaagcttgtgagttcatggcggattgtgagaaatcgagctagagcttccagtgatctgagagaagaggaagatgaagaggaagaagatagagatgggaattgaatagagagctttatatcgagaaggttcaaaaaagatggaaactggggattttttttttttttttggtaagcatcgatgtttcattgttcatcaagggaacacatgggagtggagggatctgctacggacgtgtcttctttacttttttcgcttccagccaatagaattgcgaaatattatttttgttcaaagtggccgactaatattaaagatagaacacatcattaacaaaaagagttaattttgcattcacacaaaatatggatcgttttagtgagtgtagtagtgtcggtttaatgcgatggaatttaatccgacctccaaatttttgagttctttaatttgtttttttttttgttttcaatctttaatttagtttagtgttggtttagattgtttgttaccgggttagatggttaacgaataaaaatactgatttcgtgattcggtgtgttttgatatttcgaagtttcgcgtgttaaatagagttgaaattttgtttttgtggagaaacaaatcgagctacaactcaactttgtgtacaagtgatgatatgtgacagtttttatagggaaaataaatattgagtccgttaaatatttagaataaaaataaatattttattaaaatttgctcaatttatactatataaaagttgaaactatttgtttttaaagccatccacataggatttagaacaccaatcgggagctgcaacatcaataattaacatatttagcatctaattaattatcattttttaagacaaccaatcggaagctgccacgtcaataattaacatatttagcatctaattaattaatatttttaaaaatagtaattactttctgttttaaaatttaaaacaaaaaaagaaagcaacaaatattaaatttaaacttataaaaagaagttatataattataattatgtaatattaaacccaaaccttataggattttatacaactaaatccaattttttaaaatataacttaaagaaacttaacaaggacgtggtttgatggtggtatttttaatcgtatcaatttgaatcaagttctcgaagatataaattgaggtctttcagtctcgaaagcgtgaaggtgaagaagatctaaactgcatcaaaagagagaagtgatagagttaagtaccaatttagtagctaaaatatttttttagaataacagaaaacaaaacagagtacatcttgacgagattgaaaaatgtttatactaacaagaaaagaaagagattttcgaagaagaaatatggagcatgtgaaaagtttagaaggtatggcacatattgtttagacaaaatcataagaggatggaaagagacactgtaagaaaaaataaaacaaataaaataagttcttgcaaaaagatagggagagtgatagctctctgtaaaaaaaattatgaagacagaaattcatatacatattgaaaagaatgtgagaaaaatatgaaatgttaaaagaaaatgtagataagcttatgaatatacgatctacataatatcttatttttagaagagctatactaactaatgcagcgaagataaacgaaaaacaataataaatttgcgggtaccaaaatgagaatcatcgaatctatttcccgtacaacaatttatttcatatgtacgtaaaaaagacgttgttatcctaaatatctaaagctaaggagagagtcatgaaccaaaaaaatcttcttttgctaaatgttgtaaaatctaagagttgtataaaagttatttttaattatgtatttaaattgtaaatatttgtcacggtaattttaaaattcaaagagtttataatattaaaagcgagttgacatataaaatcatatctttcaaaatttttaataaaaaaaatttagtcacacaaaaaattattaaacgttttacaaaaagatccacgcgtagtgtgggttcataatctagtctatactatataaaagttgaggatatttgcttctaaaagcgtccacgtaagatttaaaacgactaatcgggagttgccacatcaataagtaacatatttagcatctaattaattaacatttttgaaaataataattactttttttttaaaataacaaatattaaatttgaacttataaaaaaagaaactaagttattataatttttaatattacctttataggattttacaataacattaaaggagagaagtgatagagttaagaactaatttagaagctaaaactttttattaaaataatagaaaacaaaacagagcaaaacaaagattttattcttaaaagttcaaacaaagagtttattgaattaactaagctatctttggacgagcttgaaaaaaagctttcactaacatggaaagtaagagattttcaaaaaaaatatagagcatgtgaaaagtatggaagatagtacatgcattgcttagataaaattataagaggatggaaagaggcaccataggaaagattttttcacatgaaggtgaagtgatgagtgattaagatgtgtttggtctatgaagcgcaaaactttcagagatatgagagagtaagacactgtatgaaaacgctgcgaagagaaacacatgatacaagaaaacattcgacaaagatcagcaaaaaaaaaatcttaaatcataaatagatttagattaataagaaattctcaaccgcagtgatgttaaatgatttcttgttatgaaagtcccatttccatatcaattaaaaccattatcagattacaataaaataaactatacttagttttcattacgattaatactatatttttctctcttagaagactaaccaactgtcttccagttagatgataggcttttattgactttccccttcattcgacattctttgacttgaaggtattttctcttctgcaacacagttttttccacatcaacctgatcccccaaatacatgtaaagatacccaaaatcgttttcttgtagagggaaaaagaagtggagaatccttccattatttaccaaaaatttcattcactacttggcgtttgacagttggcagtaatgtgttcttgaaacctttgatgcagaaaattttatacctaccaaccaaaaaaggtaatttgcacaaatcaattaatttgtttctaaatcaaatactaaataaccaaagaaatgctaaacaacttacatcggatatgtagacctggtaagactaatagttcgtcccaccaatttcacttcattaaagttttgcaacgctgccattgcttcttcgtgagatggaaactcaactctaaattctcgtttcttgtttaaaaccacttggcagttgcaaccttgaaagaactctagactgttacaattccaatattaaatcataagagaaccgtcaaaaaatctaaacaaaagattaatatagagacaaagaaatcaacttacatctctagttcggagattttcctatggacattagagagcatgagaatattactttctaagaattcttcaaactcttcatccgaactggaggcgtatttggcatcccaagtaacaggaaataatccgctgggcattctttgtttctctatccaagcaatatcctacaagtgaatactaattattaagttgttggaaacaagttagtttaagaagcataatatataaatgacgtcattacaagaaatatctacattattaccaagagagaagagctattatatgttcttaggtgatcacccgcgctacgccgcagttttttcagattttttttatattgtttaatttaaatattttttatatatctaattattcactcatgcaataagaaaatatttttagtattaaaatatttttttctaacaacattctcaatatttcatcatatacataattcataaacaacgttcatcttaaaccaatttaaccgagggtagtgttcaattctagaatcctaagaatttgatgatggagctccgtacgtattttgcaccttcggtgatttattatataaatattaatttaagagaataacttacttaaatcattaactaatccacgattattatatactcatactttgagtttggattaccaaaaaaatctttgataataaaaaaactattaaaatagttttattgaaaaatcatgtaatattaaaataaatttagtattagtatattaaatatttaaaataaaataatatataaaataaaataatatataaaattaaataataaatgttcactaatctataattattagtacattacattaattatttaatagacacatgacaaatactaaagtgatgatgtagcaatcatatggttagagttgaccaactttcatatatatgattaataaagctgtattatgcccctgttaagaccaatcaaattgtcatacaacgaaaattcaaaaagtagactctagctatattttgaacttagtgagtagaaaccaaaacgttttcatcatattgtatgatgagctaattaccatcataacttcctaataaatacaattccgtttcatttccatttaatcagatttctaccaactaaattttgtaatcgtttttgtaatcgttttatttcaaacacccttaacaattcccttaatgtttccaattaatttttgccgttacacacccttccttcatatcaaattcaaacaatcatcttcttcccatttctttaaaaaaccttaagatcttcttccaattgaattatttggtctccatttttattataaaacctataaagatgtttccaacctcactcgtctatttgtttattaaagtttaaattaccatccaatagccccagtttctccaataacaaatgacgatcaccactcatatccatcctcgaagcattaaatttcaaaatcaacactcaaaccattgttgttcgtccaatccaaacgttggaagtttgtgatttcaaacgttataatattttgcttagcatcgacagtcttcttatggatgaaaagatatagtaaactaattcctaacacaattcatattcccttccgttccacactttaatttactattttcataatattcatgtatgtagccatgtaggataatgcatttgtaaacaaaaaaaaattatgtactacaacagtgaagttaaaaaaaaaacaattaaagaaataaaatcaatatcatgcaaaaatttctaaaatataccaaaacaaacttgcccaacaggcaggctttttttctagtctacaataaacgagagttgcgatacaataatagttgtcgattaaaagaaacaaagatatcggaatcaaagtcaactaaattaatcagagtaatagaaaaaacttttttttttgttgcaagacatcaatcaaagtattataaaaagactccatcgacgaaagatctatctaatagaaaacaactcaacaacttgttcaagcctaaaacaattataaaaaaaaagttatataaaaaaaaaaacactcaagatttagaatctaagcatatttattaatgaacgtagacgtccaaaaaaatgaactgtactggattacaatgatcagtatttctctgtagttctaacaatcccaatttttttaaaaaaaaaaaagaaaaaaaaatcctcaactatttatttgatatatttttccaaaaatgtggttattatggaaagtgaaattttaaatgtggagggtgacaagcatctttgcttagtatataaaaaaagcctttctcctttcttatcctccaagatttaacaaagagaacgagagatatggagaacaaaactcaagaggaagcttcgaccatcaaagtttcatcccttacttgcatagatcttgccaacccgaactttcaacaatcagcggtttctcttaaacaggtatgtttttattttttctttattatagctaagtatgtcaaaaacattttattttcagatatgtatggaaaaaaaagttgactcgttgtgtgtgggttattcttgttccaggcatgtctagattgtggatttttctatgtcacaaatcatggtataagtgaggagttgaaggacgaggcttttgagcagagcaagaagttctttgctcttcctttggaggagaaaatgaaagtcttgagaaatgaaaagcatcgaggctattcacccgtccttgatcaaattttagatcctgagaatcaagtcgacggtttgtttgaccatcttttcgcttgcttgatcaaaactttgttgttgatgatctcaatcttgttgtaacctcatgggtttcaggtgattacaaagaaagttttttcattggaatcgaaggtgtcaaatacaccattctatagccccaacctatggcctgaccatggttagttttttttcttccatagttagctcttttatttgtcaacctcatgttttctaccttatataaactttgatgtttctggcagttgttttgccgggatggcgggcgaccatggagaaatatcatcaagaagcattgtaagtatttgtttattatcatgaagtagctagtttatttcttcagactttgaggcaagattaaattcttcagtttactaaggccatactaaaaccatttaataattaatggattagtatgtggattcagttatggatttgctattttttaatggcatttatggatttttcaaattttttgaatagtttgtggattttgtcactttttaggctatagaaatataatttaacatgcgttttattcattatatttgggtttagtcggttgtacttgttttgaagatttaaagtttttgatataaagtacgtatttttgccaaaaaatcttaaatccgtaatttttaataaaagtgataatttcaaaagattttgatgaaaagggcaaaatcaacaataatccttgtgtttttttgacaatataagaccttacattttttcttttgatgtggataggcccctaacagggaagttttctaaacgttatactaatgatgagcttttcacatggtcaggagggtttgcaaggctattgctagattattagcattggcgctcgacttggacacaaattactttgataaaccggaaatgctgggaaatcctatcgcagttatgcgtttgcttcgttacgaaggtgatatattttcttaagcttcgtagccctacttatcctaaacaattttctttcttccttttgttaccttttagggatgtctgatcccttgaaaggaatatttggatgtggagctcattctgattacggaatgctgactctcttagcaaccgatagtgtaaccgggctccaggttttcacatttttgctagtcatataactttagatgtgaccaggtttggttatgagaaattgctatacgatggcagatatgcaaggataaggacgtgaagcctaggaagtgggaatatgtaccatctattaaagggtataacgagaatttaaggtcttaggatccatgatccaattttaaacactacactaactcccatgataaaaaatttgtttataaatttcctctttaagagcatatatcgtcaatcttggagacttgttggagcgttggagcaacggcatttttaagtaatttcgatttctgtgagcttactctccctaatgtctcttttcaccctctacattgtcattttcccaaataaagttttctagctgacatttttctcacatatacacatagatccacattgcatcgggtacttgggaatggtcaagaccgatattccgtaagtctcttaataatacacatccgagtctatccttacaatttcttacaagacgatgtgctctatatagttgttataatttgtcaacaatctagcttattgttgatcatgtctacaaatcacaaatgagttataatttctcaacaatctaggttataacactcaaaatgttttttttatttgttcttgtcacagattccattcttcatagaaccgagtcacgactgtctagtagaatgtctacctacctgccagtccgaaaacaaccttcccaagtaaggctttaattctttaccttgttacattgagaccttggacatgtaacaatgtctcctaaagacattaacgattgtgtttaatgaatagatatccagctatcaaatgttcaacgttcctcacccaacgttaccagcaatcacatgtgaatttgagcatctacaaacagccctaagtgaagttcatggaaaaacttaacccaagtgaaagtctttggttttgtagttttgtttttaatatactttggctttttagttgggttcgtagtcaaaaactcttgtgttaaaggcttgttcaccaaggtttgatatacaagaggacctattggattaataaagagaatgtaagaagagattcgaaattttgaacaaagagccaaaattagtttcaggccaaacacttggttcatatcctgaagcgagccgtttcagcaccaaagcgcctgctgattttgttgaccaaagaaaatgctaggaacctttggctccacgagctgaattttgtgccccactccacaggaaggcagtgcacaacttttcaagtgcttccaaacacccctttgggagaggaaaagttgttgtgcagaagttaataatatgctaaagaggacagattgtatcaattgaaaccttccattttttttttcaactgttaagataaattgtttatttcatgcaacttatgctcatagcaaactttataactttatatcatatcgaaggactactttcatatatgtatttagattagactcactacaagaaaacagttaaatacccactacacccggcaactacatacataatcgctatatttggtgactatttggctacaattatacgagtagaggcgagacgccttggtagtcgctaaagggcgactattatatgacacttcttaatgagtcgccaaatgtagtcgtaaattagtcgctattttgcgattaatatacgacacgttgtaatagtcgttaaatagcgactattatatgacaactgcggcgtgtcattaaatatagtcgcaaaatagacgtaatttgccgactaatatacgacagctcgtaatagtcgtctaaatagcgactattggatgactacagcggcgtgtcattaaatatagtcgcaaaatagacgtaattttcgattaaaaaaacatgtaattcgttttgtaagttgttgtacctactttaaacgactacactatttagtcgtgttttagtcactcaaaaattgcctatataatgaaaatttctcgtacacaatattcattcacaacacaaacacaatactaatattacctttaaaaaaaataaacatttttgaagaaaaaaaacgtttaaaaatatatttagttttattattagtcttataatggcgggaaactataattatccgagtagcggtggttttaatcgagattggatgtacaagaggttcgatgaaatgacgggaatttgtcagcagaatacgtcgcaggagtggaggagttcttgacatttgctaatagccagcctatagtacaaagttgtcgaggtaaattccattgtccttgtgctgtgtgcaagaataaaaaacatatcgtctagggtagaaaagttagtaatcatttgtttagtcaaggatttatgccagattattatgtttggtatatgcatggggaagatttcaacatgaatgtaggaacgagtaattatgtaattgatagtacgtatctaagagagaattatgaaagtgcgggtaatgttgtagaagatccatatgtggatgtgggtaatgttgtagaagatccatatgtggatatggtgaacgatgcatttcgttataacgtggggtttgatgataactatcatcaagacggtactaatcagaatgtggaggaaccagtacgtaaccattctaaaaaattctacgacttgttagaaggtgctcaaaatccattgtacgatggttgtcgacaaggccagtctcaattatcgttagcagctcgagtcatgcagaacaaggcggatcataatatgagtgaaagatgtgtggattcggtatgtcaaatgttgacagattttttaccagaaggaaaccaagctactgattcgcattacaagccagaaaaattgatgcgcaatttaggccttccttattatacaattgatgtttgtattaacaattgtatgattttctggaaagaagacgaaaaggaagataaatgttggttttgtagtgctcaaagatggaagcctatggatgactaccgtcgaagaaccaaagtgccatataatcgtatgtggtatctacctattggtgaccgattgaagagaatgtatcagagccacaagacggcagctgcaatgcgttggcatgcagagcaccaatcaaaagaagaagaaatgaatcatccttcagatgtggcggagtggagatattttcaagagctacatcccacgtttgccgaagaaccccgtaacgtttatctcggattatgtaccgatggattcaatccatttggcatgtcgcgaaatcattctttgtggcctgtgatcctgactccatacaatttaccaccgggtatgtgcatgaatacagagtacttgtttcttacaattttgaattctgggccaaatcacccgcgaggtagtctcgatgtcttcctccaacctcttattgaggagctaaaagagttatggtctactggaatcgatgcatatgttgtgtctttgaatcaaaattttaatctaaaagcagtgttgctgtggacgataagcgactttccggcgtacagcatgttatcaggatggacaacccacggtaaactgccttgtccaatttgcatggaaagtactaactctttttatctacctaatggaaggaagacgtgctggtttgattgtcaccgaagatttctttctcatggtcatccattacggaagaacaaaaaagacttccgaaaaggaaaagacgcttctaccgagtatccacctgagtctttaaccggtgagcaaatttattacgagcggttgtctagtgtaaatccaccaagaaccaaggatgttggtggcaacggtcacgaaaagaagatgccaggctatgggaaggaacataactggcacaaggaaagcatattatgagagctttcatattggaagaatctgaatctccgacattgtatcgatgtgatgcatacagagaagaattttttggataacataatgaatactcttatgagcgtgaagggtaaatcaaaggacaacataatggcaagaatggatatagaacgattttgttctcggcctgacttacatattgatagtaagggaaaagctccatttccagcttatacattgacaaatgaagccaaaatgagtttattgcaatgtgttaaacatgcaatcaaattccctgatggttattcgtctgatttgagtagttgtgttgatatggagaatgggaagttatcaggtatgaagagtcatgattgccatgttttcatggagcggttacttccatttatctttgcagaactcctcgaccggaacgttcaccttgcattatcaggtaaaataagaatataatttactctttatatcatatatgcacttgagatgatgatttttttttccaggggttggcgcattttttagagacttatgttcgagaactttgcagaaaagtcgcgttcaaattcttaagcagaacattgttttgatcatatgcaacttagagaagatcttcccaccatcattttttgatgttatagagcacctgcctatacatctcccctacgaagcagaattgggcggtcctgtccaatataagtggatgtatccttttgagaggttttttaaaaagttgaaaggaaaagcaaaaaataaaagatatgcgaccggatcaattgttcagtcatatatcaatgacgagatttcttatttctcagagcactactttgccgataatatacaaacaaaatcaaggtaaccatgaattatcgatgtgatgcaagttttcaatgcgcaaaaataaccatgaattacctcttttggatcaggttaacaagattcaatgagggtgaagttcctgtatatcatgttcctggagtacctactatatttagttctgttggtcgtccaagtggagaaatacgtgaagtatggctataagaggaagactatcaatgcgcacatggatatgttatacggaattgtgattattttcaagtaattgagaggtatataacaaagtcatactcccattttaagttaattatataaatgtttgtttactaacccttatatgttgtttttgtctttatatagtatgttcgaagattttctttctattaaatatccaggattgaacgaaaaagaacttttcgtgaaaagaaacgaggaatatcatgtgtgggtgaaagattatgtatgtctaaatagtttataatatatatgatttgcatttatttattgttattcttatctctataatgatgtttatttctaaatttgcatacaggttacatattggaactctagtaatccttttccaacttgggttcaagagatagtcaatggacctttgcacaaagtcaaaacatggccagtgtattttacaagaggctatttgtttcatacgcagagtcatggagcaggacgtaagacttgtaactatggtgtatgtgtgaaaggtgaaaattatacggatgcatctgacgcagcagatttttacggcaacttaactgatatcatagaacttgagtatgagggggtggtcagtttgaaaatcacactttttaaatgttcgtggtatgaccctaagctcggaagaggtactcggaggagcaatagtggtgttgtcgacgttctttcatcgaggaaatataacaaatacgaaccctttattttaggtacgtatggtatatatatatggtcatttagtttttctagttcatatacaaatatctaattctccaaatatggtgcatttacaaacaacatctcaagcggaactagtgtgctttattccttatccatacacgaaaaaaccaaagcgggagttgctcaatgttttaaaagtaaatccaaggggaaacatattaggagaatatgaaaataaagacccgagtttattgcaaacagaaaatgatgatgctgttttaataacaacaatagaagatcttgtactcgacaatttgacaatcaatcgcaaccccataaacctcgatttagatgccggagatgctgatccagaagatgaatttcgatgtaatttatcgtcttctgatgatgaagaacaacaagacgaagaataatattagttttgtgtttatgatatgtacataagttattttgaaatactatgcaaacatttttaaattattttgaaaaactatatttattaagtatgttatgtttatttatatttctatagataattactatttttgaatatctatggcccaaaaaaacacaaggcccaaacccaattattaaaaattaaacaaagcgactaatttgtgacaatttagcgactataaccattctattgggccaaaataactcgaggcccaaatagggtgactaatttgtgacaatttagcgactaccgaaaaattattgggccaaaaatttcgaggcccaaaattggtgactaatatgtgacaatatagcgactaatgtttaaattttgagaactttttaggcccaaacccattagacccaatccctttcaatgtcaaaaccctaagttccatctctttctcttcgaaacatccgcagccttcttcttcgatttctctcttcctcttcgatttcctctgcgaaaccctagcaaatttctctcttcctcttcgattttcctcttaatctctctaccaaacatctgcagtcttcttcttcttcaatctctctcttcgatttcctctttgaaaccctaccaaatcaatctttcctcttcgtttttctcttaaatctcttcttcttcttcttcgatttcgtcgatttgaacctctgtctcatctagatctctccttaatatcatgtttgggcgaggaaaaaagaagcgaaccagtcctaaccttgctcagagagcctccacatccacggctggtcgacgacctcgttctctcccgtcccagtacaatttcacgccgacagcagaacggtcgcctcagctacagacgcctgcatcagaagacgcggtcctcctttaaaggcaacggcagctcatgttcggagctatccgccgcctctgcagttgttccagcactctggcagttgacaacctgaagtgcaaaggtctgcctccgtggaagtgcagaacaatcctgcgaatcaaggcgcgactactcagcaggttcctccggctcctcaacaagaccctccgccttctcagcaagaccctctgccttctgcagttcaagagtcttgggctcacagtcacccatcctctcaaggcaacaacttcgaagaatatccacctttctcgccggatctccaggaggacacacttcaatccctaaacgatcttcttatgttgccggagagggataagttcgtcaccgtcctctctcccgttcctcgaccgaataccacctggtatgatcttcttcttctcttgtttgtgatcccatgttgtgttcaattagggtttagttgagaaatgagctttgtgagattgattagattaagaaaatgtctgaattgattctttgttgtgtctcgtgttgtgttggtctgaaagttttgttcttaggatttaagttatgtgttttgttcttagggtttagttgggtaatgatctttgtgacgtgttgtgttggtctgaaagtccttgatattatagatgttactttgcagccacaatctattctcatgtttgaagagtcttgttgtgttggtcttattttgttgtttgcgagaacaggtagtttaagttgtgttttgatcttagggtttagttgagtaatgagctttgtgagattgattagattgagaaaatgtctgaaatgattctctgttgtgtctcgtgttgtgttggtctgaaagtctgaaagttttgttcttaggatttaagttatgtgttttgttattagggtttagttgggtaatgatctttgtgacgtgttgtgttggtctgaaagtctttgatattatagatgttactttgcagccacaatctattctgttgtttgaagagtcttgttgtgttggtcttattttgttgtttgcgagaacatgttttgttaagttgtgttttgatcttagggtttagttgagtaatgagctttgtgagattgattagattgagaaaatgtctgaattgattctttgttttagtctcgtgttgtgttggtctttggtctttgatattttgatgttctttgcagccacaatctattgcaatgtgtttgaagagccttgtcgtctaggtctctactctacttgttgtttgcgagaacaactgcttgtggctgcaaagtatcgtgtctgtcattgtgtaagtttagttctagatctttgcagccacaatctatgttctgctctatatgatctgtttgtactttgcagccacaatttatgttttgctagtctttggtctgatatttagatattttctgccatataataactgcttgtttttcttgtgtttggaggtttactcgggacacaaactcacgacttgttaggaatatcactagagtgtttacaaacaagtttgatggtccctactacagctggacatgtgtgcctcaagagagacaagagaaatacttcctcgagtttgctgttaactgttctttcagcccttcttttatatagttgattacacttcttttttttactgacattaccttttctatttgtagaaaacacaccattgggatcctttgatcacagggactgttcagttttacttcaacgagatctgtttaaggcgaatgaaaggcatggttagcactgtaagaactagtcgaaagaaacctaaatggattgggaaaactctatggaaggaaatgactgcgtactgggacactgaagaagctcaggaaagaagtcaaatctattcaaatgcccgtatgtctgaccgtaatggtctaggtcctcacatacacttcttagggtctaagtcatatcatcaaatccgggacgaattggcaagtcttctctctgtttactcctttgcaactttaactcgatgtttcaatgtacttttctatgacttgttttttttttcattacaggaagaccaattgggcaaaactgtcagtattggtgacgttttcatcaaaacacatacaaaacctgatgggacgtatgttgatcgaaaggcagagaagatttcagagttatatcagaagaatttgcagctgaggcagtctgagctcgaggctgaagcttctgctgtttcagatggcacttcgcgggtacgggagctcacagctgaggaatgtacaaccatatttcttcaggtaacgttttatgtttcccaatttagtgtttttgagttgtctttttcagtctctaatctcagcttttatcatactatgcagtccactgagagggattcgagaggcgttccttatggagtaggaagcctcaaagagtctcttgtcaatggcaagcggaagcaagcaggtgactcaacttcttttgtggctttgcaagaacaattacttgaagctcaacgcaagatagaagagcaggtctcttgcattcagaggcgtgaagctgagaattc

SEQ ID NO: 82 - DNA, 100815 bp, Arabidopsis thaliana
gaattcttcaaactcttcatccgaactggaggcgtatttggcatcccaagtaacaggaaataatccgctgggcattctttgtttctctatccaagcaatatcctacaagtgaatactaattattaagttgttggaaacaagttagtttaagaagcataatatataaatgacgtcattacaagaaatatctacattattaccaagagagaagagctattatatgttcttaggtgatcacccgcgctacgccgcagttttttcagattttttttatattgtttaatttaaatattttttatatatctaattattcactcatgcaataagaaaatatttttagtattaaaatatttttttctaacaacattctcaatatttcatcatatacataattcataaacaacgttcatcttaaaccaatttaaccgagggtagtgttcaattctagaatcctaagaatttgatgatggagctccgtacgtattttgcaccttcggtgatttattatataaatattaatttaagagaataacttacttaaatcattaactaatccacgattattatatactcatactttgagtttggattaccaaaaaaatctttgataataaaaaaactattaaaatagttttattgaaaaatcatgtaatattaaaataaatttagtattagtatattaaatatttaaaataaaataatatataaaataaaataatatataaaattaaataataaatgttcactaatctataattattagtacattacattaattatttaatagacacatgacaaatactaaagtgatgatgtagcaatcatatggttagagttgaccaactttcatatatatgattaataaagctgtattatgcccctgttaagaccaatcaaattgtcatacaacgaaaattcaaaaagtagactctagctatattttgaacttagtgagtagaaaccaaaacgttttcatcatattgtatgatgagctaattaccatcataacttcctaataaatacaattccgtttcatttccatttaatcagatttctaccaactaaattttgtaatcgtttttgtaatcgttttatttcaaacacccttaacaattcccttaatgtttccaattaatttttgccgttacacacccttccttcatatcaaattcaaacaatcatcttcttcccatttctttaaaaaaccttaagatcttcttccaattgaattatttggtctccatttttattataaaacctataaagatgtttccaacctcactcgtctatttgtttattaaagtttaaattaccatccaatagccccagtttctccaataacaaatgacgatcaccactcatatccatcctcgaagcattaaatttcaaaatcaacactcaaaccattgttgttcgtccaatccaaacgttggaagtttgtgatttcaaacgttataatattttgcttagcatcgacagtcttcttatggatgaaaagatatagtaaactaattcctaacacaattcatattcccttccgttccacactttaatttactattttcataatattcatgtatgtagccatgtaggataatgcatttgtaaacaaaaaaaaattatgtactacaacagtgaagttaaaaaaaaaacaattaaagaaataaaatcaatatcatgcaaaaatttctaaaatataccaaaacaaacttgcccaacaggcaggctttttttctagtctacaataaacgagagttgcgatacaataatagttgtcgattaaaagaaacaaagatatcggaatcaaagtcaactaaattaatcagagtaatagaaaaaacttttttttttgttgcaagacatcaatcaaagtattataaaaagactccatcgacgaaagatctatctaatagaaaacaactcaacaacttgttcaagcctaaaacaattataaaaaaaaagttatataaaaaaaaaaacactcaagatttagaatctaagcatatttattaatgaacgtagacgtccaaaaaaatgaactgtactggattacaatgatcagtatttctctgtagttctaacaatcccaatttttttaaaaaaaaaaaagaaaaaaaaatcctcaactatttatttgatatatttttccaaaaatgtggttattatggaaagtgaaattttaaatgtggagggtgacaagcatctttgcttagtatataaaaaaagcctttctcctttcttatcctccaagatttaacaaagagaacgagagatatggagaacaaaactcaagaggaagcttcgaccatcaaagtttcatcccttacttgcatagatcttgccaacccgaactttcaacaatcagcggtttctcttaaacaggtatgtttttattttttctttattatagctaagtatgtcaaaaacattttattttcagatatgtatggaaaaaaaagttgactcgttgtgtgtgggttattcttgttccaggcatgtctagattgtggatttttctatgtcacaaatcatggtataagtgaggagttgaaggacgaggcttttgagcagagcaagaagttctttgctcttcctttggaggagaaaatgaaagtcttgagaaatgaaaagcatcgaggctattcacccgtccttgatcaaattttagatcctgagaatcaagtcgacggtttgtttgaccatcttttcgcttgcttgatcaaaactttgttgttgatgatctcaatcttgttgtaacctcatgggtttcaggtgattacaaagaaagttttttcattggaatcgaaggtgtcaaatacaccattctatagccccaacctatggcctgaccatggttagttttttttcttccatagttagctcttttatttgtcaacctcatgttttctaccttatataaactttgatgtttctggcagttgttttgccgggatggcgggcgaccatggagaaatatcatcaagaagcattgtaagtatttgtttattatcatgaagtagctagtttatttcttcagactttgaggcaagattaaattcttcagtttactaaggccatactaaaaccatttaataattaatggattagtatgtggattcagttatggatttgctattttttaatggcatttatggatttttcaaattttttgaatagtttgtggattttgtcactttttaggctatagaaatataatttaacatgcgttttattcattatatttgggtttagtcggttgtacttgttttgaagatttaaagtttttgatataaagtacgtatttttgccaaaaaatcttaaatccgtaatttttaataaaagtgataatttcaaaagattttgatgaaaagggcaaaatcaacaataatccttgtgtttttttgacaatataagaccttacattttttcttttgatgtggataggcccctaacagggaagttttctaaacgttatactaatgatgagcttttcacatggtcaggagggtttgcaaggctattgctagattattagcattggcgctcgacttggacacaaattactttgataaaccggaaatgctgggaaatcctatcgcagttatgcgtttgcttcgttacgaaggtgatatattttcttaagcttcgtagccctacttatcctaaacaattttctttcttccttttgttaccttttagggatgtctgatcccttgaaaggaatatttggatgtggagctcattctgattacggaatgctgactctcttagcaaccgatagtgtaaccgggctccaggttttcacatttttgctagtcatataactttagatgtgaccaggtttggttatgagaaattgctatacgatggcagatatgcaaggataaggacgtgaagcctaggaagtgggaatatgtaccatctattaaagggtataacgagaatttaaggtcttaggatccatgatccaattttaaacactacactaactcccatgataaaaaatttgtttataaatttcctctttaagagcatatatcgtcaatcttggagacttgttggagcgttggagcaacggcatttttaagtaatttcgatttctgtgagcttactctccctaatgtctcttttcaccctctacattgtcattttcccaaataaagttttctagctgacatttttctcacatatacacatagatccacattgcatcgggtacttgggaatggtcaagaccgatattccgtaagtctcttaataatacacatccgagtctatccttacaatttcttacaagacgatgtgctctatatagttgttataatttgtcaacaatctagcttattgttgatcatgtctacaaatcacaaatgagttataatttctcaacaatctaggttataacactcaaaatgttttttttatttgttcttgtcacagattccattcttcatagaaccgagtcacgactgtctagtagaatgtctacctacctgccagtccgaaaacaaccttcccaagtaaggctttaattctttaccttgttacattgagaccttggacatgtaacaatgtctcctaaagacattaacgattgtgtttaatgaatagatatccagctatcaaatgttcaacgttcctcacccaacgttaccagcaatcacatgtgaatttgagcatctacaaacagccctaagtgaagttcatggaaaaacttaacccaagtgaaagtctttggttttgtagttttgtttttaatatactttggctttttagttgggttcgtagtcaaaaactcttgtgttaaaggcttgttcaccaaggtttgatatacaagaggacctattggattaataaagagaatgtaagaagagattcgaaattttgaacaaagagccaaaattagtttcaggccaaacacttggttcatatcctgaagcgagccgtttcagcaccaaagcgcctgctgattttgttgaccaaagaaaatgctaggaacctttggctccacgagctgaattttgtgccccactccacaggaaggcagtgcacaacttttcaagtgcttccaaacacccctttgggagaggaaaagttgttgtgcagaagttaataatatgctaaagaggacagattgtatcaattgaaaccttccattttttttttcaactgttaagataaattgtttatttcatgcaacttatgctcatagcaaactttataactttatatcatatcgaaggactactttcatatatgtatttagattagactcactacaagaaaacagttaaatacccactacacccggcaactacatacataatcgctatatttggtgactatttggctacaattatacgagtagaggcgagacgccttggtagtcgctaaagggcgactattatatgacacttcttaatgagtcgccaaatgtagtcgtaaattagtcgctattttgcgattaatatacgacacgttgtaatagtcgttaaatagcgactattatatgacaactgcggcgtgtcattaaatatagtcgcaaaatagacgtaatttgccgactaatatacgacagctcgtaatagtcgtctaaatagcgactattggatgactacagcggcgtgtcattaaatatagtcgcaaaatagacgtaattttcgattaaaaaaacatgtaattcgttttgtaagttgttgtacctactttaaacgactacactatttagtcgtgttttagtcactcaaaaattgcctatataatgaaaatttctcgtacacaatattcattcacaacacaaacacaatactaatattacctttaaaaaaaataaacatttttgaagaaaaaaaacgtttaaaaatatatttagttttattattagtcttataatggcgggaaactataattatccgagtagcggtggttttaatcgagattggatgtacaagaggttcgatgaaatgacgggaatttgtcagcagaatacgtcgcaggagtggaggagttcttgacatttgctaatagccagcctatagtacaaagttgtcgaggtaaattccattgtccttgtgctgtgtgcaagaataaaaaacatatcgtctagggtagaaaagttagtaatcatttgtttagtcaaggatttatgccagattattatgtttggtatatgcatggggaagatttcaacatgaatgtaggaacgagtaattatgtaattgatagtacgtatctaagagagaattatgaaagtgcgggtaatgttgtagaagatccatatgtggatgtgggtaatgttgtagaagatccatatgtggatatggtgaacgatgcatttcgttataacgtggggtttgatgataactatcatcaagacggtactaatcagaatgtggaggaaccagtacgtaaccattctaaaaaattctacgacttgttagaaggtgctcaaaatccattgtacgatggttgtcgacaaggccagtctcaattatcgttagcagctcgagtcatgcagaacaaggcggatcataatatgagtgaaagatgtgtggattcggtatgtcaaatgttgacagattttttaccagaaggaaaccaagctactgattcgcattacaagccagaaaaattgatgcgcaatttaggccttccttattatacaattgatgtttgtattaacaattgtatgattttctggaaagaagacgaaaaggaagataaatgttggttttgtagtgctcaaagatggaagcctatggatgactaccgtcgaagaaccaaagtgccatataatcgtatgtggtatctacctattggtgaccgattgaagagaatgtatcagagccacaagacggcagctgcaatgcgttggcatgcagagcaccaatcaaaagaagaagaaatgaatcatccttcagatgtggcggagtggagatattttcaagagctacatcccacgtttgccgaagaaccccgtaacgtttatctcggattatgtaccgatggattcaatccatttggcatgtcgcgaaatcattctttgtggcctgtgatcctgactccatacaatttaccaccgggtatgtgcatgaatacagagtacttgtttcttacaattttgaattctgggccaaatcacccgcgaggtagtctcgatgtcttcctccaacctcttattgaggagctaaaagagttatggtctactggaatcgatgcatatgttgtgtctttgaatcaaaattttaatctaaaagcagtgttgctgtggacgataagcgactttccggcgtacagcatgttatcaggatggacaacccacggtaaactgccttgtccaatttgcatggaaagtactaactctttttatctacctaatggaaggaagacgtgctggtttgattgtcaccgaagatttctttctcatggtcatccattacggaagaacaaaaaagacttccgaaaaggaaaagacgcttctaccgagtatccacctgagtctttaaccggtgagcaaatttattacgagcggttgtctagtgtaaatccaccaagaaccaaggatgttggtggcaacggtcacgaaaagaagatgccaggctatgggaaggaacataactggcacaaggaaagcatattatgagagctttcatattggaagaatctgaatctccgacattgtatcgatgtgatgcatacagagaagaattttttggataacataatgaatactcttatgagcgtgaagggtaaatcaaaggacaacataatggcaagaatggatatagaacgattttgttctcggcctgacttacatattgatagtaagggaaaagctccatttccagcttatacattgacaaatgaagccaaaatgagtttattgcaatgtgttaaacatgcaatcaaattccctgatggttattcgtctgatttgagtagttgtgttgatatggagaatgggaagttatcaggtatgaagagtcatgattgccatgttttcatggagcggttacttccatttatctttgcagaactcctcgaccggaacgttcaccttgcattatcaggtaaaataagaatataatttactctttatatcatatatgcacttgagatgatgatttttttttccaggggttggcgcattttttagagacttatgttcgagaactttgcagaaaagtcgcgttcaaattcttaagcagaacattgttttgatcatatgcaacttagagaagatcttcccaccatcattttttgatgttatagagcacctgcctatacatctcccctacgaagcagaattgggcggtcctgtccaatataagtggatgtatccttttgagaggttttttaaaaagttgaaaggaaaagcaaaaaataaaagatatgcgaccggatcaattgttcagtcatatatcaatgacgagatttcttatttctcagagcactactttgccgataatatacaaacaaaatcaaggtaaccatgaattatcgatgtgatgcaagttttcaatgcgcaaaaataaccatgaattacctcttttggatcaggttaacaagattcaatgagggtgaagttcctgtatatcatgttcctggagtacctactatatttagttctgttggtcgtccaagtggagaaatacgtgaagtatggctataagaggaagactatcaatgcgcacatggatatgttatacggaattgtgattattttcaagtaattgagaggtatataacaaagtcatactcccattttaagttaattatataaatgtttgtttactaacccttatatgttgtttttgtctttatatagtatgttcgaagattttctttctattaaatatccaggattgaacgaaaaagaacttttcgtgaaaagaaacgaggaatatcatgtgtgggtgaaagattatgtatgtctaaatagtttataatatatatgatttgcatttatttattgttattcttatctctataatgatgtttatttctaaatttgcatacaggttacatattggaactctagtaatccttttccaacttgggttcaagagatagtcaatggacctttgcacaaagtcaaaacatggccagtgtattttacaagaggctatttgtttcatacgcagagtcatggagcaggacgtaagacttgtaactatggtgtatgtgtgaaaggtgaaaattatacggatgcatctgacgcagcagatttttacggcaacttaactgatatcatagaacttgagtatgagggggtggtcagtttgaaaatcacactttttaaatgttcgtggtatgaccctaagctcggaagaggtactcggaggagcaatagtggtgttgtcgacgttctttcatcgaggaaatataacaaatacgaaccctttattttaggtacgtatggtatatatatatggtcatttagtttttctagttcatatacaaatatctaattctccaaatatggtgcatttacaaacaacatctcaagcggaactagtgtgctttattccttatccatacacgaaaaaaccaaagcgggagttgctcaatgttttaaaagtaaatccaaggggaaacatattaggagaatatgaaaataaagacccgagtttattgcaaacagaaaatgatgatgctgttttaataacaacaatagaagatcttgtactcgacaatttgacaatcaatcgcaaccccataaacctcgatttagatgccggagatgctgatccagaagatgaatttcgatgtaatttatcgtcttctgatgatgaagaacaacaagacgaagaataatattagttttgtgtttatgatatgtacataagttattttgaaatactatgcaaacatttttaaattattttgaaaaactatatttattaagtatgttatgtttatttatatttctatagataattactatttttgaatatctatggcccaaaaaaacacaaggcccaaacccaattattaaaaattaaacaaagcgactaatttgtgacaatttagcgactataaccattctattgggccaaaataactcgaggcccaaatagggtgactaatttgtgacaatttagcgactaccgaaaaattattgggccaaaaatttcgaggcccaaaattggtgactaatatgtgacaatatagcgactaatgtttaaattttgagaactttttaggcccaaacccattagacccaatccctttcaatgtcaaaaccctaagttccatctctttctcttcgaaacatccgcagccttcttcttcgatttctctcttcctcttcgatttcctctgcgaaaccctagcaaatttctctcttcctcttcgattttcctcttaatctctctaccaaacatctgcagtcttcttcttcttcaatctctctcttcgatttcctctttgaaaccctaccaaatcaatctttcctcttcgtttttctcttaaatctcttcttcttcttcttcgatttcgtcgatttgaacctctgtctcatctagatctctccttaatatcatgtttgggcgaggaaaaaagaagcgaaccagtcctaaccttgctcagagagcctccacatccacggctggtcgacgacctcgttctctcccgtcccagtacaatttcacgccgacagcagaacggtcgcctcagctacagacgcctgcatcagaagacgcggtcctcctttaaaggcaacggcagctcatgttcggagctatccgccgcctctgcagttgttccagcactctggcagttgacaacctgaagtgcaaaggtctgcctccgtggaagtgcagaacaatcctgcgaatcaaggcgcgactactcagcaggttcctccggctcctcaacaagaccctccgccttctcagcaagaccctctgccttctgcagttcaagagtcttgggctcacagtcacccatcctctcaaggcaacaacttcgaagaatatccacctttctcgccggatctccaggaggacacacttcaatccctaaacgatcttcttatgttgccggagagggataagttcgtcaccgtcctctctcccgttcctcgaccgaataccacctggtatgatcttcttcttctcttgtttgtgatcccatgttgtgttcaattagggtttagttgagaaatgagctttgtgagattgattagattaagaaaatgtctgaattgattctttgttgtgtctcgtgttgtgttggtctgaaagttttgttcttaggatttaagttatgtgttttgttcttagggtttagttgggtaatgatctttgtgacgtgttgtgttggtctgaaagtccttgatattatagatgttactttgcagccacaatctattctcatgtttgaagagtcttgttgtgttggtcttattttgttgtttgcgagaacaggtagtttaagttgtgttttgatcttagggtttagttgagtaatgagctttgtgagattgattagattgagaaaatgtctgaaatgattctctgttgtgtctcgtgttgtgttggtctgaaagtctgaaagttttgttcttaggatttaagttatgtgttttgttattagggtttagttgggtaatgatctttgtgacgtgttgtgttggtctgaaagtctttgatattatagatgttactttgcagccacaatctattctgttgtttgaagagtcttgttgtgttggtcttattttgttgtttgcgagaacatgttttgttaagttgtgttttgatcttagggtttagttgagtaatgagctttgtgagattgattagattgagaaaatgtctgaattgattctttgttttagtctcgtgttgtgttggtctttggtctttgatattttgatgttctttgcagccacaatctattgcaatgtgtttgaagagccttgtcgtctaggtctctactctacttgttgtttgcgagaacaactgcttgtggctgcaaagtatcgtgtctgtcattgtgtaagtttagttctagatctttgcagccacaatctatgttctgctctatatgatctgtttgtactttgcagccacaatttatgttttgctagtctttggtctgatatttagatattttctgccatataataactgcttgtttttcttgtgtttggaggtttactcgggacacaaactcacgacttgttaggaatatcactagagtgtttacaaacaagtttgatggtccctactacagctggacatgtgtgcctcaagagagacaagagaaatacttcctcgagtttgctgttaactgttctttcagcccttcttttatatagttgattacacttcttttttttactgacattaccttttctatttgtagaaaacacaccattgggatcctttgatcacagggactgttcagttttacttcaacgagatctgtttaaggcgaatgaaaggcatggttagcactgtaagaactagtcgaaagaaacctaaatggattgggaaaactctatggaaggaaatgactgcgtactgggacactgaagaagctcaggaaagaagtcaaatctattcaaatgcccgtatgtctgaccgtaatggtctaggtcctcacatacacttcttagggtctaagtcatatcatcaaatccgggacgaattggcaagtcttctctctgtttactcctttgcaactttaactcgatgtttcaatgtacttttctatgacttgttttttttttcattacaggaagaccaattgggcaaaactgtcagtattggtgacgttttcatcaaaacacatacaaaacctgatgggacgtatgttgatcgaaaggcagagaagatttcagagttatatcagaagaatttgcagctgaggcagtctgagctcgaggctgaagcttctgctgtttcagatggcacttcgcgggtacgggagctcacagctgaggaatgtacaaccatatttcttcaggtaacgttttatgtttcccaatttagtgtttttgagttgtctttttcagtctctaatctcagcttttatcatactatgcagtccactgagagggattcgagaggcgttccttatggagtaggaagcctcaaagagtctcttgtcaatggcaagcggaagcaagcaggtgactcaacttcttttgtggctttgcaagaacaattacttgaagctcaacgcaagatagaagagcaggtctcttgcattcagaggcgtgaagctgagaattcccaagctgcagatgagcagaagaagaagcttgagcacttgtccttagaggagaagtttttgcgcgaaaatgatcctcggttcctcaatttcctcgaatctcattcagctaaggagacaaccacagatcctatctcaccctctccagctgcctctccctcttcatctgcttcataggtctgaatcttaactccttcctcaagactcaatatcaaggctcaaagtttttatatgtgtacttgtgttgcttgtgcttatgctgaacaaaattctaagttgtagtgaatcgaacatgtttctgtaatttgggttttgtacttttctgaaatgacaataaatttgttttcatgcttcttgtatgtgtttatgcttattgtaaagttttgttttctcaggaaggtttcaatctttataacaatcatatagatgttctaataacaacaatagtcgcaaatttagtcatcaaaaatgtaaccaagcagtcgtttatttataacaattcagtcacaaaaatttccgactaagtgctattttagtcgcaaatcagtcttaaaaatagtgacaacgtagtcgtaaattttaacgactaattaccaacaacgactaaataaccctcaagttaatcgttaatttgtcgtctaatagtcgctaaatttagtgacaacgtagtcgtaaattttaacgactaattgcctacaacgactaaataaccctcaagttattcgttaatttgtcgtctaatagtcgcgaaatttaacgactaaaatgtctctaaaaaagcgattacccaaacttagtcgtaactttgtcgctcttttgcgactaaaatacgattacgttatttagcgactctcgattagcgactaattttaatagtcgtttatttgtcgtaaataggagtttaacgactacagagtaactaatactgtagtcggtaaatgacaattttcttgtagtgactggattatcagccactgtaaatgcgggttactattagtttataagaattatgttttgggtttttatgtgtgtttaaactatatttgagctagttagacttacttaactctttagcattttcgctatccttaaagtgtgtcaataagaaaagaaaacttattaaagcaatatttttacaagttatacctatcaaattttggagtgcatgcaaatgagatttcgaagataggattcgatcggtcagttgcatatgtgatcgtaatataatgatggccattggccaacggacccgacaacgtgacctgtttttacattattgatcctttctctctagttttcgaataaaaaaaagactagtattaatttgatattttccaattgaacattaagaacgtggagccaagtggctgtggttaatacatatatgtatgattatatggtagtggcatcgcttactataagataagctaaacaaagaaaaaacttttatatttcctatccaaagaaagactagagagtggtagagaaatggagaataaaactgaggaagaggtatcaatcatcaaagtttcttcccttacttgcatcgatctcgacaactctgatcttcatcaatcagctgttttactcaagcaggtctacgtccatttatttttcttaaaactgattacagtatgaacattataccttccgcgaaaaaacattattaattcggtcattatgtgttatatatatattcttgttccaggcatgtctcgatagtggatttttctatgtcataaatcatggtataagtgaggaactcaaggatgaggctttcgagcacagcaagaagttcttcgctcttcctttggaagagaagatgaaagtcttgagaaacgaaaagtatcgaggctatgcaccattccatgattctctcttagaccctgaaaaccaagtccgaggtctgtcagatcagctttcgcttgcttaggctaaaagttttgttgttcatgtatatctcactcttgttgtaatgtgatggggtttaggggactacaaagagggttttaccattgggttcgaaggtagcaaagatggtccccattgggataaaccattccatagccccaatatttggcctaaccctggttagtttttaccgtctcattgtttgttaatttatgctttgatctttaaataaactctaatgttttttgtagacgttttgcccggatggcgggagaccatggagaaatattatcaagaagcattgtaagtgtcatgtttgtttagaaaatatttaaatagggaaatcaagtgggaaaatttgctaatgacttaaaggataaaaatttagttggaaattaggtggaaagtttgatttaaaacaacttgactctttttctcccaatgaatgtgacatctctctctccacattagttataaacaaaaatattccacatatagaattccctcagagcatccacattggacatacctttgtaggtgtttcaaaagtaaattaagattaaatttaaagacatcttctattttgggggtctgaaatgtctttctaaatactctattacacatttaaagacacaccttcttgtttcttctattatttttaactagatgaattctcacggtacgcgtgggtttgttttaaaaattgttaataaaaatatgttaattgttttaatcgctaatttatgtttatttttttgtttattattgtataactaatagaattagactcataatagtatttacgtttcgacagttgttccaaataccaccacctcagtgataatttaagtgagtgtatatttaatgttatgtatatcgatattgtgaacttgagttgtatctaatgttttcattttttaatttccgtataggttatacatgatgatggttttgtatcctatttatggtacttgtcccttggtaaacatttactgatgttgtttgaaacacatataaaaataaattggttatgatgttgtcccgtggtaaacaatgtctgtttgaatatttatagagcttatagtagtgaaagcttgtaatcccataagctgggagtgtgaatatgttttagtgaaataaattgtgcatctatttaaaagacagttacagctgcttgttccttgattcagttctgtgtagcttctactgtggcatccattctggcagttacaaggtataaaacgttttttctaaataaatatgatgtacagaaagggagactacattgttggatttagaagcattaagccatcattgaaatggggccgacctattagtattgcactctaatagattctaaaacacatatggcccatctggcatgagctattttgtttactctatttgacacttataattagaagctgatgtgtaaaaaataaaagctgaatcatattaatgaaatgtttttattggaagattagaaagctgatgtgtcatctccagaaaagcttaaaatgctgacgtggcaaaatgatggagagagttgagcttctttcatatatatgatttaaagacatcttcatacaatctccattgcacataaaaatgagggtatttaatttgaaataagattataaaaagaaaacaatagacatttttagttagagagagtctagatagagacatttgaatactctctctcttgtatggttcttcccgtgtcaactttttatttgtttttaaattttaaataattaaactaaataaaaagtattattattaaattttaaagatacacttatcattagttaaccaatgcagatgctctcaaagtatcaccaatgaagatggtctaaacgacttcagttacttttggtctaaattttttgttatattgcttttttggtcacaaatatcagaccattaattaaggggatggtaaaaaaaaatatcatagcattgagtaacaatgatatatcactaattttcctttattcgtcattgtatttatagttaaaacttaaatacgaaaaaaagaaaaacgttaggcaaatatttagaattctgaactctagtatcatgtcaaaacttatggatatgcatcttaaaattaattgacaatactatactaggtgccatacatatattttctgtggaactcttaaggaacaaagtttttcaaactgtatacttatgatgagcccttctacatgatcaggagggtttgtaagtctattgcgaaaataatggctttggcgctcgacttggatgtggattactttaatacaccagagatgctgggaaatccaattgcagatatggtcttgtttcactatgaaggtattttcttaattgcattagctttgtatgtcaatgtcatacttattctcattattcttcattttttgttatattttagggaagtctgatccctcgaaaggaatatatgcatgtggagcacattctgatttcggaatgatgtctctcttagcaactgatggtgtcatgggacttcaggtttggcacaacttttaccactctcatataattaacttcatatgtgatcaagttactaatataatatctaattgcagatatgcaaggataaagacgtgaagcctcaaaagtgggaatatactccatcgattaaagggtataacaacaatgagatattttaggtttttgggttgttgatacatttaaattgctacactaactcccataacatatttttgtttattacgttataatgttctgctttggtaaatttgtttccgtctacagagcctatattgtgaatcttggtgatctgcttgagcgttggagtaatggctatttcaagtaaagtttttgtttgtttgtgcttcgctcaatacatcatgtaacatgattttcaagtacagtttcttttgtaatgacatttttttccacatgtttttataccttacagatctacattgcatcgggtactcgggaatgggcaggaccgatattctgtaagtttcttactatacagtcgaagaatcttcagccacaagccaaatctcattgatatcatttctcaaaaatctagtttttatcaaacatgttcgtaagggaattcgaaaaattacgtacatttctatttaattataagttttcttctcacacagattccattcttcctgaaaccgagtcatgactgtataatagagtgtcttcctacctgccagtctgaaaacaaccttcccaagtaagcatttaacacttcaccttgttacattaagaccttcaactagtaacattgccttatagatgtttatggttgtgttaaatgaatagatatccagcgatcaaatgttcaacgtacatctcccaacgttacaaagcagtacatgcacacctaaaacagacctaggtaggtgaagtatggtccatgcgtaccacgctctaaagtcccacgatatgaatgcttcgttttccaattggtttgttgttaaaattctatatctatctgatggagatctattcaattaataaagatcatcatttaagtgattacagatgaatttctcgaatcggaattttgggttatttatttcagtttacaaaatcatggaagacgctacgtcctctatttacgacggttatttggtattttaatataaattttgggggaaaaaatctgtttgagatgttttggaatgattatgtgaattatgtccaagttttgtaatcacaagcaataatttgatttgtttttacgtaaagcataagccaaggaccttccatatgttgtgactactactgacattaaaaatttgatggacaagacaaattaagagtgtagccaaacatacaagctgtggccaaattaaccccaacaccttgcgcattccgtgctatagtgaaattggctacgccttaatatgcttttgggttctcctagcgacataaagttatagaaatccaagacaaccaaatctatacgcattttacgggaaaaaaattattgtatacttaccaataaatataaaaagttagatgcaaggcatcaattagatagagtgtattagaaaaagactcgatcgactcaagggactaatagaaaaagactcaacacttgttcacacataaagcaattaaaaaaccactcaagatatagaatcacagcatgttataattgatgaacattcaatatatatgtgtcctctagttcttgaataaaaccaaatttaatatgatataaagaacaaactattaattttgatatttttctcgaaagatgtggttattttggctgttaacatatcacaagactttaataacagtccgattgaaattttaaatgtggagcttacataatatatgaatttatagcagtggaatcttggaacaagccattgtccttatcttgaaagagtcaacacagagaattagagagatggagaacaaaactcaagaggaagcttcgaccattaatgtttcatcccttgcttgtatagatctcgccaactccaatcttcatcgatcagctgcttcgcttaagcaggcttggctcttcttctttctttttctcaacgtcaatgattacggtttggcctttattagttatgtgactagttgttggttattcttgttctaggcatgtctagattgtggatttttctatgtcacaaatcatggtataagtgaggagttaaaggacgaggctttcgagcaaagcaagaagttctttgctcttcctttggacgagaagatgaaagtcttgaaaaacgaaaaacatcaaggctattcacccgtccttagtcaaatctctgataaccaaatccatggttcgtgtaaccaagtttcacttgcttgatcaaaaaaatttgttgttaagtgttcccaatcttgttgtaacctctcatggattttaggggattacaaagaaagttttttcattggaatcgaaggctccaacgatacaccattctgtcgcgctaacatttggcctaaccctggttagtaaacactttttgtaaatttaatgaattttctttgaataaatttgatatttttagcagatgttttgtcgggatggcaggcgaccatggagaaatatcatcaagaagcattgtaagtcgttgttttcgtcttctaaagtagatgtttcttttctttagatttgaatataagggtatgaaacctgtttcccacaatgagtatatacgcgtctcatgtgtgcttgcttatgcaaataacaaataacttttgagactagattaagttcttgtgtaaagtgactcctgacatataaattttttataaccgtatactgatgatgatgagcctttctccattgtcaggagggtttgtaaggctattgctagagtattggcattggcgctcaacgtggatggagattactttgatacaccggaaatgcttggaaatcccctcacatttatgcgcttgcttcactatgaaggtgatgtttttactttatcacattaatcttaatgtcaatgctctactcatcccaattaattttcttccttcttatgttaccttttagggatgtctgatccctcaaaaggaatatatggctgcgggccacattctgattttggtatgatgactctcttaggaacggatagtgtaatggggctccaggtattacgcgattttcaccatagtcatataacttttgatgtgaccaggtttggttataaaaatttgtcttatggcagatatgcaaggatagagacgtgaagcctaggaagtgggaatatatactatcgataaaagggtataatgagatttttttttaggtccatgctccaatttacactaactcccataacaaaaaattgtttttatatggtttgttttcctatacagggcatatatcgtgaatattggtgacttgctagagcgttggagcaatggcatttttaagtaaataattgttgtttgagctagctaatttatccttttgcattgtgattgatttttgcaagtaaagttttcttgctaacatttatctcacatgtttttttttacacatagatccacattgcatcgggtacttgggaatggtcaagaccgatattccgtaagtctgttggctaaacccatccgcgtctatctgcacaaattttttcgacatgtccacttttcggtgcggttattgtgaaagaagttttaaccagatgctcaatgtcgtcattataatatatcaacaacaatctacggttttgttaaacatgtttacacatgagttcgacatatataatctaacattggaagtgtatttgatgtgttctcaccgcagattgcattctttctgcaacctagtcacgactgtatagtagaatgtcttcctacctgccagtctgaaaacaaccctcccaagtaaggacttaacttctttaacttgttacattgagacattggacatgtaacaatgtactaacgacgttaattaattatgtgtgcgtagatatccagctataaaatgttcaacgtacctcactcaacgttaccaggattcacaagtggatttgagcatctacaaaaaatagacctaagtgaaagtctttttggttttttttagaaaggtccaagcccttcccactataaatgctttggttttctagttgggctcctcgttaaaagtcttttgatggttcttgctcaccaagctctctatacctttttaatgggaacctattggatttaattaaaaacaatctattaaatcaacccgcgtttaaagtgactccactacactcatcacaagtgtagaaccattctagtggctacggaaacgctcataacgcccataagataattacgcatacgatcatcctccgcaaccatgctttctcgatgaggggaacttcctcctgtcttgatgtcttccattgggctccacatatgtaacaaaatttgtagccacatctatatgatatccatcaaccatgaacattacgatactgttaattacgtgaaaacataaacagattctaaaaggattaattataacagatagagaatgtgaatatgtgatgatgatgatacatgcatgttactctgatgcatccattagaaaattcaatcatttggttgcaatttccacattgacgccacatattctgatttgctaaagattcgaactttatatcatcttctgtaggatttggacccaatctcttgtaatcttcgcacgacaagttactatgccacgcatctttgcagatgttacaaaaggggtcaccgcattgtaaacagtatctcatagttccatctctggttttcgacattaaagccgaacaccttggatttgggcaataaactcatatccttactttgctaaaatcttaaaccctaattaaacaacccctttttgaatctatttgcacaatacatctagtaaagtagttcgacatatataataatctaacactggaaatgtatttgatgtgttctatctctctctctctctctctctatgatccgaaggaatggtctctacttgtgatgagtgtagtggagtcacattacatgttatatttgtgcttggagacatatttgttctatggattctctaagaaattttaaaacgggttgagattttactatttgatagttttgtatacttgtattgaaacattatgcatggaatctatcgactctacaagcagtttacgcatctgttcatgaaaaatgggaatctgcattatattcaattagtatctcaatgctattaagaaagcgaacagagagatcttgtattgaaaacaaaaaaaagctcgtggaaatgattacaaacatagtgttacaatgatacaagttgacgtgtatgtatgcatatttgcttttctctcctgtggaccagattgctctgtccacacaaagatatcaccataaagttaaaagtagatcggagaaggaggccatttccctcttccgcgtctaccgtgaatcctacctcgagggaggatgagtagcacaaacaaaaagtgagaataataaacatacgtacgtgaaagagatgacccgaggatccaaaacaaagacaatctttaagtatctgcagcttctgtggtggattctggatgtgttggttcagcttcttcttccggttgtgacacagccgtttccttctgctgttcagcgagacggctgatgcgttcaagcaactgcgctgcttttcgtttccctctatccgtcccatttccagctaaatctatcaatggacccataaggccgagtttctgcgcttcgacaagatgttgtgggtctccagaacagaggtggactagaacagcagctgcgttttctctgtttctaggcgagccagttctgataaactcaaccaaacttgggactgcatcagaggatcctatgattgcttttccttcggggtggctagagagaatcgccaaaatcgcgagtgcctcatcgaccattccgcttccgggctctgtcaagagtctagtcaacgtgggaatcactcctgcacgtatagcttttcctttgtttccttggtatatacagaggttaaagagtgcagtagcagcatctttcttgcctctttgtgtaccttcattaagtaatacaacgagtggcggaattgctcctaaggcaccgatagtcactttattttcatcgatcactgatagactgaaaagtgtagccgccgcattctctctggcctccatgcttcctttcttaagcacttgaactataccaggaatagctccagctgaaacaatggctcctttgttgttctcacatatggagaggtttagaagagctgttaccgaatgttcttgaatacgagaatcaggagttgagaggagacctacgagaagaggtatggctccagcttcggctatggccacgcggttgtctgcatttcgttttgcaagaaggcggatttccccagctgcagatcgttggtcctcggggtttccgtacgcaagtctccacataagatcttcaatcttgttcgcttctgcgggagatgagaaggacgatacttttctgggtcttaaactgctcggaggctttggaggctcaatatcgttggcctcgcaccactgagctatgagactacggagaacatagtttggtgtgagggttgtgcttgttagcgcctgctgtgtttttggacatgtcgagtgtccaccttctatccatttctcaatacatgtgcgttcgtatgtctatacatagaggagaacatgcttctataattaaatcttaagagatcgcagaaataaatttgaagaagctgaggttgaagtgaactatacctgccctgatgaaacaataactggatctctcatcatttccagcgaaatcggacagcgaaaatcatcaggaatcacaggtatcttctgactcgctgccgtagaagtctgtccattgcttctagagttaactcctactttctgctcctcgccattatcatcctccgtctgcacaaaatccttaatcatctttaataccattgccatctcctcaatattttcaccaacatctccaccgcttgaagcaaccatttcatgcagagccactgattcttgagctaggtcaggaatctccatcaaatgtaacttcttcgcaacccgctctagcacaggctgataagcatctacatcactacttttgttgcaaagcgactgaagatcttcatatagctcatcatctgatacatctactcttcctttagctcgccgaaactgactaagaaccagctcaacctacaacaaccaaaaaaacgctatgaatcaactacatgtcgtctttactgatccagacactggcctagccagccttgggtttcaagaatttacctgttctctaacttcatccgatatatcgagttcttcatatggaatctggcttaaagattgttctaacttaacagacacctccatcaatttacttgtcacttgttccctctccatcacctacacacagaacaacaacatctcttgtgtatcagagcacaaattctcaacaacttccatagatcaatcaagtcacatcaaccactaccaaatctaacatctaatcaaataccaaagaagcattgatatcactcaaacactaccatagcaaaacaaagcacgtggctctctcattcaatgaaaacaccaattcgtcaacgagaacaaaaattctcagtgaccacacagatctaatcatagatgctaataaatcgaagaagaaacgcaccagataaatcttgctcccttggctacaaaatttgagataatccttcgctgaacacatagcttccttcaaattcatcaaagtcttcaacgtatcttcgctgatcggttcgttactttctctaatttcctcaaacataggaacaagcagctttaatctcctcgctagattataacaaagcttcttcactgttatacgataatcagaaatcgcagcaatctcgttaactacatcgattaagctctgtgcagcagaagctttctcttcctccattgaattgattcttctctgtttaaaaattcacgatttacggatccgtttttcctccggagaagatggagatctttcccgattgagactccagtggcgagattgagcttaaaggaagaagagaaccatttgcagaaagtgcgaaagagagagatttctgagaaagagagattgtgtgagagagaagacgaggacttttcgaaaacggcgtcgtttagctgacggctttagcttattgcaacttgtacgattctctcggcttaagaactaaaccggaacaaaggtaaattcgaccacgaagccgcgggaccggttacgattgtgtttgttttattttttacattaatatattatattatcatttaaattatttctctataaaattactaattttcttgtgaaattttgaatatttttcaactattatattttcacggattgaatatacgaatttttacggatatagtggtcacttttttgctgtagttggtgacatttttggggtgtcatagaagaacaaaattgttaatgcatttataattttggatttagtgataattgaagaattaaaaaggttttatacctctatctctctaatcatgcaagaaaatattttaaaaagaaaaattaaaaatagttcaactggacaacgaaattatcctaaaatagttatttcttttgatctaatccttcttcttttaaacttttttttacttgtttctactctacatgtttcttgttattaggtaaagtattaggctctttttttaaaaaaaatgcttaatcctctgggtacctcgaaaagggaataatactctagttagataagtgcagcgatcaacatgacaaaatgaatgaatgtttgctttaattggtggctaaaagctaaatacacagaaaagtcaaaattcaatctcaaaatcaacccctctgtctccaatgtccctaatctataccaaaatgtcaatttattttcttgatcatatattccactaattaaaaataaatccttctctaatgaaatttgtcaaggccttggaagcctagttttaaatattaaatggaaactatttcttcaacaatcacactgttatttagtattgttgtatgttgttcactactttcttcatttgttttgtaagaaactataataagcaaaaacacataataaagtctcatgtcaaataatgaatcttatgcacatgcttgattattttacttgcacatatccctatcatcattatcacatttgtcaattaccgttatcatcattactctcattcttcccagaactttttcagcaatttccatacctcacccactaagatcttttaccctttttcttaattatagtttggatagcactcttttacatagcactgaaatttcggttgaacacataaattactagaaactagaaggaaatgttactgaaatttcactgattgtctaaaattgaataatctaaagaaaatggccttttaacctttttcttaggcccaaatgggctcattaccactcatgcttgttcggtgacccgattcttccggtaaaacagagcctaaaccgtattttcaggttaggctggtgttttcttaattctccaacctaaaaatagatggacacgtgtctatagaggctgagatattggtctcaatgaagaaaactaacggctcagacccgtgtatgaacgatattaagggccaaagttgcttctgttttccagaaatttttgaaacccaatttcagggcacgattccacaacctctttcttttcttctagatctacgtaaattcatcaggtacatgttattttttttgtttatttgatgtcaaaattttgatcacaaggaggcaaaaccaatataaatgtaacgctaatgcgtttgattatggtatacgtaacgaattagatttaatggttacattttattgttttagatttagttatgagattggcattaattattggtgtttcctttgaatttgctatgtttcttatgttgatgtaatcagctagagattgaaaaatggcggacggtgaagatattcagccgctcgtttgcgataacgggactggaatggtcaaggtaatcaaaaagctttagagaaacaagatttgtgaatgttattatgtgccataagttaagcaattcaactatgtgcgtgtaggctggttttgcaggtgatgatgctcctagagctgtattcccaagtatcgttggccgtccacgtcacacgggagtgatggttggaatgggacaaaaggatgcatacgtcggagacgaggcacagtcgaaacgtggtatcttgactctcaagtatccaattgagcatggtattgtcaacaactgggatgatatggagaagatttggcatcacactttctacaatgagctgcgtgttgccccggaagagcatccggttttgctaaccgaagcgccgcttaatccgaaggctaaccgtgagaagatgacacagatcatgtttgaaacattcaacactcctgctatgtatgttgccattcaagctgttctctccctctatgctagtggccgtactactggtcagtacattactacactcaaattttaccgtttggtttaaataaagttcactttggttcgatttcatttgctctcattgtttttattttgttggttaggtattgttttggactctggagatggtgtgagccacacggtaccaatctacgagggttatgcacttccacacgcaatcctgcgtcttgatcttgcaggtcgtgacctaaccgaccacctcatgaaaatcctgacagagcgtggttactcattcaccacaactgctgagcgtgagattgtcagagacatgaaggagaagctctcgtacattgccttggactatgagcaagagcttgagacttccaaaaccagctcatctgtggagaagagcttcgagctgccagacggtcaagtgataaccatcggggcagagcgtttccggtgtcctgaagttctgttccagccatccatgatcggaatggaaaatccgggaattcatgaaactacttacaactcaatcatgaaatgtgatgtggatatcaggaaggatctttatggaaacattgtgcttagtggtggcaccacaatgtttggcgggattggtgataggatgagtaaagaaatcaccgcgttggcgccgagcagtatgaagatcaaagtggttgctccaccggaaaggaagtacagtgtttggatcggtggctctatcttggcttctctcagtactttccagcaggtaaattacttactatactcatacacacaaatattattaatataaagtctataagtgatttgatgtaaaaattgttacaaaaatgtgttcaaatttgcagatgtggattgcgaaagccgagtatgatgaatctggaccgtcgatcgtccacaggaagtgcttctgatcaaaagtcaccaagtaaaacaagagcggtaaaaattttgatatcagtttttcaccctgaagccatttgctataattactcacaacttctctatttgtgttcttttattcttgtccctcattgttcattttaatctctcttttgcaacaaagcaacttaaaaaaacagatcagtcattaacagaatgttattattatatgtatacatattagtatacacccattatcttcttctgagtttcctctctgtctctgcttagtttttttcaagcttggacctcgatttcatttaaatcttttatcatataagcataggattctatacatcgatatatatttattttgttgacactattcagcacatgcgtatgtcttatcttgttagtatatgtaaccaaagacaaagaaaagatgctacaaattgttttctctgatgcagaaattcaatcttaaaattgttttttttttcaattgcacaaaaaatcatgtagtttgtaaattttctaaacaattttgatgatctttactagtacatgaagttcaacttcttttctagacatgtgacgacctgagtctgcgcggctgtgaatctctttgctgcagtaaatgtttacaagtggtgtgtaaattggtactgattcaaaagctttaagagatctacacattctgtggtattatgtcgcagacttgatattaaaaagacataaatcttaaggcctggttcacatgttttcccgtttcttgtagctcataactcatcagcagtagatttgaccaaacgctcgcaaacggtttggaattatcagctttgtttctcttttcgaaacacttatttccagctcgatcaaattgggcatggcctcttcttctatctgcaactcatctaaacttctcattaacaagtcaagcttcctcagcctaccaaaaccttgttcgctgacgctcatcttccccgagtaattacaacttaacaagatcagatcttccagtctcggcattttctgcaaaaaaggcattgggtcttcctcgaaagttattccaaccagtgtcacggattcaagactgcgtgatatcacatccatggacctaactgcttcttctgattccaacgataaatggacttcagtgggcgtcgccagcttcagaacacgaagactttccagtttagtcaaggaagcccagctcacatgaactcttctctcctttgacctagacatttcagaaatccccaaatctcgaagatttatgagcaactcaggttttagtttgttccagctgtcaaaggagatagacgtcaaggtctgaaggttcgctacgtcgcctataagcaatcctccaaaaaaatttcctatgacatgtcttaatgatgtgagcttacggagatcgattgtttcctcgatgaaataattgtcagatacaaatagtgtttgtagaaaccgtaacttggatataatagctgctatatcaaaatcgttgatagaattaccatcaattccaaggtacctcaagtggatcagatccccattaattttaaaaggaagccaaagacttccgaaatcaagcactcgaagtagcttcaatgtttcaaaatcaagccctaccaaatggtcgaattctccaaagtataagaaggatcgcatccgtttgttcttgcgtttctcagatgagtatctcttgaactgatggtgaaccacttcccttctgcaagtagtagaagaatgttgggccacatgatcgttatacacgtttacaaagttgagctctttagatttcttgatagccacgtctctcagaagatcatggattctacaagacatcacttttcctctttctcttctcactgcttcaagtaagcttctatctatcagctcttcgatgtagtaccgagccacatcttccatcatcatctcttcatccccttgtataaaaccttctgctacaagtaagtgtatcaacttctctaggtcaatctcatagtcctctgggaagatactaaggtacagaaaacagagtttggactcatgccgcagctccttgaaacttagatcaaacacaataggggcaacatgaatggagtcatcctttaggcgtctccataaactgttacaaacatcattccactcgcttggtgtcttcctcgacaaaagccccgcaagaacaactatacaaagtggtaaccctctgcatttttgaaccatttcttttccggttttcagcaaatcttcatccttcctttgtatattcctgaatgctctttgttcaaacaactcccagctttcttcaaacgtcaagaaccttaacttatgagcatagaatctcccatctacgccttcagccacggctttaatacgcgtagtgatgatgactctacttccttcatggttgcaaggtaacgctctctttaagctgtcccacgcttctcgctcccatatatcatccaccaccaccaaatattttttcccttctagaagaccgtaaaggtaaacttctaactcttcctctgcaaactttctgatcttttccaactcttccccagaagtcattcccaaagatctaatgattctcattagtatatctccagttttatactcttgagaaacataagtccatgcgcggtattcgaatctttccttcacatcccttgagttgtagagcttcctagcaagtgcagtctttccaaggcctcccataccgaagatcgagataataaatctatttttctcttcataatcaagaagcttttccaaaagaatcttagcatcatcttccaaaccaactacaacctcttcttgatcaacagatcgagcacgccgaagttgtctcactctcaaacttgaagtattccctcctccttgaggctctttcaagcctcctataccataagtctccctcttgcgagtgatatccaaaattcttctcttgagaattctgatatcatcaactatgctgtacgcatccatcttcctgcctattttgttggtcaatctcctcaagcctcgcctttgtgacctttcttcgagtttcaagtgataagtgtccaaaacatcttcgacgtcataagcgaaatctaaaaccagttttgaccactcttttgagacctcatcttctctttctcgcgcttcaacgtccttgagataaccatggatgcacgtcaactccgtcttcagctcttctagatcctctttgactgccataaacattgatgcttcttcaatgagatagttgccgatctttcccacaacgaactccgtgatcgcatctaccatcttctcaatatcgatttgaatccacggatatcaccgtaagcacaagattgaagaaatgttttctttatttcagaaaccgtcgtacttaacttgttggaatgaaatttcgacctctcctatattatctcaaaactatgcatcacctttattaaagaaaccgtcgtacttgacttgttgttatgaaatttcgacctctcttacattatctcgaaactatgcatatatagtttgtaactatgtccaaaataattcaagtagacgtgggaccaatatacgttctcatctctcaacttgttagacaatctttcgtggaagtttcaatttttcacatatatttatgtaagtgttaaattttaaagatttagagtctatagattgttgttcacaccaaacatatatgattgaccattaaaccctaaaacaagttggaaatttgcgtttttgagataacatctctatcaccttgaaactcataagaaaacattttctctggttcgtgagtgagcaaaatgctcataaactacgagtgagttataaacaccatacttgtctgatattatagttgagtgcttttgtgtataaactgtgtgataaattgatacaaaatgtgccacatgtgttccaaatttgcagatgtgaattactaaagccgagtatgacggataccaagtaattctactcaaaataataagtaaaacaagtgcggtaaaaactttgatatcattgtatccattctttagacaactgccatagttacttaaatctttctatctgtgttcttttattcttccttcattgttcattttaatctctctcttgcaacaaagcaagttaaaaacagatcagtcattaacagaagtgttattattgtagatatgtatacatattggtatacacacattatcttcttctcgtgttttttctcttatacagattgcgatatcacgtaattaaaatttaatctgtgttctcatcaagcaagactactgtatgcttactctcgccatccgtaaatggatggttctcgtcttctccggctagttcttgaccctcctttttactaaaacccaaaagtgggtttacctctgtgttctcatcatcttcaggatccatattttctttcatacccgtcctagattcctcgctcgggtcagctaccagcggctgaggaaaaaggttggcgtcattaggagaaaccatagtgttctcttggtcatcctcatcgtaattcttggtaaaattggaattacatttcctatagactgtagattcttgtaagacttcatgctctgacaaagaatgagatgaagacttgtggttaaagctaccgaaaccttgaatccctcgagacagctcacgagctcgcttcctttcttccttaagtaattcccctttctcaagtagctttaaaaccttctctgctttctttctaacagctaatccccaattaaacctaccaaaaaacaaaaccttatagcctaagaacattgaaactctcttcataccaaacatgatccgtcttaaaacgctaaaaccattaccctttctcgtcaatctgttggaaggtttgcatttgggagataacatctatatcaccttgaaactcatcggaaacactctctggtccatgagtgagtaaatgctcaacaactattagtgagttataagccatcctccagtttctcttatcgaactttgccaatctaatttacaccaaacaataacaacaacaaatgctccaaatctcagtaatagaatatgcttgtttaagtaaaatgtatcgattaatcacaagttatgtaaccttttgtgcaagacttcaacaatcgccaagtaatcttcaaactcaaaagcagcctttgaaatggaccctaaggtttgtgtatttggtccacatgactcaccatccgtagcttcctcagtcattcttcaaccaaatttacatacacataaatctgtgttagaaaccaagactcctgaaaaaaagatagaagcaagaagccaaaaataaaaaagactaacagttgaagaggagtaacatcggtgagagctaaacgcgccgttttaagcttctctttgaagaaaaatgaagcttgtttcttcaactcaaggaaagatggtgttcccatggcgatgctgcttcgagttctgctcatcattgacatctttctttcaaattattatcaagaaccatatgagaaaaacgagagagaggagagaggcctttggatctatttctttagtgttgggttagttcaaaaacagatgaattctagattggtcattgaatatatggacaaaaaaaactttaatataaccaagaaaagtccaaatctgtgatccccaaaaaggtccacaagattgaaaattttgaatgatcgttgatcgttttacattggaaaagtcaagcactatagtaccaccaattaccattaattccacatcaattgcctcaactgatctgattttgaatcatttttataactcataaattcataaaaagacatagaagttacaaaattaatagcttgaaaacgaatttctcgattgaaaatacatgaataattcgttttcaagatcaacagttaaaaagaaaaatcttaaattactcaaatatacggtttagtaaaatagtacggtagtagtgtgtgagcgagcacaggggatcaatgactcccttctcttttcacggagtcagtgaagtgaagtgaataaggtagagttagatctggccgtacacatccacacgcgcgctgatgacactgggatcttaagatccgacggctctagataacccgaaaatctagcgagaaattgacttgagagataggcgatctggaccgtcggtgtcaacttggtaggacccactactgcacctgtcacgcactcactgtttattattccgctgagctaattcactcctgatatttagattccatacaaacttctttagaatttcaccacacctcaatctatataaattaaccatttaaaagttacaaatccacgtgttatttgtagaaattagaatatactaatgtttagaaaattgaggtcacgcggttgcatgatgaagtaaaatttattgacatattttaggttgaaactgggaataaccttcggtaaaagatgattcaagagcaaaagagaaaatgaaggatttatatagtcatgggttttacccaaaatcgcccattcaatccaaatttacatgggaaagtgaatttgttttttcctcgactcaaatacaataacattatcgtgaataaatataaacccttgtgaaaaaaaaaatccagtaaaaataaataaagccctaatcgaaggcaaaacattatgtgataaaagaaagaaagaaaaaaaaatcataccaaaacataacaaaatgctatacaccaacaccacaagaccaagaaaccaagtggtcttttaaccgcgccggaagaaactatctcacgcggtggtgatactagtcgtgacggctgttcactagaactctccggcgacaaagaaatctcctgtggaggagctgtggcaacgggttgacccgattttggaaatagttctttaggcaaaagaactttggatactccgaaaacagaaaccgggttttgatcaaaagccgtttgagtcacaacagctaaaaccacacccgaattgatcgttacgattgacccgttaacccgggagatgttgagagtgtatgaaccggctcccatttcttcagtggctaatgtcggttgaaccgggttggttattgattctagtgaaccgagagtgtagtatgaatgtagcacgtggaattttaacacgaatgctttttgctccgccggtaatgactggaggttaacgttggaagggagatcggagaaggcggagtcggtggggacgaagactgtgatgccggcgccacgttcgtcgttttcgaattctgttatgacaccggaagcgacgaggagggatagagcgacgttgaagttgtgtccgttgattagtatctgagtgagattgattcccgccggtggaggggagagagatgttgacgtcggcggtggagtgagagtctccgatgcggtgatatcgattccggtggggacgatgagggagtccacggtgaggacggttatgttgggaggtttggtctcgagaagctttaacacagtgacgtttttggtggctggagatccgatcgtgacggatcctgaagccgggtcacgggttacgttaacggatccagatccaaagaatgtacgaccggaagcttcgtagagagtagtgacggcggagcctgacggtggaatacgtcggagatcggaatctgaaaggaactggaggaggacatggaagcggaggagatctgctagggcggaaggaggtaggcggcgcgtgaggtccaaggaggcggaggagaattgagaattgggaacggcgaggagggttaatgagtttctaccggagagttcggcagcgatgccggaagagacgaggaggtttgagaaagatgagagattagggaaagaggagaggacggcggtgacgttaattgcggcggcggtggaagataggaggagaagtaaataaggtaatgcgagaagggtaaaatgggaaattgagattacgttcgccattattttttgagttaggtcatgagattggtaaagagaagaacacagagaaggaagtgagtggatagagagatgggagtgatgtgtgagtgaagtttggtggacgaaattaaaattagagacatcgttgggaattgtatgacgcgcggtgtttgggagtttgaagttcacgcgtagaacaaaacagatgtcattgtgtcagaaagagagatgcttttgtggacacttctagtcttgtagtgattagattttggtgagaagatttatttgattgaaataaaattaatgtattttatgtggtgcccacgtggggtatagttttaataataatgtcattaaagtttttttcgtttgcatgtgagtttcctagctgtgaattaattaagctgcagtcacttaatcttaatcaacaatagtacaatgcaattacttggattagataaaatatcgaattaggattaccgtttagattgttttttttccctcaagtttagtgtatttgatttagaaaggaattcaaatagtttatgagactatttagataagtaagataaccatatgtatgtaggcgagtattatatatttggtaccgttactatatatcgggcctaattagtaaaacattaggctttaatcaagtctaagtaataaagcccaccaggcccaataaagaaaatcgctagggtttaagtcttaagcacagaacaaggaggcgatgaagaattgaatctgtagtcgaaagaaaagagttgggaaaaaaatggacgcaagcatgatggctggacttgatggtcttcctgaagaagacaaagccaaaatggcctccatgatcgatcagcttcagctccgtgataggttcgtcacttagatcggtttctctgtttttcatttaggattctcccaaaaaaattgacttttagctccttgaaatctttgttcttatagttcaaagctaattagatttgctttagaatattgattcaaggttagtgtgtacttatttctggctaattatagatctttgggtccttatggttcattgataaacaaaagtttggattagagttagtgaaattgttctttaagatgtaactgtgttgtctcattttgtgtgttgttgtcaaaactcacaaaatcttcacattatttaggttgtaacaacttatgcaatgcctattgttgttttgtgtttaggccttaactttggctacttttgttgagttttgtttttggtgaatttcagtttgaggatgtacaattcattggtggagaggtgtttcgtggactgtgttgatagcttcacacgcaaatctctgcagaaacaagaggagacttgtgtgatgcgttgcgctgagaagttccttaagcatacgatgcgtgttggtatgcggtttgctgagctcaatcagaacgcaccaacccaagactgatatagtctgctttttctgtttggttttttcgtacggtttacgagtccgaaaccagaataaaccggttgttagttgttcaggttactactccgatactgttttttgaacatcttgtactgtgaaattattttgactgtatccagttctgatattgatattgacttgtatttcaatggagtctagagaatatcatatcatatcagtattacatcgaccagttccaaattttcaatgtgtaatattgcttaacatcttgaaactttgttacaaaagaaatcgagctctaatctaatctaaaggtaccttatttgttttaatgatatcgacattggtaagtctagtttaatcaaaccgaagttttgctcggaaccgtagatttgatttgtgatcttcgttgaagacgagagaaagagtgtaactctccaagagaaggaagagaagagaagagatgagatgtagatgaaacaacttgagttctcatcatgatcgtgtacgagtttattaaagttacaacttctacgtttggcaaaactcactatgagttatttttgggagcagatcatattcggtttgattgtggaacattactacaatactactacttgattcatgtagacgtgagcgagtgactgattttcgtgaatgtctatttattaaattagtgataataaattaactaaatttggtaattgaaattctttataggtatagaaaaagccaccttctctgttgttaaaaaaaaaaaaggtaatattagtggatagcgatatttgacatcataattaagaaactaatcatatgtgagaaatggggggaacggcctattccatcatgaacttagttgttttatcgtattcatacacataactttgagtcgtgcttataactacatgaacttaactaaaatttgaatttcctatgtaaattcggtcaaaaccatcaattcgacaaacggtgttactattttgttaacgagtgctgactgggatgccacgtcgtatcacaaaacggcgtcgttttgttcaattatagaaaataaaaaatctgaaacaaaatcttacaaagtggagaatcaaaccaacaacctttggcattattactccactttggaaccagtagagccaaggtaacaattgttattttggtcgtttgaacaattatatataatgtaataaattaaaaataataaaaaatgttcatggagattttcaagtttacgggagatgcttttctttgaatatcagaccacgaggaacatccatgttttggaaggaaaattggagaatggaaactgagaataagctggtggagaagaaactttgagtcgtgtttataactacatgaacttaactacatgttttgtgatacgacgtggcatcccagttagcactcgttaacggaacaataacaccgtttgtcgaattgatggttttgactgaatttatattgtgtaggaaatgcaaaatttagttaagttcatgtagttataagcacgactcaaagttctatgtatgaatacgataaagcaactaaattcatggtggaataggccgttctcccgtgagaaatgttgggtaaatgattctttttgtggtggagtaggggtaaagaaaagaccaattaactttgtaaacttatagtttttacaatgatacttttatttatggtgatagagatttcataaggtttagtgagaaaaagaaaagagactccgaaggttcagtaagaaaaagaaaagaaaagagatctagaggtggaagccataatcatcgtgatattattacagggtaagtagtctagaaagggagtcatctaatggcaaaaaactaaagaaaaaaaaaaagaaatcatgtgcttttttaaaataacatgaatcaaataaaaataacgaaataataatcgtcgtgatattattacagagtaagtagtccagaaagggagtcatctaacggcaaaaaattaaagaaaaaaaaatctatgtactttttaaaaataacacgaatcaaataaaaataacgaaagaaacaacttgctatttgtccaaaatcttatgtatttttgaacaatagcatgtcaaaataaacaacatcatgacatattaaaaaatcatatgtaaaacataaatatagtatgttaaaacggaaagataccagtatatcataaaatattacataaaattcagaaaaaccataaaagtttacgaagtaacacgaatcaaataaaaataaagaaaaaacaatttggcatttggtcatggtcaccgtaatattattacggagtaagtggtggtagacaatatccataaaatgaagagaagtcgatgacataaatccggcgatagaaagaatcttagaaaagagagtgaaagaaagagaaaaaaagagagagaagatgaaagagaaaatgagaaaatgatatattagtaattttatttgcctctccgataaagtactattgcccatagtcatttactctattctttttggtttcatggttattttgtacatataccaaaaaaggaaagaaaaagtcaccttttgaatattaaaaaaaactatttaagtttagctatggaatataattaaacccattgaaatttaagaagtcaagttgttggaagttttgtttactattgcttaagtttatgatataaccaaggtcatgtcttagttataggatttgaaacaatggcctacggtctttcttctttcataatcattttaagtgtcaattcaaaaatattaatgtaacttagacttatgtatagaaacctgattttctatatgtaatcaaggacaattcaattttaatcaaaatatttttttttataaattaatagtgtcacactgcaaaattctattaatttatcgataaatgaagaattattagattatacacacttctagttaattttgtaattttgaaaaaaatgaatatgaaataaattgtgttttttaatagaaatcaatatccttttaaaaccaaatccaagataacaaaaaattatttataccttgaaaacaatacaaaaagattttgacgtactaaaatattattagtgaaccctaggattaatacatagttaagaaaaacaaacaatactaaaattatactttattaaattttcttacatatttatatatatactagattttaacccgcggtataccgcgggacgatttattttttaaaagtaatatatattaaaacttgcaaattttatttttataaaatatttatattttacagtttataattgttattaagtaacggtataccacgaatccatgagataattgtaaaaaaactgaagttttaacccctattaaaacagcatattaataatattttaaaatttaataaatattgattcaaatacatccaccatataacctaattccaaaatagaactcgttctgtaatttttttaccgtccatgatttttttttaaaatagtaatttttaaaatttaagaataattttttatatagaaaagttttgcaaattgtatcattctctaatacatttatatctatagtttaattttatatatagtaacattatgcataccacataacatttttggttttatataatcttttctaaattaggatgatttgatatgtttaatattagtggtcttaaaaaataataaattaaagatttaacccgtattaaaacggtggattaattatattttacttttttattaatgttgattcaaaaacccgtccctccaaatccgtcttgtcaaaaagctatttattttgttaatattaattttattaatatttattttattaatgatatgattctgaattagaatctaaacattttagctaataacataggagtgcaccatatttatttaataggagaatgtccatatgacccgaatgcacttttatccaaatccaccaaaaaagtcttgcaaaaatactatagagataagaaacgatagtcggttttgataggtataagattagcaaatatattagttagcataaattagttaaagaatacaaattgaaaaggtatattacactttattcgaatatagtatcaaaacttatataacacagagatttgataaaattttaattgatgaatactttttttgtgctaatttttatgtgattaagatttaattgatttcgtatataaaatattaaattgacttatttgtttataatttggtaacagatagatatttgaatattcaatatattttgcttctaatctttgatgatccgtctttagatccaataagccctataatctagatattaacttgcggtatatattttagttaaactaaaattttttattgtaaagatgatttaaaaatatttgatattattttatttgattttaaatgtatagtaaactgtgagttgtatatgttttgttgatattatctatattgtttagtgtttaagattatacacttgtagtttgattgttaatttaagagtttcatctgtagtataccatcttgtattaatatcgatctaaacatgcaattctaggatttccaacttgtattaaaaattaaatcacatctaatatgttattaattattgtagtatataagattataaattttcaatataatatgtatgaaattgaatataaatatttcaaattatgacccgttacttagtagaaagttttcttaaatctattttttatccgttataatatttttttatgtattgaacagtttatatttgtttttaaaaattcaatttatggcatatgggaaaaaactttagttgtttttttataatgatgatattatttttctgaaaaaataaaatcatataaaaatgagaagtgaactataataattaataaaaaattaatatgataatttagatatcaaatataatttgttgattttaattggttacttttttagaaattaataatgtatttcgtttttctaattaaattaaattaattaaaatttagatatcaaatcttatatgttgactatgattggttattatttttggaaattaataatgtatttcgttttttaattaaattagtatttgactttttaatccttaaagagataaattaatttactctttaaaattttatttctaatggcatacctatgtaattacttacaaaaattaaggttacatttaaaatgtacttcccaaataatatagtaggatgtattatatatgtattatatatatattgataaatttatacaattattaatttatgatactgatgtgaacatataataacatttaattttcaaacatttttttattattttaggttaaatattacgctgacccgactcgagaccggaaaattttcttaatttataaaggtttttttgtacaagctattcacaagttaattaaatttacaattgtgctcacttcttttcttatagttaatcatcggaaatttattatcttagttttaattttagtaatctctcaactcacaaaaaatcttaatcctttgaaaatcataaagatgttgatggaatacttcgaagaagacgaaaggattcactttgatccaacgtactaagaagtcatcaacgattaatcttaaacgtgagctaagatgtgaagactccagaaacttcatagtgatgaaggatgtttatgccaaggagccatggttgcttgaccattccaacaattcttttttcaaagaagacgagtggtactacttctcgacaagaactcaaatctccgagaagaagattggtcgtggtaagtattcaaaggggagatcacgggagacaacaacaatggcatcggccgcgggaattggagggtgaatgagaaagaatatatcatcgacaaggacataggggatatcattgggatcaagaaaaacctaacagataagagcggcaactaaaccaataaatcatgattcaacgatttggtcgtacaatttgtcaagtattttatcatctatattttaaagtaccatgcaggagatagctttttgggttattggtttattggttgtgacttgtgatttaagccaaaaaataaaattttggtggtatgaatctaaaattatcatatctaagcaaaattattgttttccaattatgattagaaaacaatatcatttctacatataaaaaaaaaacaaaaaggaacttttattaatttagtatatttctaatagcataaaccaacaaagcaataattcaaataaaaattgaaccctcagtggcataggtatatcaaaggagacaaactctccacaagcttgggagctttttcttcagtttgacgatttggttgaagttgaaatatcgacgcaaggttgaacatcctcaaatgctctaatatgaacatcagctaaaatcttaacgtctacatacgctaacacaccatcctcatacatttgtgcagcttctgttaccaaaaaatactatttcatctttttatacagaggaacttactgtacaatattgtttaacaccttgaaacttggttacaataattgaagcgtatataccttatttgttttcatgataccgacatcgtaaaccggggtgaagtccggtttaaacaaaccgaagttttgctctgaaaccgaagatttgagattctcgttgaagagagaaaaaacataagtttcgaaaacccggtttggcatcaatggagtgcccttaccagaattcacatgctttataaggttcccattgtaagctgcggcataatctaaaccgacgccggtttggttcggttcaccagctgaaggccaaccggtctcagccacaacaatgtccacgtcaccgtacccaaatcgtttcattgcggagtaaacagcatcaagctgagcgtcgaacatgttggtgtagttcaacttcgtaaccgggtcaacatatacaacgtcgtttgtgttaaagagtgcgtagtttaacgtttcaggtccgaaaccgaaatatggatacgggttaaccataaaaggagacttggtgcggttgtggaagtctaggattggagagaagatggctttgtcgtaccctttacggaactttccggagctaggtggctcggaggagcctgagaggataccgagcgagtgaggcgtcgagactaagatcctactgacgttagcaaggtgtaatgctaacgtaagcgtctccatagcgggaaggagatgagtgatgagggttttgtcggatgtggcgacgacttcgtttccgacagcaatgtaacggattgaagttgttaggaggaaggggaggaggttgtcggagagccatgaacgtgcgttggaaagcttggaaagagaaatgatatcggagtttgggacggtgacggtgagggagattcctgtaatgccggaaaatgcggcgaggatgtcgtggtttgtgtcgaagattttgacgtggttgattattgtttttgttttgatgaagttgacgacttggtgaggcggtgggaggttgttggccacggtgccgtagtttacgccgacttgatatgcagcggagaagggaaggatgagagtgagaattaggaagtaaagttgatgaacaactctagatcccaacatgatcgtgaatgagtttattttatgacttccacgtttagcaaaacttactaggagttgttttttgggagcatgatcgtgttcggtttgattgtggagacgtgagcgagtggctcccaaaaaatcactcactcctagtaagttttgctaaacgtggaagttttgctaaacgtggaagttttgctacataatgtaataatcataaattaataacatttgataattgaaaccattaataaggatgtaaatagttgcaaattaattgtatttgggggtgattgggaagggactctcagaccatcctcatcggacaaatttaaaaggtgtcttcaaattttaacagaataaaaaaaataggaagatgagaattaatgcgctgaataggagtgacatgatgactttaatgtctgtggaaaaacattttttgatacgggaaaacacgaatgtgtcaccatgctattggttggtgttattgttttttattttttctcttcatttgaccaacaattttctctctgttcattttatcaataaatttctctctcttcatttggcagttaagacatccaatatactgatcaccgatgtggatgctctcatagctttaaaggtgttttaaagtcctcacagtttttattttaacagtcatgctttcttgactttatttttttttaaagttctcaaagccttgtttttatttgttctttgtttcctttttttttttaaagtcacgattacatggctttcaaacaaataaatattaaaacttttctttttcttctcccatgataattaaaaactttctacaattttatatatattttttcacaaatcatttttgattaattaattattattaattttatattttcttttaagatccaatttactaataaataatttatttattacatgtgcagtttatttgttgagaatatttatttaagaatattttttgtattttaattttatattattaataaaatatatttgtgtcactatgttgaaacataattcaattttaacataattttatttacaaaaatatatttaataatagtaaaaatagtactcaagcttttacaactttatattaccaatcagaatttaacatctaaaatctcaacagttaagtctctacatccaaattttctatggtaaaagtttttaaagccaaaacatttaccgtcatccttaccgatcggcccatagttgttcaaataatttatatcagttacacacatttcgattttgatttcggttacaaatattttatccactctaattcacaacaagaaattaatttaccttaatgggcccaaaagcccaaaaactgcaacgtggctaattaagccattcctcgagctcaaactttaaaacagaaacaaaacttctaacttacaaattgtacttctgtcttttactctgtctgattcagtcaaaaagaaaggaatattaaaatctctcaattttatatacactcactcaatcatacctttctctggagacctccacagggtttgtttccggaaatgtcgaacggcacggatcaggctcaaccaccaccggagaacccggctactccggtggattcgaagtcacggaaacgtgcgacgccaggggatgataattggcttcctcctgattggagaaccgaaattagggttcgaacctctggcactaaagctggtactgttgataaggtgaaaaaatctcagccctttcaattccttcgcagatagaatcgtccgtacaaatggaaatgttatgttgtttgttgatttgaattggaactttttcttagtatttatgaaattgggtattgaagttaggttatgatgatcttattggtttatattttaaggtatttggagactttataactagtctttaagtgtaacgttgctgtatgtatgcttgttggatgaagattgctctgtttaggatgttgtaggtgtgaatatgataatgcagtgcttgatgatgtcttgtatttgtaatgtagttctactacgaaccgattacgggtcgtaagttccggtccaagaacgaggttttgtactatttggaacacgggacgcctaaaaagaagtccgtcaagacagcggaaaacggagactcacattccgaagtgagtttgttagtagacattaccttaaggtttaaacccgtgttttacctgaactgttgttgtttttgcacatttttgtagcattctgaaggtagaggaagcgctaggcggcagacaaaatccaacaaaaaggttactgagccaccgccaaagccgttgaacttcgattttctgaatgtgccggagaaggttacttggactgggataaacggttcagaagaagcttggttgcctttcattggggactacaagattcaagaatctgtcagccaagattgggacagagtattcactcttgtcacctcccaaaacgctggaaaaacgatgttctagaagattgctgcagaaactcacaaattgtaataacacgcgctgctagattatcatatctacttagtatttactgatcgttggttggaatgcaggttaattttttagtagtgatagttttagtaacactttgatttgagttgtaatgtactttcttaacattttcttagataatttgaaggcaatgtatgtctatattattgcctttgagagaatccgatagtaacaaagttatgaaatctaaagttcgatgtgcggtacttctctgctcagttctctctgctttaaattgtgaatcatcagttatgcataggctctatctatctatgcttctctgcctttgtcctaaatgatatacggaagcatactgacataatttggaataagttcaagttataacagaacagtgtgaaaatatgaaccaaagcgtctgtagtccaacggttaggataattgccttccaagcaatagacccgggttcgactcccggcagacgcatttttaaattttgacattttacgctcgttgtttatgaacagtaaatattttctttagatctttgtttaagaattttttttctttctaaaatggctaagaacattgtcgtcaaagactataattcttttctgtcttatgcagtggataaaaaaggggttcttatcgcacttttcagttatcgtttgtttcctatcagaaaacaaaatgggaaaaattctccacctcaaaattcgaggaattctaacggcgtggagatgaataattaccaaaagtaacatatacacccccgtcgaaaataacgagttttcaaaaaagatattttcggttgatttgtcgataatcatctgcactacgctgcggtatattttcagatttttttatcgtttaatttaaatataattttaattatctaatcattcactcatgtaataaataattatttttattattaaaatatttttttcaaacaacattttcaacaatgcatcatatacacatttcctaaacaatgttcgtcttaaaccaattaaatagagggtaatgctgggattctcgaaacctaattaagaatttgatgattaaacttcttacatactctttaccctcggtgatttattatatagataaaaatctgcaaactattcaaactattaaataattcatgacaactatacactcattatttgagttaagattacagaaaaacatcttcgagtatgagaaaaccgataaaataattttattgaaaacatataataacaaaataaatttagtattagtacaattaaatatgaaaaattaaataataaatacatcattaatctataaattagaagttgaagagcttacattaattatttagtggacatagggcaaatgttaaagtgatgatgtgtcaatcatatggaaagagttggccaactttcatatatatgattggagtgaatcgaatctacatcattcatcaaccaaaaaataatctagaaaaatatatatcataatttctaactaaactaaacaaaaacgctcgttgttatattttagctttttaaatataataaagctcgtattgacaaagctaacggataaacccttattattttgactggttaattgttatctcaaagaaaaagtatttaacatcctgactttaaatttagaaaagttcatcgactatttgtgatgtcccttcaaaaagattaaaaaaccataacaaaagttaaatgtttctctgggttgtacaaatgttagatgttaactggaccagatcacatataatataagaaaatgaacctgattaattctctttactgagctaaattttttactgacaagtctatcaaattttaccatcatacttaaatcctcaaaaacacataaactatacagtacttttttcttattacgtatttactattctatgcatgaaattgcgtaaatgtttggttgtatgcatattagaatattctttttatttttctctccaacagatttaatattgaacggtggtgttcgtatgatataaattcaaaaccacccaccttttatcctttcgaactttttcgagataggataagatgacataattattttatttgtaatttaggaaaaggggtaggcctttttttttttctttcaaattaatgattgtggggctaaaaaaaataatttgtgtccaacacaggatataatattttgaaacttgaacgtaaatgttgacttttgatttttttttcttctcagcttttgttaaatttaaactcgttcccttatcagatttattaaaatggtgagtgacgaaaaaaaaaaaaatggtgagtgaaacgttagagaaatcgacgtatgaaatgaaattatgagagtgtacagagaaatatttgaacaatacttagagctgacaacaaattcaaacactgaattagttcttgaagacaaactcgctctttgctatagttgaggagaagaatcccacatactcaattatagatcgagaacgaatctttacgttttagttttcttgtcacatttactatgtaaaatggttcatattattattaaattttcatttattttcaaaataaattttttacaaatatatatatattttaatatgatgttaaaggtttttgtacataaattaccttttaattttgtttggtttatttagaaatcaaaatgtaatttattatctacctaaaaacacggttctttcagtataaaaatttacagaatataaatcattaaaagcaaataactaattagtattgtattaaaaattaaacacttatctaataatacaaaacttttgttctaaaacatgaaaacggaagaagtatgtttcttttaaaactatgaaattcatataccatattcagttttatttaatatcatttaatatgaatcgactacctcataattatacaatatagcaaactagggaccatcttatcttttacgtgattcctaaaacataaatatttatgggaatgttgcccaaaaaaaaaaatatatatatatatatatttatgggaattttatcattttcttcctattaagaaaaacctcaaaaataaaaatattaaaatacaaaaggaaaacataaaagcacaaacgaatattccaaatataaactaaaaataatactcataaacccaaaaatacatttttcctttcccgaaattcttttttttgttaatattattatcatgacaagacgaaatttactcaaaaggctacgaaccaaagccatgtgatgactacatcagtaccacgtgtcaagatctaaggacttaacgagttacgagtgtgtcgtgggccatcgaccatggaaaagcaacgagtctttaggtgaatgttttacttgctataaccggtaacaacgggtctggtaataccggtagctccggtggttggttgagttatatggctatgggggtttaagcaagaaagacgtggtcgtgttcttcttataagggtttttgtttataatttggtaatcgaaaaagagagatttgataaaatcctttgtgttgaaggaaaaaaaaatcatataggtaacgtttgatacaagtaaaaaaaaaaaatttccatcactttcttgggtaaaaaaaacatgggttagaggaaaaactggggaaaagattttagattaagtgcgtaaagaattctgattccttcgtctccgatctctcatttttctggagaaattgtcaaaaatttcagatatctatattgtcttggaactgaagattcatcgaaaggtgagaaagatttaaactttttttgatggtttttgtgttctcgattttgtcaaaagtttttgtgtttgtttgatcatcgagaaacttagtaaaaattcattttttatgtgaatttagatttggaattttcaaattcaagttcttttggtttggatcttaaaagggtttttgttatctttttgaacttatcatcatcttcgattgaaatttttcgttttcttatatgatcagaatcatctcattcatcgatctgtgaactccgatctgagaatttgaaagtgtctctctttttgttctaagttgatctgtttatcctttaattcaaagatcgaagcttttttataattgaattacgttttgtgttcttcaattcggatcttgtgtttattagggttttagaatggtttatcagatttgatttgatattaccgatctgtgattcttgaattgaattgagtcttcttatggttcttgtttcttatatactacagattggtgagttttattcgctgcttatcgcttgtggcaatcacatcatctgtgttatgcatccaagtaatggtgtcacataaagtcttagaatttggagatgatggttacaaattacctgctcaagctcgagctccgagatcactccgggtaaatgaccctttgctatattctctgtttagctgttaaagaatttatcagttacatgaatgatcactcgcatgtttgttcacatttttgctagaagaagcgcatttacgaaaagaagataccaggagatgataagatgtgcgcgattgacttattggccaccgtagctggaagcttgcttctcgagagcaaaagtccggtaaacgcgtgtctagttgtacaaaatactgtaaagaatgaatacccggctgatgaaaaccccgtaaaggcggttccttattcggaatccccgagcctatttgacaatggcaagtgtggatttagctctgtgataacaaatcctaatcacttgttggtaggtgacaaagtaggaaaggaggtggagggttttagtagtttgggtgtgagtggtgatgtaaagcctgatgttgtagctagtataggtagtaacagtagtaccgaggtgggagcatgtgggaacggtagtcccaacgagtctcgggatgatgtaaatttgtttagtagaaatgatgatgatgaaaacttttcgggttacattcgaactcgtatgactaggcctgtgcctcgtattggagacagaagaattaggaagatattggcatctagacattggaaaggaggttcgaagaacaacacaggtaaaatcgccttttgttttagttttgactatctttattattgtgatttgatgtttggtatttgcagatgcaaagccatggtattgctcaaagaggagttattacttgcaccatcatcagaggagttatcccatcaagaaaaggaaatactttgacagtgtttacgactcgaactctgatgattaccgtttgcaaggaaagactcataaaggtccaaaacttgtaatcttctcattctcttgttagtatgttgtaagtctttgctgttgtaacacggttttgcaaattcatccgcaggaagcagaacaatatcttccatgaaaagtcgaaatgcgtcctttgtgtcaagggatcatcatggtaatttaatggagtctcaagtctcaatctatcctttgttcgcttattgtttcgttgaaatatttttgttttgttttgttactctttagtgaagctgcggatcaagtcttttagggtgcctgagcttttcgtagagattccagaaactgctactgttggctccttgaaggtgtaataacaaaacctagttgtgctgaaaatcctgatcaagaagaacttatatttgtatttttgtaatgtcggggttgtcagcggatggtgatggaagcagtgaccaccatactgggtgatggacttcgagtcgggctgatggttcaaggaaagaaagtccgagatgatggcaaaactcttcttcagactgggatctctgaggagaacaaccacttggattctcttggtttcagccttgaacctagcttagagaccacccctcaaccactgttatccaggttcactcttctcttcactctcagagatgccacatcgataaaaaatcaatcttttgcggcttaagggccttgttttctctctgccagttatctgtcagatcatgcctgtgatgatgtgacgttatgccacgacaatgcgttggattctagtcatgagccagaaccatccccagctgactcatttgggaaactaggcacaagtgatcattctagagctttgattcctgttgcctcagcagcaatgctggctcctcggcctcctaaccgtaagtttaaaaggactgagcagcagctagctgcacaacgcagaattcgtcgacctttctcagttactgaagtagaagcactggtccaagccgttgagaaactcggaaccggaaggtacaaaacaaagaaatagcactttctcttcttcatgttgctgacaaaatgtgtttgaaaactacaggtggagagatgtgaaggttcgtgctttcgaggacgcagaccatcgtacctatgttgatctcaaggttagttagttttttaactaactcttaaccttaatatatacagtttggtattgagtctttgcctttgtaggataagtggaagacgctggtccacacggcaaggatatctccacaacagcggagaggagagccggtgccacaggaacttctggaccgtgttttgaaggcacacgcttactggtcacaacacctaatgcatcaactgcagactgagccaccatccactcaggtagaggctctctaatctgaacaggttcttggtctaaagaacctttgtgtattattatgatgatccatattgtaagattctgacatagttgaagatctggtctcagttcttctttgtttttttttttctttctttcaaatgtaaagttttataattggaaataaggttgggttttttctaacaatgtaaaggatttgttgtaaatctttggtgacatttttattctgtctatatgatttatggctcggcctatcatatcacaacgacaacgaactgatatatatatacctcatccaaactctaggagtgctggagaattcaattgttggataaattgttactcaagctggtctatgtttggtcagtttatggttcacatgtgtcctatattaggaaagaatacacagaagcttgtgcttgtgagtggtatgtgtgctatggtatttaccttaaatacgggtcgttcagagtaataagctggtctcaaagcctcttttaaaggctatagccacaaacaaaggcacaaaatcctggatctctaaccagtaaagaagtcgatgttgaactaaagttcgcaaatatttgcagatagcattgagtaggcaagctcttcccacttttttttttttttttttcactgaactgttgcctttcattgaatattggagtttgtgaaaaaatttaaagcaattagcaataaaatcaaaaggatattgaagtttacatttggacctggacgagataatagaggataacgttcaatttattagaagttatgatgactgatatatttaccgatttaaaactaatatatttagcaacttgacgcagcaagaaaattatgattcttaactaatatacaccatattatatatatttagaagatttaattaatatttaaaattatgctttttatttgattttgttttaaatcgtcatataatacataaaataaaatcaaaaaacaatttttttttatacatatattgtgatttttaattttaaacacggacacgtattacccaattgacaaaataatgtgtatgtttaatgttccacattgactaaaatatttagacaatgattcagaatcatatcatataatgaatatttacaataataaaataactgggtttttgttggaatgggttttgcggaacggatttttgaatctacattaataacaaattaaaatatcattaatctgccgtttcaatacatattaaatcttttttttaacaccactaatattatacatatcaaatcagtctgatttaaaaaaatatatataaaaccaaaatgtctcatggtataatgttactatataaaaattgtaaattataaaatattaatgtcttagagaattgtataattttcaaacttttatatataataaataatcattaaattttaaaaatcactacttaaaaaaaaaaaaaaaatcaagggacaggttatacaattaagatttacatcttgttttttttttggaattttggtgatgtggtaacagactactaaatagtttacgcgtattatatgcaaaataaattatcaaacaaatatattgtagtaaattataaaatttactatattattatttaaaaactgaaatttgcttgtgtcttgtagaaaaaaaaactgaaccaaaacaaacttaatttacttcgaagttttatatttcgttatacaaaaagaaaaagtctaaatttctaaatacatttagaaaatatattcaaggtaataactaataagtcaaatatttgaccagacaagtgaccaaaaggaagacaacaacaagaaaacaaatagctttttagccatttggacccacgacagtagataaagtcttggacatattattactaaccttttgtggcggcttagtgtttatcttcaaccccacacattctctgtttcctcgaaacttcatttttcttctttgccaagacaaagattaaataagacaaatatcaaccctatcctttgtttatatcaacaacatctcgcaacttgtgttcacatgaaacttctcactactctctttcatttcctcttttcgttgacttactaaagtactcttgtttcaatcttcattctagagagattctgtttcatggatgctattttgccagtacccgttgatgggttcagattcgacaccggttctggatcttgttgcaaaccgaggaacaatcttgaatctgggacgaccaatcgtttcacttgtttcaacgaatctgaatctcagagcaacccttctccgaccgagtctaaggtatgttcagattaccttcctgtctttaagtacatcaatgacatgttgatggaagaagatcttgaaggtcagtcttgtatgttggaagacagtttggctttacaagccgcagagagatctttcttcgaagtgcttcaagatcaaactccaatctcgggtgatctagaggatggttctcttggaaacttcagttctataacgagtttgcatcaacctgaagtttcagaggagtcaaccagaaggtatcgacatagggatgatgatgaagatgatgatcttgagagtggaaggaaatcgaagctccctgcgatttctacggtggatgagttagcagagaagtttgaggaagtgttgttggtatgtcaaaagaatgatcagggagaagcaacagagaagaaaacaagacacgtaaaaggctcatcgaatcgatacaagcagcaaaagtcagatcagccagtagatatgaggaatcttttgatgcaatgcgcgcaagctgtggcgagttttgaccagagaagagcttttgagaaactgaaggagataagagaacactcttctcgccacggtgatgcgactcaaagacttggttatcactttgctgaggcgcttgaagctcgtattacaggaaccatgactacaccaatatctgctacttctagcagaacatcaatggtggacattttgaaggcgtacaagggatttgttcaggcttgccccaccttaataatgtgttatttcactgcaaacagaacaatcaatgagcttgcttccaaagcaaccacacttcacatcattgattttgggattctctatggatttcaatggccttgtctgatacaagctttgtcaaaacgtgacatcggaccaccactgctccgtgtgactggtatcgagcttcctcagtcaggtttccgtccatcagagcgggtagaagagaccgggcgaagactaaagaggttctgtgacaagttcaatgtcccgtttgagtacagtttcatagccaagaattgggagaacataactcttgatgatctggtgatcaatagtggcgagacaacagttgtcaactgcatcctccggctacaatatacacctgatgaaaccgtgtccctcaactcaccgagagacacggctctgaaactattcagagacatcaaccctgacctctttgtgtttgcagagattaacgggacttacaattcacccttcttcctaacaaggttcagagaagctctcttccattgctcgtcactctttgacatgtatgagaccacattatcagaagacgacaattgcaggacactggtggagagggaactaatcataagagatgcaatgagtgtgatagcctgtgaagggtctgagcggtttgcaaggccagagacctacaagcaatggcaggttaggattctaagagcaggatttagaccagcgaaactaagcaaacagatagtaaaggacgggaaagagatagtgaaagaacgttaccacaaagattttgtgatcgacaatgataaccactggatgtttcagggctggaaaggaagagtcctttatgctgtttcttgctggaaacctgctaagaagtaataaaacagttctgtaatcatttgcataattttgctagctttccatttctttgtttttggtttcaaagtgttgtagaaactgtttgctctcatatatattgaatgagtctctctctttctctctactttcttgcaagtacatatggcaaaccaagaattcaaaacttatttcaaaaagatccataactttgaactgaacaaaccagtttgcatatcaatgtgtctgatgataatacagatgttgtacgaagataaaaattcacaatataaacagagagactagacaaactaaaaagagtattaaagaacaagaaagtgattacttggaaactttcttcttccctgtaatggcaattttcttgcctttaagggtccttggatgcgccttaccccacggtaaccttgtacaatgtgttttcgtcagactaaggtctattctttttgtctggtcgaggacccaaaagattaagatcaatggtggctccataagtctcagctgatttaacaaccgcatcatatggcttagaagagagtttaagcccttcgttttgagccttcacatgtaactcataagcaagccttggctttgcatcatttgcaagagcctcaatcaacatctcgtaagttatctcgttaggctcaacattctcacttttcattctatgaaaccactcataagccacaccacttaacccgttcctcgcgcaaccacttataaccgcgttgaaagtcacaacgctcggttcaataccctttgaagccatttccttgagaagggtatccaaaagattgaacttttgctgtcctgtcaaaactgaagccattgttgtgtacgcgtaaagatttggctcaatccctaccttaatcatatggttccaaacccgaaacgcctcatcatatagcttccctttctcaagagcactgagtagtgcaccgtatgagatgaccgttggcttttcaccattgtcaaccattgctttaaagatttggatcgcagctgtggtctcagaggcttttgaacatgctacaagaaccgcgttccaatgtctcctctgcggtttcaatcctttatcttccattttgttaagtaacctaactccccatctccatatccctctcttgctagctgcactcagcaagatattgaaatgagagaccactaactcataagacaaattgttaggttcaggtccttcgtcaagaagatcctcgtagatctccaacgctgcccaccatttcttagccttacccatcagccaaatcaaatggttgcaaacagacagacttatctcagaaaacctctctctgattcttttatacaactctttaccaacaatataatgctcttcacgagtacatgcccatataagcctctcgtgctcttccctactcggtctaacccctgcactgtccattgcattcaaaagcttcaacactctagtagtccaattatcatctttcaccaaccaccgcctcatcacttggtagcatattctaccaataaagttctcaagcttaacaaactcaaattcccaatcgtaaccaacatcattccctatttccctctttgcgtatttctctctcaattcaacaaagaactctaaagctcccataccgtcttccattcttctgtaaacaagcaaagccgttgaatatgtaatcgggttaggctcaaaacccttttccttggttaaatcaagaatcccaagagccttgagaaactcaccttcctccatgtaaataaccatcaaagtattgtaagtaacaatgtttggaacaatcccttcttcctccatatctttcagtatcttctctgcttccccaaaccctctcatagcacccaaaaggctgttatatataaaaagatttggacctatgacaccgcctgattcactcttcttcctcttaagccaatctactacagctaccgcaggcttcaatctcttgtccttgccaaaaccctttatcatagcacaaaagacttgcagaggcaactctcccttgtccttgagaacagcatccacatcatcagctgtcttagcagctcgtaaactaaacgctaattctctaacatcaactcttaaattgttcttttctcctccatttgctgaacttaaatcttccgtggaaacttcttcttccccgagctcgagctctcgttgctcagtggcccatcctaccccaaacgatgatcccaacaaacttctctttggctcacacaaaaacagaactttcctgttactcgaaacgaagatgaagctagagatactactactactaccgaagcaagcctgttcaagaaagcaaagtctctttctagtagtcttagggctaactacaaaacaagaacaatccaactcaaattccaatcttgatccaactaaaagaccagactttaatggcaaaatgcttaaagcttgcatctttttccaaacacaatctcacaactagcgttatgtagcatggaagcgtcaaaagacacacgatttcacgcttcaaaagcgcaacggaagcactctcttccaattttgcaaaatcagaagcgcaaagttctttcagaaactgaagcgtaaagatctcttacaaattaatattgaacaaaaacgaaaattgaggagggcttgaaaataacttcaatggcggattcagagccgcgaagaagaagatagaatttttgtcttcttttctttatgtgaaaactgaaaataaaatactattgggcttatgggcctcaattaagcatgagatttaaaaagccttttctacaaattaaaaaattgctaaattaattgttttttagaaatgaaaaatgtaattaaaatccccaacttattgaaaaagttgatttggatctttaactctcgatgaaacgaaataaatatcaaacttctatttttcaaaaataacaaactttcgttggttaaataggttaacatatcccgttaacgaagttaattttttgtcaatatacatgttaactgaaaacgacattgttttctataataacaaaatgacgtctttttgtcgtaacggatgaacgaaatccttaaattcaatcttatatctctaaatcgagcaaaatccatgatcctaaattttcatataatttgacactcgggattttattgaacaattacgacaaaacgatgttgtttattgtgagaggaaatgctatcgttttcaattcacaggtctgttaaaagaaaattaactttgttaacatgctctgttaacttacttaacatcatgtctcaaatttgaataaacgttgagatattaaaaaatcttcaataatataggaaaagaaaactatctctggtcgtgcatcgtgtgcaaagtagtccattctctttagtttttctttttgggttttccaatatatatctttaactaaaacagaaattgtaatacttttcgtaaaactaagttttcatatagttgaatggacagtgataggtgtactaagatgaatgtgagtagtgggaactgagaagtcttcataggccatgtcttgtaagaactcacatgctcacatgtggatatgaaattggtccaaagtgttttttttttctttcataaaacattaaatgttctttaggtatttgtcattggtcccaaaatttattgtctctttatatacatgtctttgatccaactaaattattgttagatgaccattgaccacattgttcatatggatccttcgtattttccccctgtttagcatgttccttttccatcttgtccttggacaatctcaaagtagaaggaagaaacatagtgatatgtcaaaaagagtaatttcaatgtaaagagaagtaattgtatttaatatcttcaaatcacaatgaacaaaagttttagatgcaataaatatcaatttaatctgtctatatatggttcaaatattcaaacaacaacaatcaatattttttatgttcatgatccaaataacacttagggttggtaaaatttcaaacataaattaatagacatgtatatcaaaaaagttttaaccgattggtaaaaagatgacttatgtcaaagtattaaaaaaattcaatttttattacaaatttcaatttttttttacgtacaatatatatatatatatatatatatatatgatgcaactaatatattcttctatatatcaatgtaaagagaaatataattgtattttatatcatcaaagatcacaacaatcttcatgtagtctagttttttaaacaaaagttttggatgctatagatataaagcacatcagaaacaagctctcctcaatccaagcaagcggagaccggcgttacgacaattgctttcaaatttggtttgcatcaaggagctagaggcggaagagtctgaagtttctttctaaattttaaaattttcaaacatttctatacaaacattgcacattgtgtaaaaacgatttttctttgaatttctaatttaacattaccaatttttttaaaactaaagttatatggattgcctgattttcagccttgttcccctcccccccccccccaaacttttctgctctgaaaatttcaccatcaacttacatttttcttaaaattcgtataatcattatcgtcgtttccctcatccccgctacaacttcctccgtcgacattgctctcactctctggaacggtgaaatcaggatcatccaaatcgctctgatacagtaactcactaacctgcatatctttatttgaattctcaaaccagtaagacataatttgaactcgaacacaaatttctctcaagaaccctagttctcaaaatccccaaatcgcgaatccattgagttaaattagaagaagaatgaaacgacgtggttttgcctttgggctgttttgattcaggcccaaatcgattttgattcggttaagcccaaatcaattgcaggacaaatacgacgtcgttttggtaatgggttgctgagtgattatatgggcaatcttaaacgtggttgcctaaacgcgattatatggttaagtatggtttaatcaccgatttaattggaggcgtagttgtaggaatgaatccaaaagtacatgtaggaattttatgaaaaatgtaagttgatggtgaattttcagagcaaaaaagtttgggagaaattttgagaatgcaataagtgtttgactgaaaaatcaggcaacctatagtatatttgttcaagtgaaaagtaatatagaagaatataatagttgttggagaacaaaactcactagtaataattaaagaaattaatttaaggctatatttgatcgtttttgttgttagtttagagggattgcaaagttgctaatataatttaatcgaatcttcacatatcatgttacattcatcactaaccgacagatttgctagaaagtaattaagactcgcatggacagacacacagacagtgaaaaataacatttatagatgcggtcaaagttatacgctcgttgactgccaatagttttatagtacgaattttccttttgttgttggaatcttcttaacaaaatttataggtagattaatctcaatgatactatcatctatgccaatataaaattgcttcataatccagaagatatcataaatgttactactacacccaattataagatcactagctctcaaaagattatgtcacgactactttctagtatcgtcatgtatgtaatttctaaataatatgctaataaatatatatagttcgttcacccaatggctcaaatcaacaaaatgattcaaacatggatttttcttagattcgattcccatgcaaccacatttatgcagcatccatgcaaacgatgtagccatgtagaccctattttatatacttacatatatgtatatataatcgacacgtaaacgcaattttgttataaactatctctctcactcttctctctctccacgcacaatatacacaaatatataaacacatttggatcaatagaaggaatcacattgttgattcatggatgttgaaaagctatggaatcatacaaagaaagattccatctttcaaactactcatttctcttcttcttcaaaaccttttttcacaagaagcttctcaacaaaaacttcatcttctccatcatccaaatcccatttcactagaagcttctcaacaaaaccttcgtcgtcttctagttcttcagatctcattttcagacggagtttctccgcaaagcctaaaacatcgaagtctttgcttttgtctagaagctgttccacgaaatcctcagctgatttatcttccaagtcttcttctctatctagaatcttgtcaaagaaaggagcttccgtgacgggaaaatgcttcaaagtagcgaaggagcataagtcccgcttctacataatcaaacgctgtgttttgatgctcgtttgctggcacaaacattcttgagattcattgcattggatccaaatatagaagagaatctttgtggaagcaaaaagaattattaaatttataactatgaaaagagtattccatttgcatttggttatattctttcgttaacccgtctttttcttctatcaatgaccgtatttggtataaacaaccatctctattgcgtattatttctgacttcatcttattattctgcattttttgaaaataatgaataaagttacaaaaatgaataattttgaagttttttttgcacaaaacactctcttaaactattggtaagtacacagttttgattcatagtattggaatgtaatcgaccttcttatcctaagtgtctgaatcttgaaaggaaaacttgaaatggcatttggcataaactaaactaaaggttgtttcactcttaggcgaagttttttttttttcaaaggctaagttagtacacaagtctagatattaagtagcataatttcatgacaatagttccatgctacttataatatagttggtgggaatttagtttaaatatttatacgtaagggaatcaatttgaaatctcacatataattatagaaaacaattttaattagaaagatagtagcaaataacatatgtttaaaaaattattttatttattactaaaatttgaaagatacatgcatgaactatcaacttatgactataattataagtctcgagaccgttttgattaattagtacaataaataacccttacacatctcgacactaacgtacgttgtacaaaaaccaaagaagaagaaacattccatgtaattgtttgaagtgtggccgtagatgaaataagcatcacgtggaggctgagccaaagaacgactcacaatcgattctatgaagtctcgaagtctactaatagttgatgaccttcgaaacgcataggaacctcaaaagagatttcaccggaagtctttttagtatttcaaccgtaacatggaggggtaattggatatctccacagtgaagaagtcgtagtgtcgacgatagtgaggtctcttcgtgtcctctcttcatcgcctctgttttatgaaaccctagagatcacttgtaaacttatatgtcacgtaagtggaaaattaggttgtctttctcgggcctacaaattagaaaagcccaagtttttgtaggcgatacgaaaagtcaacgctaatgattactttccttgttccaagaatatgggaacatgacccatgcccgtttctccactttcttcagtgtaggaacttaatagttccaagctttctccttcgtaaagtccaaaagaaaacagataaaggcagagaggcttttttcccactgaaactgttgttcttgtgctgagtttatgattttattggaaccgcattattccttggatgatttgaatataatttggataatccgttaaaatttagcttctgcaaaaacaaatctaagaagaattatcattaattttacatatctgattgtgttataataatcagtgttcaagaaagaaagagctagggactagtcgtcatgtatgtgatttaaggcgatttgtgtataaatatataatatataatacaatgtatattggtttttatatacataatataaaaggataaaagtttttaaagaatgtatattggtttacacaacgttttacatgtataatatagaaactcacacgacgttgtgatttatttactttgtggtgtgtgtttttttcctgctcgtttgttatgttgtatttgaggttgttgcgtttgagtgtattttgaaagtagtatgtattaggagtttatttgtttacctgacctttcattttctcattggcagataaatctcttcttgaagttatgtttctctgcataaaaaaccctctttcttgaaagcaaaacaatgctgttagcagtaaactatatataagcagagtaatcaggaccctaattgtctaactgaacacatggaacaatagataaaactagaaaaaattatgtgaagaaagaaacttacgacgaattcagaattctccagagtctactctaatgcgagattgattgttggctcgcattttttccttttagtcctgccatgaccaggataatgcagtattatgaaccaacaactgcagaataatgccaagtgttgtaagagattaaattaccttaaaaggaagtgccgagggaatatcaagtggtcgtctcgtgtccaaaaagcttctctaacagctaacatcttatctctaaaatctttagtattttaccttaaaaaataaagatcaaataagttcaaatatttcccaaacgttatataaaaatcagtgcataggttgtttactcggttttcatccaaacggagagattcataaacaccacaaacgttctgcatcaagaaacaaactcatgtcatttctttgatggtaatacactagtactggagaaaataagatgtcacgagaattatgtaacaaagtaccacacaataaattatacatattatagattgtgagtaataccagtaaacatctaacagagaacaagagagtataatcacctgacccttcatttttcgaggcaactgaattgcttcattgaatctagatttttcagcttaagaatcctatatcgtttgaccaaatacagaatcatatatcgtgatctaactcattatgttaccagtaaactatgagtaaagacaaaagaccaaggtacttactggaaatcttacttaaccagttaaccggatccaagcctatatgcttgtccaaagctgaaaaccaaaaaaattgtttatcttcatagtaatattgaaaaggtttacgaagtatgatggaaactagttattattgtgttaatttctcctttgcgaagtatgaatttataagcattttgtgtaaagcaaaagtaaggttctcgtttcttttcttggattttgaatcatcaccgaatttccattcacatgaacagaacgtaaaatttgacaaatcaaaacatatctacattgattacctgtttgtttttgtatgcaaagcacagttttccctcgtaggcgcttgaattcctctttcaaaataacataaaagtttacgaacttgttaaacaacatactgaacgtcaatatgactaacaatagttgtaagatactaaaatggaaagacaaggagacttcacaagatattgacttggcaacataatggcattgttcttgccaataaagaaagattgaattttttttttcctgtgtctagtattgtgttgaattttattattgtgttatgttgtgttgtgttcgagggtgctttgagtttatctgcgtgacgtgtttttttttgcatcgtgtttcagtttcacgtgtttatgtttgaattttgttgtctttcggtgtgttttgagtttaggtgattgcatgtatatgtattcgtaaagttgtgtgtttctagatagtttgaggaaccaaaacaagccaagccaccaaggctcatcaaatgcaaataacatgtagggaagaatacatgagaattgagtatatacacatgagaatagaggaaactttactttacctgacctctcatatgctcttgctgcaaaatcgtctctcatttgctcttggcaaggacctttgttctttacagaataaggatccactctctagaattcaaagcattttgttagcaaacattatgtgcagagcaaagcaggatcctaacacaacatacaaacaatatataaaaactacaaaatcaatgcaaagaaaatatatggtaagaatcttacagaggctgactggttttcatctcttgttctttaaatcttcacggaacatgctgtataacgaaaaacccgaatagaaaacataacccttcaagttagaaaatatcaagagaatgtcaactgttgtaagaggtgatgaaaaaatttaatcaccttagcactgaagaatatatttgttgtctcatatgcacgagactttccaagaagaagaatctgatccctgatttcgttagtattgtaccatggaaatcaagatctagtagagaaatgtgatatgccttattagttcttgcaagttaaaaaccattcaaacacgtcatacatttccaaacaacattgtatcagtgtgtgtaatttatatacctggcccttcttctttcgaggagactggatggctttcttaaagttggttcttttccgcttaagaatcgtctatctttgtacaaaaccattatgttagcagtctatacacaagaccataatttgtttacaaaaactctaaaaagggatgaagatagtttatctacctgatccttcgtttttacgaggcaattgaatcactttcctaagtttagctattttcatcttaagagttctccatcttgatacaaaaccattctaatagcagttactaagcatataagactataaataaaccacataaataatgctaattaagaaacttattggaatttattgagttggatccaagctgggattcgactgctttgctcttgttgtttctgttaatcttgacaaggaaacaatgtccacaaaacatgtttattacgtatgataaatattctttgtgaaataagtattaataagaaaatttgtatgaagaaacttcaccttgaaacttgtgtttttctttaagtttgaagtatcactaagtatcccttcacatgaaatcacatgatgaaacatatctaagtaaatatatttatttttgtatgacaccgtttgagcttgtgtggcttggatttcatttttagagtagcataactacttagattcaatgtgaccaaaaaaaaattaatagttgtaaaagactaaaaaagaaagagaaagaaattttccctgaaattgacatagcaacaaaatcccaaagtttttaactataaagaaaaatattgattgttttttttcgttcttttatgtgtctagttttgtgttgtgctgtattttatttcttgtgttatgtggagtttgagctttgtttcgtttgagtatgtttacaattttgtttgcgtgtgatgtgattttttttgtagagtttgagttttgtgtgtttatgtttgagtttatgttgtctttgggtgtgttttgagtttgagtgttttccgtgtttgtgaaagtgtgtgttttcagatattgtgagtaaccaaaacaaagccaagatagctatgcatgacacaattgacatgagaataaagtgagagatatctgacctcccacatgctttaccttcgaaatgttttgttctttggacctcaaagatatctccatgaagcagggcacaaaacccctcattttctcttggctactgaatcaaagtttcacctgaaagtacatcatacaaataggacaataaaatgaaaccacaaaatcactgccaagaaagaaaaaaacttggtaagagtcttacagatccaaaatctgactggttgctaatattttctacttttaatcttgacggataatgcgttaacgacgaatacaacagaaaaacataactatcaaagttagaaaaacaatctcattttaagaacacattaaggagactgcatcatcttaggaacacatataatttaaagagtgctttaaaacttacatcaatgtccccgtctccaaattgagatatgaattgccacttgattgctgaatcatatgaccacaagactgataagagcttgaaacattaacatgcaattattgaaacacgggatatcgagataaacaatgtatgtgatgccatagaatcttcttgtaagaatataacaattaaccattttttccgaatcaatctccacagagccaaaacgatacaataaaaaacattagtttgagtaaccctaacaagccaaggtatctcatcaaatgcaaataacctgtagggacgaattagtcaccttagcactgagaaaatatttggttgttcatgtgagaaagactctccaacagctagaatctgatccctgacttcgtttgtattgtacttggagatcgagatctaaaacagaaatatgatatgttttattagtttctacaagttatagatcacttaaacacatcaaacattttgagaaagaaacattataagtgtttatctacctgacccttcttctttaacggagactgaatggctttcttaagtttggttcgtttccgatcaagaatcttctatcttggtacaaaactattatattagcagtatacttaatacacaagaccatagaaaaactacaaagagtttgaaaagagacaaagatagtttttctacctgaccctcctttaaccgaggcgacgaaatcactttcccaattatttttcaccacaagagtcgtactccatcttgagacaacaccattcatatagcagttaataaatacatacgactactaaataaaactacaaaacagtgctaataaagaaacttgctggaaatcttactgactaatccagtgatcccactgtttggctcctactatttctgtttatcttgataaggacacaatgtccacaactgaaatgttgaacatgttgatatatgaaaaccagtttttacaacacgatttgtcttctgtgaagtatgtattaataagaaaatgtgtatgagaaaaaatcgagaaacttcaccttaaaactctagtgttttttccttcgattttgaatcatcacagagtatcccttcacaagaaatgacagtatgaaacatatgtaagtaaatgtattgattacctctttagttttgtatgcaggacactgttttcgcttgtactggcttgaatttcactttgagagcagcataaaaagtaattagattcaatgtgacaaaataattgatagttgtaaaagacaaagaaatgagaagagaacgatacttcacctgaaattgactaggcaactgaatctcaaacttcttaccaatacaaaaagatattgatcgtgaagttttgtttttttgtcccttttttggtgtctacttttgtggtgtgctgtattttgtttcttttgttatgttgtgtttgagtgtgtttagatttttgttacgtgagatgtgcttgtttgagttttgtgtgtatgtttgagttttgttttgtgtttgggtgtgttttgatttagagtgcattgtgatggagtaatttttcgtgtctgtgaaattgtgtgttttaagatagtgtgagtaacccaaacaaagcctagacaacttggctaatcaaatgcaaacaccctgttgagatgatcctgagaacctatgcatgatacaatagacatgagaataaatgaagcgatatctaacctctcatatgcacttggttacatattcaccttcgaaattttgttctcttgacctgaaaattaccagcaagaggccggaaacacgacccctcgtttgcctcttggctactaaaccaaaatttcacctgaaagtacaacacaaacaataaattgaaaccacaaatcaatgccaaaataaataaaaaaacactaggtagagtcttactgagccaaaatctgactgcatgctactttacagatcatgctttataatgaagaacccaactgaaaacataactcttcaagttagaaaaacaatctaactccagaggaatataaactgcaatatcgtaccttggaaatcgagatctatatgatatgtttttttagttgatatcacttaaacacgttagaaattagtagaaaacattgtatcaaagtgtgtttatctacctgacccttctttttacggagagattgaatagctttcttaaatttggttcttttccacttaagaatcgcctatcctggtacagaaccattatgttagcagtatacacaagaccattagaaaactacaaaaactctgaaaagagatgaaggtagtttatctacctgatatttcctttctccgaggcaactgaagtactttcctaagtttagttatattcagcttaagggtcgtccatcttgatacaaaatcattctaatagcagtaactatatacataagactgtaaaattaaatcacaaaataatgctaattaagaaacttacaaattctgatccaagcctgattcgacttctttgctcctgttgtttctgttaatcttgacaaaggaaacaatgtccacaactcaaatattgaacatgcttattaagtttgaataaaacaagtttttacgagtgcatttgtcctttgtgaagtatgtattgagtagaaatagataaacttcaccttataactctagcttttatcttgcattttgaatcatcaccgagcttccctgatatgtctgagtcatggaaagtaacataactaatatcaaaataaatttcgtatgcaggacaccgcttctgcttgtagtgggcctagtgtctttgatgagtttttcttttggaatagcatcaaagtaagaattgctaacaaaatatactaagcgtcaattgacttagcaactgaatctcaaagttcacctgaaattgacttagcaacagaaaatgattaatagtcgtaagataccaagaaaggaaagaaaataagaagagatacttcacatgaatttgacttagcaacaaaatctcaaagttcttagttaccaactgagaaaaaaagatgttaatcgtgaagttattgtttttttcttttggtgtctagttttttgttgtgctatatttaatttctagtgttatgttgtgtttgagtgtgtttagagttttgttgcgtgtaatgtgaattgtttttgtgttgcatttgagttttgtttgtgttatgtttgacttttgttgtctttgggtgtgctctgagtttgagtgcattgtgtttgttgtgtttgttatgtctgtgaacgtgtgtgtttctagatagtgtgagtaaccctaacaagtcaagacataatagatgaacttatgcatgacacaatagacatgaaattagagggagagatatctgacctctcatatgattttggctacaaaatcaccttcgaaatttttgttctctggacctcaaagatatctacatgaagaaggagacacaacccctcatttccttttgcttactgagccaaaaacttctcttgaaatactgcacctgaaagtacaacagtaaatgaaactacccaaataaatgccaggccttatagagccaaaatctaactgcttactaatataactatcaaagatagaaaaacaatctcactcatgagaacacattaagataatagaaagagactccaatacatcatctaggcaacaaattatactttaaaacagtgtttcaaaacttacattaatgttcccatctccaaattgagatatgaattgccacttgatagcctgaatcatatgaccacaagactaattagatctcggaaatcaaccattttaaacatgcaaataagaaacacaaattcacagattgttcttgcatgaatataacaatcaaccatttttttcctttttcaaaataaatcttcacgaattcacgaataaagacagtgatggactcataatgactccacaaccaaagaaagatccattagtccagattatgcgaatatgattgcttccttaaaatcccaaaacgatacaatcaaaatcatggactaaaagttggtttttaaatcgttggtttttttagccattcagactcatcaatttcaacaagtaagagagacatttagactctattcaactgtttcagaacattaaaagtctccgatcaccaaatttaaaacctatcgaacaagatagacattatcctaatagaaagatcccagaaccatcaaacctctaaattccaacagaaatcaacgaaagcaaattccaaatccaaaccctagattcccaaattaaccaagaagatagagagatcgaaacatttcgtaccttcttcgatttcgtaagactatcacacgatcaggattcaaaccaatagacaagtaataatccttgcattaatcatctgattatcatcgacccaaaatcaaaaccctttgatcccgatttgaatttgacccaacgaatcagagacgcaattcaattgatcggagaaaagaatcagaagaagatagaaaatgaaaatcgcttctccatgcgaatatgtaaaccctaacgcatttttctcaaagaggatttgaagaaatgaattttgaaatttcaactttcgctaaccgttacttgtggaaggggaagagttaacgttggcaaatagagtaagtgaggccagaactatttaaccggctcttttgaaacaatcagcatgttaatttacgattatgaccctgagttttcaaaatttgtttcccgcttttgagttagaatcacatacacgctagagtagtttaaacgtcgtgtaaaccaccaacccaaactaatcctttggactttagattaacaaaaacggaaactaaaaaactaaataattcattggagctaggtcgtgaaaacattacaacttgtggagtttttgattttagtagcaccaacaacacttggaggtatgtggtcgctgctccttgtcttattgatggtagaaataatctattatatttagatggatcactctattggttcaccaacgaggatatcacagaaacaaagatattatctttcgattttcacatagaaaagttttaaatcatctcaaaagctccgtttggccaagcaactcgtaagcatatcatcatgtgtaacctgaataatcgtctttgcgtatctcaaaagaagtggtcaagacaagagatatggacattagacaattctgacatgacatgggagaaaatatattcgtttgatctgccagtaacagttgattatcattcgttctatgatgatatctacccatgtgtcactctgatcatggttatgaagaataagaaatcattactgcttttggatacaaatgtcaatgatcacaatcttgctatattcgaccctgaaatgaaatcctacaatttatgtttcacacctggttattactcatatgcgctttcttgtaatcaaagcttgatgtcaactgaataaaaacagtacatttcgttttctaagtaattttttttatatatttggtctccatgacacttttttgtcctcaactttagtcgtaagcagaagcgaacccacgttatgggtggtgggggcaactgccaccaataaaatataaatagtttacgttttttaataagatatagtaagtaaagtagcagaattgtaagaaatgcccccactaaaagcaagagttatcgggtttaaagctatttagagacattttgcccccattaaatatttctgctgggtccgcccctgatcgtaaaccatatgtcagtctcataaggatttgctttgttgtgctgaagtaaatccgcaagcttttgttctctaacacaaaagaaagtcacatagtcatcattcccagcactaaactactattattctacaccactcgtctttacattaacgacctttacattgtccgtgctgcttctttagaactactaaccacacttgttctgttttgcatatgtgaaagttttttacatgtttgtgtgtccatacagaggaccgcatgtttacaacaacaacaaaaaaaaaaaaagaaaaaaacagaggaccgcatgttttaaagttcctttggtgaatggaggaaaaaacacgttactcaaaaagtaatacgataagtggtccggccatttctagctcctccattactccattcaagcatctagatctaacccctttggttacacatttacaatgaatcttcttagaaaatatctgacaccaaaacttggtgacttttttatcagttccgttcaatattatcgatttttttaggatcacccaaatgagtagagaggagaaccttgactttcaccattaagaaacattgtatttgtcataaaagaaatcaagatatgaagaccgtgtctataaagtctatccattcaattattttgtcataatattcaatgtaaagaataattcagatcatcaccaagtgatgtaagtagtgacgtatgcgagagtaatgccacaagaactcaatttcgttgtcctaattttatattccttttctcaagaaatctatgtatccacgtaactcaatatagctttcctgatattctttttgtatacttccatgaagtgacgaaatgttgttagtaaaatgatcttatagatcaaatcacaatgatcatcacccgatttggtcaaaaatcaatggctccgaatggagacgtgcagttcaactgcggataaagtgttgtgcggttcaaatagtaacaaaaatatatacatacatatatatgtaaagaatttcgttactatttgaatcgtactgcactgtacggttcggtcaccattcgaagcctatatcactaccaaaaatgaagatgaattcaaatctggcaattgaaaccatcaattttcacaatctctctctctttcactttctcagaatccattaaaaaggttttaagaataatgaatttgacattttttttctgtttcacataaatttgatgtaacaagagaggtaccaaataagttcatctaaataaatatatatacattgttgaatcaacaaacaaaaaaatctcacctagtttcatcagaaaaatcttctgatcaacgaagttgatcgattcataactctagtttcaccatcactatccaaatcaataacattcgaattcgaagagccacgacttggtctaactcttctcataaacgaaaccattccacgaacagctcttctcaatctaccaccattaccagaacgaccaccattcctactcatctccggtgtctcatgagctctaacccaagatatccttctcggtccttcattactaccaagtccaccaccatccatctccgtcaataccaccggcaatatcctctcaccttctctcactcccgcgttaaacctaccaacagcgaaaccaccaccaggtaatctccaaatcgtcatcccaacggcatgttcttcttcattactccgttggattggatctgaaggtaactcaaatctacacacaggacacgaattccgaatcgaaagccatggaacaatacaatcaccgtgaaatatgtgtttacacggcatctcacgaccttcgattccggcttcgaaaacctccgtacacacggcgcaattagcttctgctttcgtatgacaatctgagatttcgactctaggtaaagattcaatcgctgatttcgacgccggtggattcccagatctaccgattccgttacctgacgcttcgatctgactcaattgttcaagtaaccgttcgaatccagatcccatcaagatctcagatacagaatcaggaagaggtcttagacctgaaccagatccatcatcgtaataaaactcataagctcgtcgttctctagtagctccgtcaccttcttcgttctcaactctctcaccggctcctcctcctcctccgccgtgtaagacgattaccggattaaaggacgtccggcgattagatctacgacgtctaattatagatctatgtgtttcctcaaccgatctaacttccggagtcgaagccggaatcgccgcgacggtggaattagaagaatcttcaatctcttcgatgaatccaccgttgcaataaggacataagactccagcgtttgcgtcttgatcttcccaaacgctgatgaatcgtgtacaactgtaacaccaatacgacgtcgttagagtcgttgttgttgttgttgttgtggtggttgattctgtcgtcggagttattgtcgccgatctagaatttggcatcatcttttgaaaataacttgtgttgctggtgaaaggatctgaagttgatgagagaaggaaaaaggagaaaaaagatttgtttatataatgtggttttttgtaggtgagtgttaacggtgttactttagacggtgagaacacgtgacagtgttttgagttttgactaggggagatgatgacggagttattaacggtggtctctttggagtgaagagcgtcattgacgtgtgcgagatatttgacccaaatgtgaaaactgttaccttcgaagaagtttcagaagaatcagcgtgggacctaccttcgtttctttctttgaaagttactaaacgtcgtcgttttgtggggtaagtatactttagttggagtacaaaataattttgtttgtttgtaaataatttgtttcacaaggtaaaagatccatttgaccccaaattagaaaagaaaaagaaggtaaaagatctatttgtattgatgtgaaatatataatataaatctttgaattttggaaatgatgtaaatgtgttcttgtatatgttgattatcaacatatgttgacatattttttagtttgtttaaggactaaatggttattggttcaactttaattttgtcaactaaatgcttgtagtttgttaaccaaaacatttgactttatgagttatatatatggagtcaattatgggttggaataaggtagattcttctcttatcctcatcgtttggaaacattacaaagcgtactggtttgggtttctttttgagattgttcattttgggctttgctctctgacagtttagactttggaaattctctagctacttcgaaagtttgaagtgacaatatttttacttgcaaaggatgttcgaagtttcagctaaaaagattttacaacatgcaaatattgtattccataactagaattactttcggtctcaaaaattgattgttctgcagtctgaaccaactactattttcctaactcattcaagtcttccaatagattgagcaatttataaattttgtacaacaaagcttcatagctgattgtgttatttcagctaaaaatttatgagaatttgctgtgatgatgagtgggacagttatacagatttttagctactagcacgcttaaaatgttcacgaataaacctctcagcgtgagacgggtacttatctcgaacataggctcgaagacacttttggtacgagaaatctatccatccaccatctgttctcacaacaaagaggcatcttgagtgcctgaattgtggatgccgatcaacctgccagtaacaaagtagcacactcataagtccatgcacataaagcaaatgaagatttatggatagagcatgtaagtaagtcatatatctatcatggtgattcgagaactatgcacaatacctcaagataatttctatatgagtagagcttaaagagagagatatcgggttagctcgaatttacgtaccattataaaatcaagaccacaaccaattttgtctttggaatatgggtgataaggaagaagcttttccatgacaattttctcatcctcaaaatctaagcgttctccatccaaatacctgcttaccaaaaaggaaaaaaaaaacagctcactagaactgcaaaaagtaatctacacaaagaaaacagcaagtatgctctgaagctagcttcaaatgtcaatagttcactagaaaaaagttgtaatttgcctaatgttcaagtaaactgaagatatatacaagagcatctctcactttctgcaatgaccactataatcctatcatccattgctaaaggatcctcaacaataagccaagaatatcatcatgtgtaatagtcacctcaaaaggccatatggtgtctctatgttgtttgattaagctactggaagaagctatgagcctataccttcaatactaatccaaacatggaacagctattgaagaacaatcagcaagaatttgaagaaattacctatcggaatgaagaatttctttagcgagaagagaaataggttcaatatctcgaagaatctcagcctctagattcttccatttccgataatcaggatcttcataacgccagctattatcaacaacaggcgatgtcacgttcatcgccgccgcgccggatccctccaccggagaaacagaatcattattctcgtaaaactgtggtctatcagcaagagaacacaacaaacgccgacggtgactgagaattccaccagctacgataccaacttgatgacgatggttgagaaatccgttgcggagaagcggaagcgttctgagaagaagtagcgaggtcatcgaccacaatcaaggagtaatatagacaataataacgaataaaaccctaatctgtactaatcactcgaagaagatgaaaaattggggaaatctcagagaatcagaaatttgagaagaagataacgtttcgtcagtttgtgaagttggggcatcgaacccgtgacgttgaagaagctaaacagagtaactaaacctctctgagcctttccacaataattattttcattttcttaaaagttaggtgccagccaatctgtgccgttagattgatctttatatgcttctataaatatctaaaacaacaatccaacggtggaaagatcacattgcgtgtcagtactgtagatactcatcaccgaatctttctcctcttttcactctccagctggccgaacccaccggttttgcccactttctctctaggcccgcaaacacaacttgctaagtcggtagtaatttactgaaaaaccctcacaaatagctgacttggctcttttcactccacgtggctccatcttacgtgcctagtttggtaatttcaatttcaatcacctagatcgtaactattgatacataatgtgaactgatgacgtgttgaaaagagattggttaggtcggtttgaaaagatatttagaagatctaaaatatctagctaactcgtccacgttggaattaaaatattgcgctttttcctggaaaagaaaaatataaaacaagtgataatcttctctttttcgaaattgtttcacttctgaaaaaaaaaaaaaaaaaaattgtttgctcatcatcttcacaaaccaaacttctcttcttctccgatctcagatttgaatttttatcgattttgagcttcgaagagctcaatctctaactgaatttcgagaaattagagagtttgaaatgggagaggaagtacaaatgagcgattacgatgtttccggcgacggagatagggtttctgaatgggagatgggattaccaagcgacgaagatctagcatctctttcttactctctgattccaccgaatttggcgatggcgtttagtatcacaccggagagaagccgtacgattcaggatgtgaatcgtgcatcggagacgacgctctcgtcgctacgtggtggatcttcaggtccaaatacctcgtcgtcgaataataacgtggaggaggaagatcgagttggatctagcagtcctggatcggattcgaagaagcaaaagacatcaaacggtgatggagatgacggtggcggtgtggatccggattcggcgatggcggcggaagaaggagattcaggaactgaagatctatctgggaaaacacttaaacgaccgcgtttagtgtggacaccgcagctacacaagagattcgttgacgttgtagctcacttagggatcaaaaacgctgttccgaagacgattatgcagctgatgaacgttgaaggattaactcgtgagaacgttgcgtctcatcttcaaaagtataggctttacctcaaaaggatgcagggattgactaatgaaggtccctctgcttcggataagctcttctcttcaacacctgttcctccacagagcttccaagatatcggtggcggtggcggtagcagcggtaatgttggagtgccgattccgggggcgtatggaacgcaacagatgatgcagatgccagtttatgcacatcatatgggtatgcaaggatatcatcatcaaaatcataatcatgatccttatcatcagaatcatcgtcatcatcatggagctggtggaaatggtgcgtttgagtcaaatccttatatgatgcagcagaataagtttggatccatggcttcttatccttctgttggaggtggaagcgcaaatgagaattaaaaagagtctatagatggattcaatgggggaggaagagataggtgagcttgttattgctcgtggaactgataattattgtcaagtttctgtttttttaagtacagtacagttataattcttactcgatttgatcgaaattttcatcaagtttctgtcttttactataaatggtatacaataaagtcttaataatcacttgtttggtgatgttgacagagttaatataatcaactaagttgaatttgattttgagattcttgtgctatgttgaaatgttattgagaattaagtatcaaaattgctctcatgtgacttgagacttaatgtaatccagatcatgtttgattcatcttcggaattatatggtggttttgaaaaccatgtgtttaattttctcttcgggactaggtaactaacactgtgagttatgtcaaatccaagagagcatatgtgtcatgtggctcgacattttcttgtgtactctttttgcagaagtgatagtgtcatgttattttggttttggtttcctcattgggaaagtcttgtgatgttttttgatctagacaagatattacctgtgcaagcttttaggtagaatgagcagtttctcttttatgtttgggttctgcatcttttgcaggtcttgatcatatttgattgttgttacaggttcttggtgtctacaaaatttcttatcttttgcggagttttccaccgcaaagtcccaaattgcatctgttcaggagaggatcatacaaagtatcatgtagaagctaaaccaagagaagactgcagacaaatttcatatactcatttttctatcttgtaagaggtaagtccctttgttttatttgtctgcagacttcttaaagtggtaatcaagagagtgaattgtttatttctgtgagagatggcgtcagacacaaactttattttaaaaatttataaaccaatcaaatgtttcagaagaagccattttaatacaatcaagtattcctcatatgatgaccttacgagtgattggagagccacataccaatgaacgtccaacaaaaggaagaaagtgacattttaacaaaagcaaaagtctttccaatgtttcttgctgacataggtttcagccacttagggttctactttgagatttagataataatttcaagaccttttcatctccaatatatgttcataattttcattaatatatgattgtttctctgcacatcatacattcagtgacaaccttatcttcagaccttgattatcttatttaatagtagcgagattcttctagaatagaaaagtacatagatttcttaacatccacacaagtaattgtcttcatagagtcatcatgaagtgttcaaactcctttagcgagttgtgtaaagaacctccacctctaacagaggctctcagctcctccttcaaagtgacggctctctttctcatttcctctccttcttcgaaaaccgttaacctcttcacagctctctcgaccgctcctctttctagatcaccctccacttgaatcccaattttccaaacacactccaagtaccttgcgttcacccgaaaatggcctgcaaatcaccggaactccttcgctgatcatgttttctagtatcgagttgcatcctttatggctccaaaacgcccctattgcaggatgagcaagtacttccttctgtggagcccttttcacaatgtagttgatacatatgttttctacttgtttatagggcggaagctactgttactaagaaacctgcttttcctccatttccaaaacctacaagaaaactaataagtagctctctaagctccgggcttatagattactctgcttctcatcttctttgaacgttttatatatataaatatcagattctcgcttgtggacactaattcatccgtataatgttttgttagctctctttgcgcacatgtgaagcatgtggtcgatggtgtacgcaagtagttacatctctttattttgttagagagagtagtaatcaaagacaaaagaaaagatgtttattgtgatgcaacaattctatattgagcaaactgccaagagtgatacaaaagaaaccacactttgcaaattttgcaacaattcaattaatattacatgaagttcaacatctttgctttgtcttcaagtaattgacaatatcttccaatgcgttgtatgaggcgcctccactactgacagaggctttgatcttctctttcagaacaagggctctctctcgcatccccgcaccttcgtcatccacgatcaacctcttcacagctctctcaacctctcctctatccactttaccttccacctgaaaccctattctccaaacactttctatatacattgcattcaacttttgctcgccatgaaagggcttgcaaatcattggaactccttctccaatgctctcgagtattgagttccatccacagtggctccagaagcctcccactgcaggatgtccaagtacttctatctgcggtgctcgtttcacaatgtatcctctttcagagaccattttattgacatcctctggcaatgactctattccgttagtgccaaggatagaacccgctcggataacccatagaaatggttggttgctattacacaacccccaagacatctccaaaacttccttggtttccatttgaccaagtgttcctatgcttatgtatatcactgactttggtttctgcttgttcagccattcaatgcagctcctgtcctcttcaagtaaactagaaggtgatgaatctgtcatgtgaagagggcctaatggatacacagaaattcctactttttgttccagccatgacagagacgagctctctagacagctcaccgtgttgatgataacagctgaagctgttcttttgttggctacttccctacagagctcaaaaaatcgatctagtggccccattcctgaagtcggtaggtctttgtatcgtaatggatacaaattttccaccaccttgtcttgcatatcaggatctgcaaagttgaaaaaaacaaataccaaggttaagttaaaagagtgatcatttcaagattggttattaagcttgttttggttaccttccatgtcaagcaagaacttgtctgcattgagttagctaattacacaacgtgaaacgtaatttgcagcactttgagtgctgaatatgacactaggaatgctgaactccttagctgcagctccacagaagtacatgtactcgtcgtaaatgatacatgcaatatcattgccttgttgtagcaacaactgacttatacagtccttgaagcttgcctcgcttgttttgttgagcgttatcatagactcgattcctccgagtttctcgaattcagactctggtaagctttcttttatggtgacaaactgaaaaccagggaagtgttgagaagaagagcttacttgattgaaatgtccctcaacaactgtaattgagaagcccttcgagttaagtactttcccaagttgcatcagtggagttacatgaccttgtgctggaattggaactaacactatccttctctttgcttccattttcttctccattgcttaatctctctctctttctctcctttcatctcgaaacatctcttattaacagacccaaaattattatttaaatcccatttctttgttttatgtgacatttggtagtaggaagaaagtgacagtaacttcaataaaaacgtgtttcttgtagctggtttgtttttttatctcacatatataagagttgggattatacttgtagtctccaaatataacaaatttcttcaaaagtggttttccaatcttggttattgcatcaaagtccaaagagttggtattgacttactatagatttccttcaaaagttgcaacacgtatgattctccatcttggtgaaattattgcatcaaagggttggtatacgatttaagaatcatagttttatgtacaacgtagtatcgttcattttcgcttgctaatgagaaatatatatggtcgagaagaaagtgacattaactcaaataacactcaaagaaaaacttgtttctctgtttgttttgtattggctcacataagagttggtaattttagctacattaggtaggttttgttttgagatttagataataattaatatgtgaagaggctttactttgtagtctccaaacacaaaagattcctgataagtggctacatgaatgattgttcttctccacgtagaaaatctagaagatatcatgctagtgtggttcttcagcaaaagaaaatgctagtgttgttgtttctgataccaattgttggatcggttacatatgaaagttaagtcagaatttgatattggtttgatggatcagttaaatcagagaacagcgatcaagttaatagagaaaatcatcgaatttgggactgtttatgtttattatatctttgtatacaaataaatattcctaagcaattgtgtttgtgactttgttcattagctaatgaacttttcaactgaatgaagagaaactgacatttccaattcgaaccggaagacacgcgctggttaatctaaactggaaatccgaagaaacggtttaataaaaaccgggacattcagttagagaaatctattgtattggtttttttctcttcgtcttcctccaagatccctcctttatcggttttcagctaaccagactcagatgcggcagtttgcggtggttttgtatcgtcgtagcaaaattaagccggagagaatctcagtcaaagactccgaaagagataaaagaggtaactttatagtttttgatgaagtcaaatcaatcaaagtcggagctaattttgaaatttctcggagttgcaacttcatgatcatacatatataacatgtaaattcatggattaattctcatgttgatgtatgtaagattcattttctgaaactaagtagtagaaatgtttctcattgtgacaatttgcatagtaattagagagaatctgcagtgtagctgtgtttaggttttgcggtaaagtattaatttttatagtttgttattctgcaggtgagtttttaagtgatgttcagataaactctatgcaaacaaacttggaatggttgaaaaaggaatcttgatgctttgtgtgttttagtagacacaactgtcttcatagagtccttatgaagtgtacaaactcttctagcgagttgtgtgaagagcctccacttttaacagaggctctaagttgctcttttaaactgaaagctctcttcctcatctcctctccttcttcgtcaaccattaacctcttcacagctctctcgaccactcctctgtctagctcaccctccacttgaatcccaattttccatacacactccaagtatctagcgttcaccttttgatcacccgaaaatggcctgcagatcattggaactccttggccgatgctttctagtgtcgagttccatccacaatggctccaaaaccctcctactgcaggatgagaaagtacttccttctgtggagcccatttcacaatgtaacctcggtccaaaaccatcttactaaactcttcaggcatggactctatccactcggaaccaggtattgaccctggtcggatcacccataagaagtgttggttgctagcagccaatcctgacgcgacttccattatctcgttgatttccattaaagctatgcttcccatgcttatgtatatcaccgagtttaccttttgtttgttcaaccattcgatgcagctcttgttctcttcaagcagacttgtaggagctgaggccaccatgtgaagagggcctataggatacactggaatttgtagctgttgttgttgcagaaaagacagagatgagctctctagacagctcgcagtgttgattatcaccgaggaagctgtccgtttgtcaactgtattcctatacacctccattatgctctctaatgatgcaaaccgtgaaactggaaagtctttatatctcaagggataaaactccggaactagctcttcttgttgtcctttagtttctgcaaaaaaggtcaaaaacaatgctgtttcaatcttatagccactcgcggaaaccacgaaacagagagttttagagtacctttcaagggagcttggacattgtttgcatatagtttgtcaaatacagagcggcaagcgaaagccgtggcacttgttgtgctgaaaatgatgtttggaagcttacactctttggctgcagcttcagcaaagtacatgaactcatcgtagatgacacatgagatctcattactttgttgcagcaccaactgacccaaacagtccttgaagctcaccttacactctttgttgagcttaaacagaaactgtattggtccgagattcttgaaatcagactctggtaagctttctggaatggtgacgaactgaaaatcatgagtgaagtcatctgaagggctaaagtaattgaacttagtctgaacaactgtgatcgagaaaccctttaagtgaagggttttggcaagttgcatcattggagatatatgtccttgtgctggaaatggaaccaacactacgcttctccttgcaggcttttcctccattcccaaaacctgcatgaactactaattaaaagtatcctgctcagcttcgtggttcgcggtttcgatcacttcggtaaccgatatataaagtatctgactctcgaacgttttgttggctctcttcgtcacaacatgtgaatcatgtggtggatggtgttacatttctttatcttgttagagagtggtaaccaaagaaaagcaaaaatgctattgtcttcttggttctcttgccgcatttcgcttcatgtcaaaagaggcttcaaacagaaaaaattgtctttttctggtgcagcaatctatattgagaaacgtgccaaaggagataaactcgtgtttgatttgaattgcatcatatttgcattacaaaatagaacacgtacactttactctctaagtttggcatgttccatacaattcaatgataggaatatcaggttctcacacttgtgtacattgattcattcatgttgcgttttgtccctaacagtttagttattgcgtggtgaaatgatggagttggatcttgtcacaatttcaaatgaatgaagaaactgacatttccattataccgattctgaaaatgataaacactaatttgttgtcactacaactttaacgtctctaacgagcatttcatcgaacaccatctactaaaaaaggcgatccttttgatcttgaccgttggtcatgatgaaaaccagacgacacgcacgcgctggttaatatgaaccgggagtctgagaagtggttttagaaaaaccgggacattcggttcaagaaatctcctcgtcttcctcctccaaaacaaaatgtcaaaatccctcctttatcggtttttacactaaccagacccacctgcgacaattttctgtggttttcgaccgtcgcagcaagaacgagccggagtgaatctccgtcaacgactccgccagaagtaaaagaggtaactttgtagtttttgatctttcttggaattggaacttcgtcatcatacatatataacatgtaaattcatgaattagtgcttaagttatatgtttatgtatgtaatatcccaaaggctctgtctttaaccaagagtcattgcatattcaatttgagttccatggttgcaggaactgtgttgtcgtctatcattgtacttagatttgatgttttcatataatgtaacaatgtgaacatgatgatattttgattctgtagtgaagatggaatcatggatttgagatatggataaaccaatttaccgcttagagattctggtcttcttctcattggtaagcacctggagctcctctgcaatttccatttgtttacttttgttcacaacaatgatcttttaactccacaattcagaaaaagagtgcatggcttgtaagcaagatgggaagacttaccgtaggagtgtagtatgagccggtatgtgaattagtacattgtttaatttacattagttagatcttactctaaacattatgtggttgggagaaagtgagcatcaaaaatgaccatttgaaattttctgttacagcaaagatactgtaaagtacagagatttttcgagaggagattcctcactatcttctgcaatggcatggcaaagttctggcaagttgtgattcggggaagatggttgatttggcaacagatttcaaagcatattaaagaagtgagttgatccatttcttttgttcttttatgtttatatatcttattagtttctagagttagacaagacgttatggtcatttttctggtaatgagatttatggtgattcaagttgttgatgttagcgaacacaatgaaatggctttgttcattcatttatccaaatacatcttggcatcacttagatattttaggatatgatactttctctaaaaacaacttggaatagttgaaagaggaatcttgaagttttggtgttttagtaaagacaaaagtcttcatagagtcctcatgtagtgtacaaactcctctagcgagttgtgtgaagaacctccacttataacagaggctctaagttgctctttcaaactgatagctctcttcctcatcccctccccttcttcctccaccattaacctcctcacagctctctcgaccgctcctctgtctagatcaccctcaacttgaatcccaattttccatacacactccaagtatctcgcattcaccatttgatcactggaaaacggcttgcaaatcattggaactccttccccgatgctctctagtgtcgagttccatccgcaatggctccaaaatcctcctactgcaggatgagaaagtacttccttctgtggagcccatttcacaatgtaacctcgacccgaaattatcttactaaactccttaggcaagttctctatccattccgaaccacgtactgaccctggccgaatgacccacaagaactgttgcttgctactatccaatcccaaagcagtttctatcacctcattgatttccatcaaagctaagcttcccaagcttacgaatatcacagagtttttcttttgtttgttcaaccattcaatacagctcttgttctcttcaagaagactcgtagaagctgatgccaccaggtgaagagggcctataggataaactggaatttgtagctgttgctgcagacgagacagagatgagctctctagacagctcgctgtgttgattatcaccgaggaagctgtccgtttgtcaactgtattcctatacagctccatcatgctttctaatgatgcccaatgtgaaaccggaaagtctttgcatctcaggggatgaaactctggcactagctcgttttgttgtcctttgggttctgcaaaaaggtcaagaaccatgctgttacagattatagaaaccagcaagaatagaagacagagaattcaagagtacctttcaagggagtcaggatactgtttgcataaagtttgtcgaatgcagagcggcaaacaaaagccgtggcacttgtggtgctgaaaatgacgtttggaagcttaaactctttggctgcagcttcagcaaagtacatgaactcgtcgtagacaacacaggctatctcattaccttgttgcagcaacaactgacccaaacagtctttgaagctcacctgacactctttgttgagcttatgcagaaactctattggcccgagatcctcaaaatcagactctggtaagctttctggaatggtgacaaactgaaaatcagtgaagtcatctgaagggctaaagtaattgaactttgtctgagcgattgtgattgagaaacccttcaagtgaagtgtttttgcaagttgcattattggagagatatgtccttgagctggaactgcaaccaacactactcttctgcccgccggcttttcctccatttcgaaaatttacaagaactgctctgcctcgtgctttccgaatttggtcctccaatttcttttcttccctgtgaccgatctatgagaatattaaaatgagtatgtttctgagataaatatcagattctcagacttgtggacattgtttcatctgtatttcgtttttcttggctctctttacttattgacattggtatatctctctatcttgataaccaaaaaaaaaaaagcaaagatggttttgtcttcttggttcttttgccgactttggcttcatatcaaaagatggtccataccaaaaaaattgtctttttctgctgcatcaattctatcctgagtaaaatgccaaaagagataatcgtatttgattttgattttcataaaccaaacacctactctgtaaatcaggtcagtataattatacatagcacaatttattagtctgttagtgagtttctaagggatgttcaaatagcaatcagtagatgcaaacctctatcttctttatattcaaagatttagtataactcatttttaagaagcaataatctttccaacaaatgcttaggaagagcatttgagaagtaagaatgaataccatctgctgtattgctgtgttattattctctgctatatgtttgtcaacatttgagacttaattctgtatttataccgtatttttatgttcaaatagcaatagcacatgcaacctttggatatatcttctttatactcatagattcctttgctatttagatcgtgctctcataaagcgcgagaaatttgtgtttgtgaatccttttgctaaaactgtatttcggtgttgacaggggatttcttcaaacatattcaagaactgggaagcttgtgcctctacactatgaaagcctctacactatgaaaggcaaagagtctttgggaggagttagtggtaagcctcgaaattctaatctttttaaaattttcctttggcatgatgctccaaacgggtctataaattataaaatcgaacattgtaaactttgtagggtcaataaaaatcaatgttcttttatgatacatgaagttcattatgttcttttaagaactgctacatgaggttaacgatctcctccaatgcgttgtatgaggagcctccatttcttacagaggctttgagattctcttttaaaacaagggctctctctctcatgtctgcaccttcttcatccactatcaacctcttcacagctctctcgacccctcccctctctaccttaccttgcacctgaaaccctattctccaaatactctctaaacacagtgcgtttaacttttgctcgccatgaaagggcctgcatatcattggaactccttccacaatgctttcaagcgttgagttccatccacagtggctccagaatcctcccactgcaggatgtccaagtacttctatctgtggtgcccatttcacaatataccctctttcggagaccatcttaatgacttcctctggcagtgactctatccattcggagcctgcgatagagccaggccgaatgacccataagaaaggctggttgctattaaataaaccccgagccatctctaacacttctttggtttccatttgaactacgctccccaagcttatgtaaacgactgacctcggtttttgcttgttcaaccattcaacgcagctcctgtcctcttccagtaaactagaagctgctgaaactgtaatgtgaagagggcctaatgcgtacaccggaatcccgagttcatgttgcagacgtttcagagacgagctctctagacatctcactgtgttgatgataacagcggaagctgttcttttgttgactatttccctacagagctcaaataatcgatctagtggcccaactcctgaagttggtaggtctttgtatcttaatggatgcaaattttccaccaacgtttcctgcacttcaggatctaaaaagccaaaacaaaatgacgtattagtgaaacgaatggtttcaagataggttattaagctggttttaggcaccttccatgtccaccaagaacttctcggcactgagttttcttaaaacgcaacgggaaacttgattagtagcactttgtgtgctgaatattacactaggaaggttgaactccttagctgcagctccacagaagtacatatactcgtcgtagatgatacatgctatatcattgccttgttgcagcaacgactgccttatacagtccttgaagcttgcctcactggttttgttgatctcgaataaaaactcgaccggtccgagtctctcgagcacagactctggcaagctctctgtatctggtatggttacaaattgaaaaccaggaaagttttgagatgagcttactttattgaactgtccttcaacaacagtaatagagaagcccttcatgtttagggctgtgccaagctgcatcattggagttacatgtctttgtgctggaaccggaactaacactatccttttcttctcttccattttctccattgcttaagctctatctctctatatatatattactctctcgactctcgtgttccttgtgtgacaactagtctttctgaatgaagtaataaagtggaaacactccaagaaaagtgtgtttctcttttgtctcatataagagttggtggttttaaccacgttgggtaggttttgtcttgaggctttttacttgtagtctccatatataataaattttcttcaaaagtttgggttgcatgttgaataatatttttggttgccactttgaccaaaaaacttaccaaaaatgtcacttgaccaaaagttttggttgccactttgaccaataaacttaccaataatgccataaatttttatttttttccaaactgtcataattttgaattaatgtggtttgaactgacaaaaatgctcctatactaaacaagtgggaaaatgatagacaaagttatctaaaaattgtagtctactaaacaattttgtagtctactaaagattttgaatcgacatttaaaaaaaaaaattgatactccctctgtttctatataaatgtagtttaagggtttttatttatttaataccatttaactaattatatttaattatatatttttttattggttgaattggttataataaatgatgtttttatataaaagaggtagattaaatgagatttttatgatttcttaatatgtgtgtaaaaatcttaaattacaactaatatgaaacagaggaagtattcaatttcgtgtccttcttcaaaacaacaaattcaaagacatatatccatacaaaattcatctctagtttgaatcacacaaattagaatattgtgaatttaatgtggaaagactgttttctagttttcataaaacacaaaaattgttcaagttttaaattttgataattatgaactttaacggaagacaaaaattaatattccaaagaatgtaaacatttctattggagttttcttataatcgaagttcttttgtaatatatgaagttaagcatcttcactctgtattcaagaacttgacaagctcatccagtgcgttgtatgaggagcctccacttcttaccgaggcattgagcttctcttttaaatcaagagccctctccctcatggctgcaccttcttcatctatgatcaacctcttcacagctctctctacaccttccctttccacttcaccttcaagttgaatccctattttccaaacactttctatatacatcgcatttaacttttgttcgccttgtaaaggcctgcaaatcattgggactccttccacaatactctcgagtgttgagttccatccacagtggctccagaatcctcccactgcaggatgtccaagtacttctatctgcggtgcccatttcgctatgtatcctctttctgttaccatcttaatgacttcctctggtaataactctatccactcgaagcctgcaacagagccaggtcggatgacccataagaaaggttggttgctattcaacaatccccaggccatctctaacatctccttggtctccatgtgagctttggttcccaagcttatgtatatgactgaccttggtttctgcttgttcagccattcaatgcagctcatgtcctcttgcagtaaactaggtcccggcgatgaagctgtaatgtgaagagggcctaatggatacactggaattccaagttcttgttgcagccatgacagagacaagctctctagacagctcgccgtgttgatgataacagcggaagctgttcttttgttaactacttccctacacatctccaaaagtggctctaatggtccaaatcctgaagttggtaggtctttgtaccttaaaggatgcaaaccttccaacaccttatcttgcttttcaggatctgcaaagtaagaaaacaaaaattatgtaatgagtgaaccgactgctttcgaaatgggtcattaagctattttgggaacctttcatgtcgatcaagaacttctcggcactgagttcacttaaaacacagtagcaaacttgaattgtagcactgctagtgctgaagataacactaggaatcttaaactccttagctgctgcttcacagaagtacataagcttgtcatagatgatacatgctatatcattgccttgttgcatcgataactgacttatacactccttgaagcttgcctcgcttgttttgttgagattcataagatactcagctggtcctagtttcttagattcagactgaggtaagctttctggtatggtgacaaagtcaaaaccaggaaagtgttgcaatgatgagcctatttgattgaactgtctctgagcaacagtaattaagaagccctttgattgaagggctttcccaagctgcatcattggggttacatgtccttgtgcagcaaccggaactaacacaatccttctcttctctacccttttctccatttctctcctcttttctcttctcttgtctctgaatcctatacgtgatccaagtaataactaaaatcccacaatcttccaaatgagaccattttctatagtcaactgttcatttttcaaagcaagaataatcgcacgccaatgactattcaacataatcttctaaaagagattttaaatgccaacaagtcaactactttagctgttaagataaaggttgacacatcaattacgtggtaatgaagataaagtcacaagctacatcaacaactctcaaaccattacgtattttctctttgtatgagaattaaagtgaaagctttttatttgcatagcaaagcatctacttttgtaatttttgcaagaacaagcttgatctataaaaatcaaagctggtctattacttatgtttttatatgttacatgaagttcatttgatttattctgtctttagcaaagtttagcaccgtgttttcactcagactccacttcttacggaggctttcaatttctctttgacaaaatttacctatcactcataagtcatacctgcatcttcatcatccatgattattggttagtataacatcattgctgaacaactctaaataagtgatctaaattattattaaaaatctgttgactaaaaagtatttttttggttaaaatcccatttatatttactgagagtatgacattaattccaagaaaaacttgttttattttgttttgtctcatatagatagatataggagttggtggttttgagcaccattgggtaggttttgtcttgagatttagataataataacaaaaatgctaagaggttttactttctagtctccaaatataataaaattttctcaaaagtggctaaatgcatggttctccaatcttggtttcaattattgcatcaaagggttgctataccattttaagtattcttcatatatcttttgaaagcaataactttcaacgaaggaagaagctaacattttcgaaagagtaaacgcatattttggtcaatatagaatttttgtgatgatctatacataattgggaatgttaaatacgaattagaacaatgacgttccttgaatttgaaaagcttggatctttcctctggttccaataacttttttatttgcgcatagaaaatcatctactttgaaaaatatgcatcattaactctttaaaaaaaccatttaacaaaaaaatcattgcattctaattcttcactctgtcttcaagtgcttgacaagctcatctaatgcattgcatgaggagcctccacctctaatagaggctttgagcttctcttttaaaacaagggttctctccctcatgcttgcaccttctttatccacaatcaacctcttcacagctctctcgacggctcctctttccagttcacctcctacctgaatccctattctccatacactctctagatatattgcatttaacatctgctcgccttgataaggcctgcaaatcattggaactccttccacaatgctctcgagtgttgagttccatccacagtggctccaaaagcctcccactgagggatgtcctagtacttctatttgtggtgcccatttcacaatgtatcctttctctaaaaccatcttactgacttcctctggcaatgactctatcccctcggagcctgagacagatccaggtcggatgacccataagaaaggttggttgctattcaacattccccaagccatctctaacatctccttggtttccatgagaaccatgcttcctaaacttatgtatatgacagaccttggtttctgcttgttcagccattcaacgcagctcctatcctcttgcagcacagtaaatcctgtcgatgaatctgtaatgtgaagagggcctaatggatacaccggaatttggagttcttgttgcagccttgtgagagacgagctctctagacaggtcacggtgttgatgataacagcagaggctgttcttttgttgactacatctctacagagctccaaaaaaggttctagttctccaaatgttgcagttggtaagtctttgtatcttaatggatgcatattttccactaccttgttttgcacgtcatgctctgcaaagtcaaaacaaaattatgttgaacataaggagagtaagcataatgggtaataagctagtttttgtataccttccatgtcgatcaagtacttcttggcattaagtttgcttaaaacattgcagcaaactttatgtgtagcagtttgagtactgaagatgaaattgggaagcttcaactcctcagctacggctccacaaaaatacatgaactcgtcgtagatgatacatgcaatatcattgccttgttgtttcaacaactgccttatacagtccttgaagcttgcctccataattttgttgagctgtgttagagacccgactggtccatttgcctcgagttcagaatctggtatggtgataaattgaaaaccagggaacttctgcgaagagtttactcgatt

SEQ ID NO: 83 - DNA, 140680 bp, Arabidopsis thaliana
gaattccatgggtcctggttactaaaaagtgattttgatgattctttgtggtctgcaccaccaacactagatgacaaggatgatggtaaattagcagcatcaggatttgatgataaggatgatggtaagtttgcagcatcaaatgtagattcaacaacgtcataagcgggattgctggactgcgcttccgctgaatcgaactgctgacctccaaccaatgattgtagatacaaaccaggattgcctaataagggagactgtgttggcacacatgattccttaggctgagattcatggcctggaagaactactcttgttagcctcttagctgaatcagtgtgatctatgtttggacttactggagactgaccagaggtgtcatgtaagaacatattcttccttgccatttgttgagaactggtacccataatatcttctttcccaattttgtcaactggtgagatgaaattctgacaattgctatatatttcaggagcatgtatgttaacattatccaccaatccacttagttctcggcattgtgcatatgctactgaagggtctacgggatgttgctgctgcctagttacttgaacttttatcggaacatctcttactatctcattgacaaaaggttcagtagtctcgacctgagcagtggcaagattggcgttatgtaaagtatctctttcttgatgatttgaatgattgaggaagctttgttgacccgtaaacttatccgtttgttggattctcatgatatcatctggacgagaagcatagaaagctgagctcacatatggcacatacattgtagaaccatcatttccctcccgcataatcggatcagaatgcatatgaggaaaagatgtctggcacatatgacaatcatttaccctttgaaaactttcagccatagttacttgttgatagaaacttccatcggggagaacaacatggttagatggtggaacttgagacccgccataaccatcaaatggtataccaggagaaatcgtaccttgatatgcagtgtttcttggctctgtaggaagcggtactaacttttgagcagcatgatagttccccaacagattttcttgggtttgcattaccgggttaatcaaaactggtgtggaactaatctgagaattcaagggagccattgacatgtgagcagcaggaaggaactggtgggatgagacacttaaaggactatcttgaaaaggttgttgggagaacaaagaagtactacttggcaaaagctggataggtgaatgaacaatatctggttgtcttaaagcttcttggcgagattcaacataggccggtggatgatgttcagatggtgtagtatacccctgttgttgctgctgcatcttaccaactattggtttctctgaaacagtctcaagctgaaaagaatgaggcggatcggcgtggacagtcattggcacaacataagcagaagagcgtggatcaggaggaacaagtcttgatacattactatgataagtctgaggtgaaaaattactcgaggtccaagtagttgcgacaaaatcactctgaccaacgcccaagctatcaacaacatccacgccactaaaatcagaattcggattagaactaccactagctacactttccttactcacaacaacaccattcacagcctctacatatctctgcccaatatcaactccatcaccatactccaatattccgaaagaatcatccacctcagacgaagaagcatcaaacaaaaaaactctcaacttccctgacccatcagaagatctctctaccaacttctcaaactcctccatcatattatcaatatcttcactagatgaaacagaaaccaaagcatcaagatcctcatcaggaagctgatacttaacaacaacagggtgaccataaacctgaatcatcttttgctcaaattcatcaaatctcacattctttttaacactaacgatccttgtttgaccaccaacgtaacgtaacatgccatcacttggtctagggattatctttccattgtagctacataaaaacttcaccttttccaattcttcatcatccatatcacttcttttattgcctaaatttggattgtttctattcgtagcatcaatacttacctgctcactcccaaacccagaaataattccatcagagacacgcttattactcaaatcagagctataatctaacccagaagctgaaagattggccggattagaaacaagattcgaacttgggctactgggttcatgtgccattgtttggagcagggagagggatagggtttatgattactcacctggtcagtatcgtggtcgtcgtattcgaggaagaaacgaagaatcctattttgtagagagaagaagaaaggagaggcaaagcgagtcgttggaactgatacaacgacgacgtttcattgggagtatcaaaacctcaatttggattttctctgtagtctttttagaatttttctaaaagggaaacacgtgagagatgggaagaggcacgtggtcgagcctcatgcaaaagaatggttgcgtttgttttccaaactgcgagagaatcgtgtgtgtaaatgctcccagttccaacactcgacatgttttttttgttttaggttattactgattattcttgaacttttagcaaaataatgaaacaattttgacttttataacacacaaaaaaagcaatacaatttcaaataataaatcgattaagagataaaaattgtgataatttggatattttaattagtttgtgcaatattcttttctcgttgatctctataaattagagaggcaaatgcgactgctaggagtagaaccttaccattggactacaaacgcttttgtgtttaagttgactattaaatttagatatctgattgtttaggatagtttaaaacgctaccgttttggaatctttatacgctaccgtgttattcttctttgaccaaaattctggagaatttgtcttcccttcgtatttctggcaacttttttaatactaaaattctctctaaagccgtcaaagaccaaaaaaaaaaaaaaaatacgaactcgaaatctctctcgtcttgttgttgcttaccattgaagctatcaatttctccgtttgatttctctcttctcaaaacctatttcgacggattattccgattcctgtttccccgaccttcacgcttcgtacttttgttttttgaaaaattcgtgtttcaggtacgttctcgatttctatttcgtttttttctgattcatcaatgaaacaaaatcgtttcttaatatacttgttgttctttgattcgattgatttttgttaggaagagcgcatgtgtagagttggtggtgtaattcagaaaactttccggagattttttggtgatgtgttgttcgtaggtaaattttgaaattttggatttaatggttgaggaagatagatggtgtttcttcaatggatctgtgaagacgagattgttggagattgatacttatcttattcgtctttatggctttgcttgattaagaaattgtgtgattgttttggggaggggtttaaacatggatggagaggttacttcttggattaggagagcaaatttctctcatactgtttgttatcgtatgattacgccgagtttagaatctatgccttttactgtaaaccaagagaagagttctggattgaaaagaatgactttgagttcaccatctgatttgaaatcacttgtaggaatttgtcagagtacgcagcagctgactggtttgagttgtggtagtgttgttggtactgaagtgcagaggaatccagttactaataagaagagatctgtttctccgttgcctcatatggctctttctgatgcttttatcgaagcaaagtctgatattaagaggttttctactccacatcctagaagagtggaaccagagaagggaatgaaggccaagtcgtcgtcccgcaaagattcttctgagaaaaaatcagttaatctacggtccctgtctcactcgggtcctattagggatcttagtacgcagaaagttaaagagaggggaaagagcaagatagataagaagtcttcaaagtctgttgactatagaggttctaaagtaagttctgcaggagtgcttgaagaatgcctcattgatgtgtctaagttgtcttatggggataggtttgctcacgggaaatatagccagatttatcatggtgaatatgaaggcaaagctgttgctctgaagattatcacagcgcctgaggatagtgacgacatattcttgggagctcgtttagaaaaagagtttatcgtggaagccactcttttatctcgactaagccatccaaatgtcgttaaggtgagtttatatcatgttatattatgttggttaggttgtatcaaatatgaatgatgcctttgaaaattaacattacatctttcaactctgtttgaaaattatgattatggtttgtttgacttttttcctctgattgatgtgtcctgaaacagtttgttggagtgaatactggaaactgtatcatcacagagtatgtacctcgagggtctttaagatcatatctgcacaagctcgagcagaaatcccttcctttggaacagctaatcgattttggtctggatattgctaaaggaatggaatatattcactcaagagagatagttcatcaggatctgaagccagaaaacgtgttgatcgacaatgactttcacttgaagattgctgactttggcatagcgtgcgaggaggagtactgtgatgttttgggggataacataggaacttataggtggatggcacctgaagttttaaaacggataccacatggacggaagtgcgatgtttatagttttggacttcttttatgggaaatggtagctggagcacttccatatgaggagatgaaatttgctgaacaaattgcctacgcagttatatacaaggtaaatcattctgcatctcctccttatttcatgattgtgatctagttatatacaaggtaaatcattctgcatctcctccttatttcatgattgtgatcttgcatagatctgactgagttagatcattattgttcagttgttattaaacatttcattgtttcgatattggccagaaaattaggccagttataccgacggattgtccagcggccatgaaagagctgatcgagcgatgttggtcatcgcaaacagacaagagaccggaattctggcagattgtcaaagtgttggaacatttcaagaagtctctaacaagcgaaggaaaacttaatcttttacctagccagatctgtccagaactaaagaaatgtcctaaattctggattcatatattcggatcattccaccaccacagcagcggtggcggcagcagcagcaacaactcagccttacctaagcctaaattcgcttgagacgtctagagtcactcatttttgtgcatagagaaaaagagccagtggtttatgttttagttataatcaactgtctctatttgctttgatttatttgctctctccattaaagagacctcttctttctgttttggcttggtttttgtgtaagtcatctcttctttcttttcttgtaattgattcattttgtagcccaacaaagaaaaaaaacagtgagagtttgtttgaatagtctaaagatgaagcaaagagatagtacaataataatgcccacaaactgttcgacgaaattaaaaaccaaaacacattcataaacgaagaagatgattatcacttagacaccagtagaaccaaaaccaccatcaccacgaacagtctcatccaaatcatcaacctcaacaacatcaggagtcacaatcttctcgataatcaactgcgcgattcgatcaccgaacttaacctcaaaatcagcatcagaatgattaaacaaaatcacaccaacaggtcctctataatcagcatcaatcacaccagcaccaacatcaatcgaatgtttccaagccaaaccagatctcggcgcaattctcgcgtaagttccttcgggaacagcgatacttagatccgttgggataagcgctttacctctcgctggaacttttgaatccaccgcacttgagagatcgtatccagcggagagtggtgagccgcgtgttggtataacagctttctcggagagtttcttcactttgaagaatggtgatggtgatgaatcgccatggattccgtttcggtcgagcttttggagtttaggtgatggttcgtttacgcaagccattgttgaaattgggaatcgaagttttgttaagagtctgtttgtggagttgcagagaaaccctaatttcaattgaggtcgaattgttgttgttgtgatgacgaagaagcgtcgtagttccgccattaaatggagtgtgtgtgagtgagtggcgccaatatttccctccaccctaaaaaaaacttctaaaattctaagttgggctttttaactatttcatgtagttctcggcccattagacccaaaattttattatagaagaataaatatggacatttaaattcttcactgatacaatttggcattttttgattctttgggatttgtattgtcttgttttctctgctaatttatgattctaaattctaaaaaatattcatccattctaaaactcgcaaattctgagcatatttaaatgggcttagccaattcatttaatcggcccattagcccaattcaagttcttcctcaatagcagaagaaaatggaatctttattgatcttagggtttatatgaatttatgattcttcctcttaaaccctaatttcgtattcttactccttcctcgccaatcttcatcttcctcatgttttctctaattctccatggaagaaagtctgtggaattacagaaatggcgtaatttaagagttacagtgagcattgtgcaaaatgcatttccttttaccaccaaatcgttctcttctacaatagctaaagattcgagtccaaagggaagtactttcacagtctcttatctcgttgaatcattgggtttgactaaaaaacttgcagaaacaatctcaaagaaagtcaccttcgaagacaaggtaaatccagattctgttctgaatcttcttagaagtaatgggtttaaagattctcagatatctaggatcataagggcttacccacgattgcttgtaacagatgctgagaaatctcttcgtccaaagcttcagtttttaaagtctagaggagcttcaagctctgaggtcatagagattgtttcgaatgttccaacaatcttggataagaaaggtgaagaatctgttagtttatactatgatttcgttaaggacattatgcaagatggtaaaagtttgtgtatttcttgtccagagggaaagaaaggtaacagaattcgaaatatatcggttttgagagaattgggagtacctcagaagttgttgttttcattgcttatatctagatatcaacctgtttgtggtaaagagaagtttgaagaaagtttaaagaaagttgttgatatgggttttgatccggctaaatccaagtttgtggaagctttgcatgtagtttacgaaatgagcgagaaaacgatagaagagaaagtgaatgtgtataagaggttaggctttagtgaagccgagatatgggcgattttcaagaagtggccttactttttaaaattctctgagaagaagataattctgatgtttgaaacactgaagaagtgtggtttggtagaggaagagattatttcggtgttgaagagtcgtccacaatgcatacgatcttctgagcagaagatattagactctattgaaatgttcttaggcttaggattcagtagagatgatttcaagatgatggttaagcgatatccttgttgcactgcatattctggcgagacgctgaggaagaagtttgaggttttggtgaagatgatgaattggccgctagaggctgtggtcatgatccctacggtacttggatacagcttggagaagaggatagtgccaaggtctaacgtgatcaaagctctcatgtcgaaaggattgatcggaagtgaaaaccctccgatttcatctgtcttggtatgtactgatcaggagttcttgaaaaggtatgtgatgaagcatgacaagctagtgcctaagttgatggctatcttcaacagaggtcgtgtttcatagttaatcttttaacgcgtgaatagaactgaggaagaggagtttttatttactagtgtctgttaatgtctaaactgaaatccatttctgtaatagtcgtaacgaaaaatttaactactatatttgtggacatgtttagtgatttgaatttcaagttaagtgagaagcgtctctggtcaaatgtatgaattgtgatcaaatcttacactccggtcacatacagactagccgcaaagacgatgtcacgttttatggcatttgaagctgcatccattttcttgtgtaacgccgagttccccataatggcagctgcgttcttgaattcacggcatgtctcatccaatctcacaatggttcgaactatcagaccttccgggacatctgtcagttcacatatctctgcaaatggagtcccctgcaaaaatcaagcatatatgatcaaaaagatgtctgaatcgtgaagtgttaagaaagattgctctctggttacaacaaacctttgcccactcatagacgacttcgaccagaccaaatttgagattctcctgagcatattcttcagggtctatttgtaaattgtactgagcttgaagttcaccaagtctgattgctgtatcatagagtctatgcaaaagaggatcaattattagattgatcaggtcagatcaattactgttagtaattatgagaagggacagagagtgatcgaaacaaacctttgtttagccttagccagcttaggagttagtgtaggcgctgaagtgtttttctgttggaagacaaaggcagacattatagccactgcttcttctggttctaattcttcgaattgattctcgaacagacacactgtgcaaatcaattcttccccagaattcatctcgcaagcgacacgacctttgatttggacgacgaggtcatcatctatacacccaatgttcttcagaacatcgatctgcaaaaaagagattagagctctacatgttactctaaattatcattcataaagagtaaacaaagatgcatgtggactttctcatttgaacgtacccggccctgaaaggcaggcatttgtaatagggcttcatcagacatttgaaattcaagatctttgagatccgtcttatgcttcttaatctccctagctaacttcatgtgctcttccaatttgacacaaccgtggcacttattcatggacatcttttgcaataggttggtccatttatagtatgtctccacaagctcagcatctttcagcttcaaatctgaaatagaaccatgaaatgaatatcagagggaaatgaacttaaagccggaaaaactaatacagagctataatttagttaattaaccttttactgggtctagagcaggaggaaatttgtttccgtctgatttcagatccagaagctgttgaaccgtctgagaaaaagctgccttgttcccatcctcgagtaggcgcacctgatcaatctttatcttgctatcgcatatgcacaaaaattctttgttatcaaaccctttaacctcgtaacctacaccagcagcaaccccatggtacgggagctctatctttattacaacgggacctttacgagagctcggctttgtataaaattcttcttcaaaaccacgttttgatttaggcgcaataaaataaccttgagaaggatctgaacttttcttgccaatgctgaccatatttttctccggtggcggtatttcagattttatcaccaaaacaacatattgtctgttagtgttggaaggtcccttcagaacgattccgagtaaattgtctatgccctgtaaaaattacacgcatgagcaaccaatttatgaaccagataaaagagtggtagagacagggtctcaccattccagatttcatgaccactactcttccttgtacaagaaaactctgggcataaggagactgcatgaccgcttccgacatcttgttgttatattcatttgcttccatgtacatgtcatagtaatcttcaattgccggttcacctttaatacatctggatgaataaatcaatagatcaattctacagagaagttgaatacagaggtgacacaaacgagacaatagaataggagttctttataattctactgagactacaaaaagcttggcgatccatcagaggataaaaattcagtagattttcagtctttcaagtatccgtaagatgaggctttgtccttactcaatatgtttagttggtagagaacgttttatcatgagaagctgttgtttctcgggtagtttcttctgggcatgaaattcagcaaaacttcttttcagcatgtcctccacctaacaataacaaccatttgaaaactggcgagtcagaaaaagccaagagaaaggcttggtagcaaaacgcataacagatcaacggtccggacattgagatacctttaattcttcaacacgtaaaagatggaggatcattatgtaggttagtcgaaactgagattctagtcttgttgcgcttccaacaattacacgcctcagatcactctcatctggaacttcatcgcgacacatgacaacaactgtgcccgttttgtcaagtcctcttctgccagcacgtcctgccatttgagtgtactctccaggaagcaattgtctaaattccttgccatcaaacttcctcaaagcatcaaaaacgacctgtagcgaatatcgtcgagaagttatttatatgaataatatgcttttcagaatacccacacttgttcccccacatgatatgaagatacttatgtgtaaagaataacccacttaacattgtagcaccagattaacattaataataaaaatcaaaatagcctcaccgttctagctggagcattaacccccatggcaaatgtctccgttgaaaatagcacctgcaggaagattaacaaaaatagatcacctgaagcatttcagattacgaaaacatggcaattagatttcctaaaagcagcaaccataagcatagataactattaactccagcattgtattaatggggtaggctcatataataacacaagtccctgagtttctaagcctaccttaataacaccacggcaaaaaagcatttcaacaacttcctttacaattggaagcagcccagcatgatgaacaccaattcctctatgaagtaagctttggagtctgagaacctataaaatgtgttaccccaacagttaatgagtaggaaatcaaggtacttctctatatttaatatgtgagaagacaggaaagtcttaagataaccaacctgaggtaaattccgatcagaccctttcaatcttgaaaacgctttatcgcaaaagacacggatttcacttttctcagagctactggtgaggtcggtcccagtcaaggcgtcggcacacctatcacaataattcttcgagaaacagaagacaaccacctaacgggaaaggaaatattaaaagttagacataacggaccagaacggacaagactaaaattgaaaatataagaaacagaacagaagctacatctaacatacaggtaatagggacatttttgaaagcttgttgataagcagtaaccaatttgaagctgctgatcgtctaaatgccccattgttctgactgttaccactgtaagaggattttcccacatcttttacacttgagtgtttattctgcttgccacgagaatgagcttcatgtttctgagatttgctcccatcttgatgagctgaagatcccatttgttgtttaggtgcaacactaactgcatttgaattcttcttcttttgtgaatctttagcatcctttatcccttttgaaagaaaaacttcgttctcacaaactttgtagagttctccagagtaaaaaagacaatgctctaggggaactggtctttttgtcgtgctgataacaaaacccataaaattatgaaattagtaacttccatatcaatcactgaattatattaacaattatttaatcaaaatacattaaatctcacccagtaacacgtatctccttttgttttgttcggccaatccaatcagcaaattcaaatgtgtttggcaccttaagaaattataaatgttataagttcagaggcacatgggtataaaatagaatggagaataatgactgaaccatgaagctatgcctatatatatcttcatagatgctagaaactgaacggttagttcatttggatcgtgactaacaaagacccaaagcaaaaaaatcacctattcttttcaaactcatcttatgagaaaattcatagccaaagattagttccatggcaagcaaaacaacacctcaaaagaactaagattttctacatgcatgcacataatagcattaagaagtaccgttgcagaaaggaggacaaaatttatatgccttggcaacatgatgatgacttcttcccaaacaacccctctctctacgtcattgacatagtgaacttcatcaaatataacctgccagtcataggaacggtaacaaggaaacgtgattgaagtttcacacagaactacaaaggctgcttagaaatggagcgatttgagaacaatatcaaactttgaagaagtaaaacatcagaaagctcttttacccattctatatcacgtatgatatcagcaccacgataaagcattgaccttaatatttcagttgtcatgatcagacaagatgcctctggccttatgctaacatcacctgtgagaagtcctacatcaaacttcccacaaaaatctctgtatttttggttgctgatggttttaattggagcagtataaaccgctcgtgtacagtgctgaaaaaatgggaaaaattgatcagcaaacaggacaaagaatctaaaaatacgaatgtgatggatgttcatcagaattctctaccttggtggccaaagcgaatgcatattctgcaacaactgtcttccccgccgatgtatgtgctgctacaaaaacagactctcccttttctaaacaacagatagcctgtaggcataagacatttatttatttactaataactcacacataaaagacaaccaggcacgttcctcaaatgtccgcaaatttaaaaagttgagggaaatacctccttctgaaagttgtccaattcgaaagggaattcaatcgccatgtcaggaacaagctcataaaaccggtctgcaatgtcttggctatctcctttagtggcccatccctaaaaagaacacaccccaaatcacgtttatgagagggaaattcaaatctcaaaatgtagaatccacgttcttacctctttccgtagttgtttatcgctgctcccagtaactgcctcttcagacattattgctgtttttgctgatgacaaaatctcatccagcacagtgacgtcagtctctagtcctttgctgacttcattgcttatgctcgctttagcatcgggttcagcttccgcctttggagactcagatccagctgtatgatcttcataacagttttgattatcagaaaaaaaaaaaaaaaaaaaaaaaaaaaaaaaatcaaatgtatgtgacgattatagaaattgaacacaccatctccctcaagttcagagaaagtatcttcttcccatgccttcttgaacagatcgtcaaactgaatagacaacttgctctggacgtattcacaatgcgaggccagtaaaaaagagtttattaccacaattaaatgtaaaataatttatgtacaccagtgacattgatctacagaccgaattttcatctgaagcattgccatgtgaactatgatcctcataaacgctccatgtttggggatatggctagagagtataaaagaaaagaggaagaaacaatcaacactgaatcgtaaataaatttatgaaattacagaattagatagtgatatcataggatagcataccatcagatctccaagatctaaactctgcttaaaactaggaggaacagtttgagcaggacccccattgagcaattcctgtacccattggccactagagacaccctctggaaggactctctctgaagactgtgaatcctccaagccacctggacggaaagggcgattgttgacacttcctctcagaaaatccttcggaggtcctaccattcgtggaaaaaatccagaatcttgatccccatacatttgttctgacaaatccacctaacataatatgacaatccatttctccaactagagtcagaaacagaaagctaatagcaggtcatttttctaccaaacatgttccagattctaggagaatatcactgtctaaatgaactagtttatttaagataattcacgatttgaaaagaaagaaatgagttacctccactgattttggctcccatgctccgttctcagtatcctctttttgacgcctgaatggcaactcccaagtcggaaccacaacggaccttggcaaagagggttgaaggggcatcttcaccctggaaaaccaatcaaaatcccactgattctcagctttttcagcagaaaactgatccggttccagtctcgggatgagatacttctcctcaatatgtttctttattgattcttttgtttccttggcaaatgcaggaggctgagaaacacgcatatacgcaaccataaataagcatttgcaaaaccataaaactttattaataaccaaaacacatcagtgcacaaatctgaacatgtaagagcatccaccactggatacatttatatgtaaaagtaatctggagtgtctcatgtcactgataactaccattgaacaagattttctactgatataaacctctcaccacatgaaatttcagaaaacgagcaacctttgattcctttcttcaccacataatacctgataacaactctaaaagtaactcctccctaatcaagtaaccagatagtccaatattaaccccatacgttcctaattccattacgattgttgagggaaataccaagtatactaaaatcacactaagacctagtaactacaatacagaaacgcacagctattaacatttcaaacgcaacaaattgcatcataaatcagtgcctaagcgaacacagttttgaagacgtaatcaagttcttgctgctaaatcagaaaactcacggatacaaaatcgggaagtgagttcagtgcgtcgtctctctcggccgtgtaaaaaggctcgacgcggaggtgaccaccatgaccggagaatccgacccggaagccgagctcattgcctgcttcgactttgttcatagtgccttttctctataccgttatcttcttcgcattcccttttctcgccgtctcttgttccgaactattctgactttatcagcgatcggtctgtgaaaggaaggaacacaacaattagatttccctccggttgagttcagcggattcgcaacgccttgtcgttttaaaactacaaatcagcaatgtgttctgtcttattatactttatgggctcaaatttaggcccacttgccaacaaataattattttaattaatattatcttttctatataaaaataataattaaatgatagggattcatatctcttcgaataaaatatttaagttatagaatttcactttgtttgagtcggctttataaaatttgattctactttcttcagtttggataattaagcatcaatcattttttagataaattattatacttggcttttagtttaaacttttaaaaattttggtatggcttttagagtcacctctacataaacttcataatcccttaattaagaaatattttgtagcttagtagtgttgtactagcgtcatctaggtctggggtttcctgtacccgttcgggtttggatcaggtatttcgaatttttaggttttcggatttagaaatatacaattcgttcgggtattgtaagatttcggatttggattcggaatacccgaatttccaaaaatcaaatttttttataaccaaatctatccaaactactcgaaaatacacaaaatatctaaatattttgaaaatgttttactcaaatttactcaaaagtagattaaatacgtaaaaataatttaaatatccaaaaaattgcatattttgacaattatattattacaaatgtaaatattaataatatattattattatatagttaaattatggatatgtttggatacccggtcgaacctgttcgggtattttgagatttcggattcggattgggtgctcggattcggatattatgcccagccctaatcgttagtgtcattaagacttccataatgcataatgcatttagttcacaaagagagaaaaagaaagttctgtaatcccaagtaaaagcaaactagattttaacccgcggtataccgcgggatgatttattttttaaaagtaatatatattaaaacttgcaaattttatttttataaaatatttctatttttacagtttataattattattaagtatttatatatattaattgttattaaaaataataaattaaagatttaacccgtattgaaacggtggattaattatattttactttttattaatgttgattcaaaaacccgtccttccaaatccgtcttgccaaaaagccatttattttattaatattaattttatttatgatatgactttgaattataatctaaacattttagctaataacataggagtgcaccatatttatttaataggggaatgtaccatatgacccgaatgcacttttacccaaatccaccaaaaaagtcttgcaaaactactttagacccgaatgtaccatattttttttgtgcgaatttttatgtgattaagatttaattgattttgtatataaaatattaaattgttttacgaacttatttgtttataatttggtaacagatagatatttgaatattcagtatattttgcttcagtttaggaaatctttgatgacccgtctttaaatccaataagccctataattaaaagatgaatattgtcgttaaatgattttggtaatcttaatgatgtcattaaaagattttgtttttgattaaatttttctaatggcattatcatgtaattaattacaaaaattaaggttacatttaaaatgtacttcccaaataatatagtaggacgatatgcacttttatacaaatccaccaaaaaagtcttgcaaatatattatagagataagaaacgatagtcggttttgataggtataagattagcaaatatattagttcgcttaaattagttaaagaatacaaattgaaaaggtatattacactttattcgaatatagtatcaaaagttatatagagatttgataattttttaattgttgaatactttttttttgtgctaattttatgtgattaagatttagttgatttcgtatataaaatattaaattgttttacgaacttatttgtttataattaggtaacagatagatatttgaatattcagtatattttgcttcagtttaggaaatctttgatgacttgtctttagatccaataagccctgtaatctaaatattaacctgcagtataccgcaggtaggcttatattttagttaaactaaaaacttttattgtaaagatgatttaaaaatatatgatattattttatttgattttaaatgtatagtaaactgtgagttgtatatgttttgttgatattatctatattatttagtgtttaagattatacacttgtagtttgattattaatttaagagtttcacctgtagtataccatcttgtattaatatcgatctaaacccgtcaattctaggattttccagcttgtattaaaaattaaatcacatctactatgttattaattattgtagtatataagattataaattttcaatataatatgtatgaaattgaatataaatatttcaaattatgacatgttactcagtagaaagttttcttaaatctatttttcacccgttataatattttttcatgtattgaacagtttatattcgtttttaaaaattcaaattatggcatatgcgaaaaaactctaattatttttctataatgatgatattatttttcggcaaaaatggaatcatataaagatgagaagtgaactataataattaataaaaaattaatatgataatttagatatcaaatctaatttgttgattttaattggttacttttttgggaattaataatgtatttcgtttatctaattaaattaaattaataaaaatttagatatcaaatcttatatgttgattttgattggttattatttttggaaattaataatgtatttcgtttttaattaaatttaattaattaaattagtatttgactttttaatcctcaaagagataaattaatttactctttaaatttttatttctaatggcatacctatgcaattacttacaaaaattaaggttacatttaaaatgtacttcccaaataatatagtaggatattcaaatgtgtaacacaaattcacctaatcaaactgtgtaataagaaaatgaaaatcacaatacacaaaaagaaagtttgaatgagctgagtgaatttgatcgggacaaagagaaatcactaacccaaattcattcattcatatagcattttacataacgttttctttgaacaaaatcaaaatattgcatacatcaaaaacatatacatacgaaaaggtttatcatttattttattttggttatattcttatgagatctatatgatatatatcgactttggagctgcgtggatgtggagatgcctttataaaggcaggtagcgtctatgcgaacggtataaggacttagggaacaggacaagcctcaatgttccaaatctctttggcatactgagctattgtacggtcactgctgaactttcctgacccggctgtgctcaatatcgacattttcagccaccccttccggtccctgtcacaacatattatgactcacattaaagaacttgagtattcatttcagttcagtttttgtataaactaaaaaagaaacttatgaatggataagttgggtttaagagatggacttacttataagcttcgtcaactttggcctgagcgtccatgtagctggggaagtcatacccaaccaggaagtaatcaccacgtccaaaacctgtgttaccctcaagagaatcaaggagtggaccataatcgtagctcccaaacactccacttttgacaaactgctttgcctcttcgaaccgaggatcgggtttgaactaatcagtttttacaggcacaaaaacgtttcatgtcagataaagtccagaagcataggtgattcattataaggcctttcatggtatggtggctcgcatttgttccacagagacaaaaatttatgtaagggagaaaaggagagagtgacataccagtccgtcttctcgttctttacgcagtcgagggacctgatcggccgttgcaccaaaaagaaagaaattttcttcgccaacctcctctcttatctcaacattagccccatcaagggttcctataataagacaaccgttgagagcgaatttcatattgctggtaccacttgcctccatgcctgctgtgctgatgtgttgagatagctcacttccgggtattagcatctccgctacagtgacattgtagtttggaacaaataccacctggagaagcaaatgcgttagaaccagttaaaacttcttcaagctatgttcggaaaataaaaggagaacagtgatttattgcatttgcatcaggcttggctcaataagaaagcttcgctctcggaaaggaggcttgagtagcataagacttcacgaaaagaaacctagttcatcttgagagatgcatacatgtgtaatattgacagtttctgatcaaaaacaatctcaggtgagcaagcatcacgcttagccacctctaagttacctttaggtattcgttgacctctggatcgctgttaacaacatcaccaacatcattcaccagcttcactatccgttttgcatttgtataggtggcaaatgctttacccccaatcatgacagtacgaggaactgttttcttcctctcctcaggcttcatctcctgtaacattcagatgcacaagagaatgtcacacaagaaatacatgcattgccgcctaatattagaattgtggtggtttaaggcccttttccttggttaaggtataaaaactcaagataaaatttagccggaggaaaggaatacgctgaagtatctaaacttttttacaggtctaccataacatttaacgcaaggggaaacatagaaaaactactaggaatccacatggatgggttagccaagtatacctttagtttcttgaatctgtatactactccaagaatgttcatcagctgcctcttgtattcgtggatacgcttaacttgtatgtcaaataagcttgttggatcgatactcacaccagtcacacgctctatatattgagccaaacgtttcttattggctgtctttgcagaagcccattcagattggagttcttcattgtccgcaaactagaagaagaaaagataacatcagaataacaagataaaaacccattgcagatctggttatcagataaataaaaaatcagacctggcgaagaccggtaagtaggtcaagatcggtaatccatttgtcagtctttaaccactttgtgattatatcactgagctcagggctgcagaaacgtaaccaccttcgaggtgtgatgccattagtcttgttttgaaacttgtttggccatatagagacatagtctgcgaataactcagccttcaagatatcactgtgtaactgagcaacgccattcacctgcaaaaaggccctcataatgagtacttgaaaccaagactacatgggaagaaacaatataacataactttgacagtgggaccacttaccgtatgcgaggatacaacacataagttagccattctcaccacaggcttttgtggattgttatctaagatgctcaaacttgaaatcttatcctccagatcaactcttgtatcgcgaatggtttgaacaaactgcagaatggtatatattttattattgcaccatatgataaaaacaaatccttagaatgatcagcaaaataccctcttgtcaatctcttctattatttccatatgacgaggaagaagcttccacatcaaagattgtgaccatttctccaacgcttcaggaaggacagtgtgattggtgtaagcaacggtcctgtaaaccatataaataagtcccaacagaaaagtgtgaaaactttgttgggaaatattgaaaggttcatgcataaatattttactttgatgtcacatcccaagcctcatcccatccaagtccattgtcatccattagcaatcgcatgagctcaggtattgcaagagttgggtgtgtgtcattcatttgaacagcaactttacttggaaactctgaccatttccggctgccttcagtggtgctcctctcgtgaaatcttgatataatatcctgcaatggatttccatattgtgaagaggaaatataaaaaattatgactcaatcgaaggtaaatttacttgtagtagtttttttggattctctttctaattaacatgccaatttgaaatttttcttatttttattttccagctatttaaatttacagtccatgacatccatcagagagtcctaagttaatcaatacattatggcttaagaaaaatgaagaacatgaaaggaacctaaaaccaatttgacaaacctgaagcgaagcactgcagagaaagaactgctgttttaaccgtaataacttcccattctcggtagcatctcctggatataaaacagtgcaaatctgcacatatatatagctacattgttagagagaaacaaaaagccacaaagcaaaagaagatggagcagtaggtaaagatgacgtgtcataacctgttgagctcgagaatgaagctgtgcagccaattcatattctccttcgttgaactgaaaaagatcaagatcctcagctctagcttttgcttcccagagacggagactgattgtgttctttgtgccatatcccgggattggcacgtcataagcaagagcttgtacaacatcaccatctacccatttccttctgcaaaatagtcaattgatccactacaatgcttaatagcaaggtcgatgaaaagtcagagaacaacgtagcaaaactcactagtgtatatatgcacagaaatttcaagtacagacgtatgttaagtcatgtaagttccaacaataatacttacgatccatccggatttacttgcaccttgccgaaaaatctgacagggaataccacgtcgtgcctcacaatttcccatgggctgaatttctgcaaattcccattaatagaggatgagttacagttctcagaaaaccataagttgaaatcaccacactgacaatcatcacctcaagccagtcctctggaatctcttcttgacctttctttgtgattatttgcttaaacaacccatgtctgtacctcaaaccataaccccaagcaggcagatttagggtggccatcgaatccaagaaacacgaggcaagtctccctaacccaccatttcctagagctgcatctttctcctacaagcaaacatggagagatcaaaaaataatttatttaggtcccaagtcttcaaagagaaaaatggtaacttaaaatgtacctgctcagctatctcctcaagctcataacccagcgtacgcagtgcatcagcatatggaccttgaaggttcaaattcccaatggcattggtcaaagcacgaccttggagatactccattgacaagtaataagtttgttttggatcaactttgttaaaatgaacataagtctcattccacagctgcaacacaacccaaattttatatcactctcacataaacacaaagaacacattcacacacacatatagattagctcctacaactgcaaattgagatggatataaccacggaaaaccataaatttctataccagcatatcttcatcaaacggaacttatgaaacagtccagaaattacttggttacctgaatgagacgatcgcgaagactctctgcggtagcgtagagagcttgctcaggcccgaacttcaatggagagaaatgtggactgtacttggcgtggtagacgatattcccagcgatctccgtagcatcatcggcctccggattcgccttagccgagattttctccggtaaactagtcgcagcttttccattggcgtttgccatcgcttatctccctaaaacaaccacagtattcaaaaattgcttaaacacgaataaaatcaaaatcatagtgaaactcgaatacaatttcaccaaggtagtgccgaagattatggagcaattaccaaatttcgaagccggaatctggaaagagatgagccaacacttcagagcttaataagggagaagatactacggagaatcagtatatactaaaaaagaagcgtaagatatttttcagaaggtgaatgacagaaacgtaattttcattgttttatatttgattttctgtttttgttttggcgatttgatttagtgattgaaaatgtgaggatcacaagaaaagagagagtgaagtgaagtttttgtgtgtcagaggaagctccgaagaacatttttgtattttttgttgaaaatatctaacaagcagcccccacatctatttgttttttagttagcaacacccttaatattattttcaatgtaaaaagaacaccattgttttcgtattttgggaccattgatcattttctaagaatttaattagaaataaatattggtaaccgcaatgtggacattcatcaaaagaaaataagtaatttgtaaggaatttaattgaacttttggcaacgaaaggaattaaaaaggtaaccaatttgagtaaaaagccaaacgtagtggctcgcttacgtatcaatacggtaatgagaggactagagtgggaaattattaccaggactgaggtgcacgaacacgtgtgtatgcaaatcacgaggtagagaagtgcgagaacctcaaggtcccaaatcacggatctgcacctgtaacttcacttttctctgcttctgtgcccgcccttaatctgtttttcagtctaaaactattacaatatttgatgaaagtcttcgtgtctctataccattgaaccgtataacaaacaaatactacgtcaacattgttttcattatcttctctaaggcgattcacgacattgaacatagataacttgctacattttttcatttatttatcaaggagagaaccatcgagacgaagaaattctagtttctgtacaaagccgaggtcttgttcctggtatttacttggagagcaaaagctgattctatatagagttgcaacttctttactagctgatccacctattaagtgactttgtggtcaccttcaagctgctaagaagaccagcatatatataccattagaattatgcaaaacattgattcaaaatgaatgaaactgaacaggtaaagcaaacaacataacccaagaaaagagaagggacggacctgttgtgtcaaaatctactctttctccagttgcgtatatgttgtaaaagagagcagaaaggagatacaatattgctgtaagaaggatgaatccctggaaggagcccaatagttctacaaagaaaccagctccaactgtgccaactatcgcagctaatgtcccagcagtaagacacattcctaaaacagcgcagaaacggttagagatttttggaaaaatgtttccagattcccaacaaaaatttgattgagtctaaggcttattccttctcagatggtacaaattagctatatgtgtttgataaaacaataggaaactctggaaaccaatgtctattaaaggagaattagaaagcataccatgtagaacaccggaatattcgggagcaatttcctgaaacaagtgggaataaatgttaaagatactcatcatttgtattgggttaggtatgaatcacacgcttgggtacctgaagattaataagaaaccccaaatggctgaatgatttaagcccaacggctaaactaagccaggctgatgccactaaaggttgttttgccgtcgttagaccaatgagagcaattccaggaccaatgaaaccaatggactgccaaacaagaaatgaaatcccccagtcagcaaaagaaaaagaatgctgaatgcaccagatttcattgcatcaggcttcaacatctttcggatatgtttacagaactcttcagtctgagagagctcttgattgaatgaaatcttgtgacacatcacgcacctgcatgatttttcgcgttaaggtgatgcttgtaccacgccgtatcaacaaatccgaccaaaaaccagcaatgtatcctgtgaaagccatcatactccatggaacggcactaaaccaagcagcttgtttgaggttcacatgatatacctgcggtacaatattcttataaatttcttaagagaactaaaacgaacaagattatattaagaacatgttggtactagggccttactgaattgaagtatatgggcatccatgaaagaatcacaaagaaaccctggaaataagtcattaagtcagttcaaagaattccaacaaataggataacacctgatcataactgtaagtcacagtagttggtactaacaatttcccttccacaagaaatcctcatagtaacaagaatgaaagagttgtattgagaggaatctgtatacatacccagctatgcatggaatttgcaactataacagcccaagtcggcatcttggagagaaggcgtccaaaaggaggtattccacttgtgctaattcgtttgttctccatagtagatatttgcttcttttgctttatatactcaagttcagactttgtaatctgaggatgtcgatctggtgcacttgacgttgcagagagccacacgagcaaccaaaggaaccccgatagtccaaaaattacaaatgggccatatatacctccttgagacataagaataggagacaacatgagtcctacaacattcccaagctgaaaccctgccattgcaataccaaccgccctagaacgttctgttgggggaaaccatctacatcaaaagtactatcactaagaacccaataaacttcagtaaccagatcatgtgtgtgtctctttatcacatttgaagcagtaataaaatacaaagcatcactacctcgcaaccatgttgttcatacaaggaagagccactccttcagcaaccccaaccatcgctcttgcagcaagaagagcccacaaagaactatcagccgcccaaggggtaagaaaagttgccaacgaccacaaagccacaccccacgccatgactactttaccaccataacggtccaccaaagttccaccagcaattggagaaattaagtatccccatagaaacgatgactaccaaagaaacattcaagaaactatgagacgaacgagaacaatgattaatgatatacagtagaacgacttaatactaaaattccccaaacgatcaatgagaaagaataacctgaacgataccggaaaatgatttgctccatccacgagaaagcgaaagaggaacaatcgcaacggacatcacaacacgatccgcattgcatagcgccaaagcaagcgcgagcatcgcaaccactttgactctctccgacgttataaattctgaaaaattgggttgcgccgtcaactccgccgccgtttcttccggtgtacggcgagcatcgctgcaagaaactcttaatcgatgacgaggaataccacatagatcgacggaagtgtttccggtgaatttcaatgagtttacgactctcccggtacagaggaccaactttctccggcgatctcgctccggcaaaaacggaatcctcctgagtgtaggtaagttcgaagtcaaaattgctcgatctccatggatttttagagcgtttcgattatggaagtcaattgaagattgtatagagagagagtaacacattttcaccagtcgaagctgcttacgattactccggttagcgaagaagaagaagaagatgctcgctcggtggtgtctatggattgcaacagccaaatcgcatgatccgacatccgtctcgtcttgggccactaataacaggcccataagtggtaaaagtggctcgtcctccatatgatttgggcttcctaattagcacgatttgaagtgtataatgcagtttatttatttttagctaaacaaattaatcaaaaccttgtttggtttctcttttgtgagagaaaatagaaagttaggagctaaattggaaataaagccaatattatatgtaaaacaacttttttttttcaaaatttagatgtcataaataattaaataaaaatgtttagactttaataccgtgttgttgtgccaaatatacaagtattagtgcatatttatccaaaaaatctttgttgtttgaacagaaattcttaggagcattccttatcttttctaatatcttactctcattatgccttggaaaaaataaaataaaataattgtcagtcactgtatctggggtaaacacgtggaagattccaatctttatcagaaaatgaaaataatcacagtaaatctgtatatatcgacaaaaagagaaaagtataaaatggtaaacagtaaatataataaacactgtcttggcttcgggacttactaatgttttttgaagaacacagtttcttctcttgggaacttgtcgtagatccgaatctctatgttactcgtgttggtcactttaactgtagtcgtattctccatagattccttttaaaattcgcaattattcaaattatgcatatcatacacgaattattaaaacaaaatcatccaattattaaaccaagatttcatttgctgataaacatattcaatcaatgaaatagaaaaagttgactttgacctatctatttagaatggaatccaaagagttgacacatagaaacggccaaatattgacggtgggctatgttaagtgttaacttatttgttgattgacagttatacaaaattaacacattttctattgttacgataattaagtaagaaaaggtaatggatgtgattggtaactataagttgtacgagttttttagctattagttttatcggaataatgcaaagctgttaaaataagctgtataataaatctaaatctgtataaaaaaactgagagtaaaactttttgtaacgcttttgataaagttattgtgattggtaactgttaaagttgtaccgctattataatagctaccattcaatccaatacaaaaacaaaaaacaacacattttctttaacgaaaaatggctagatatacggtacttatacttttcatataaaaaaacttaagtaaattctacgaatatttgcttcaatatgatgttattatattaaaattatgatacgcatgtaaattgtaattaaaccataatttttgagtattcatataagattatttttgtaaataatattttttacgaacttttttactaactatagagtgttatggataatttacattagatctttgacaaaaatacccaaaagaatgatgtgacctagaaaaataaaggaaaaatgacaacaatagcactcaaatattttgtggacaaaaatttttttttcgaaaaaatattgtcggaaatatttggcgatgaatttgtgtattttataattttttaattttaataatttaaaataaaataattgtttaggtattatttatgtccaaaataattttgaatattacttttgtgaagaaaacttaaaattgtactatttataaaaattaatacaagagaaaaatactgaacaaatagaaaattgaagaaagggtttaagtgaaatttccataattgaccctacaaacaacacttacactatcatcaagacactctcacacacactctctcttaagtcaccgccgcacgcaagcaaatcaaacgaactattcgtcagccatggctaacgtcaaacaaaccaatcgccgtcgttcctcctcctcatgccaccgtcacccttccgctaaaccaaccagcggtttctgcgcttcctgtcttcgtgaacgtctcgtaacaatagaagctcagtcttcttctctcgccgccgttcagactcccgagctccgtcgtattcgatcatactccgttcgtaacgcatcagtctccgtttcggatcagccgcgacggagatcatgtgacgttaggtcaagcgcaagctctctcctggacttgtttgtcgatgatgacgaagaacgggtggatagttcgattcgaaagcctctggttccagatttaaaagaggaggaagaagaggaagaagaagaagaagattactacgatggagaagatataaaaggttttgatgaaggcaagccgaggaagatcgtcgaagagaacaagacgatgaaggagttcatagatctagattggagaaaccagattaagaagaacaatggcaaagatttgaaggaaatagcatcggttttgagcaggagattgaagaattttacattgaataagagaaatgacgaaaaatcagattccagattcgccggaattgtgaatggtcgtcactcttctgatgtggatcctagattgtcttttgatggaggtaggatctcgtttgagaaacctaggtcttcatgggatggttgcttgattgaaaaatcatatcacaagcttacgacattgtctactgtgacggaagatgctaaagctaaatgtggtgttgaagaagaagaagtagaggagaaggagaagagtccaggtgggacggttcaaacgaagaactattactcggattctcgtcggagaaggagttttgatcggtcggtttcgattaagagacaaggattgcttgaggttgatgaattgagaggtatatcgaatgcaaaggtatcacctgaaactgtaggtttgtttcatggtgctaagttattggttacagagaaggaacttagggattcgaattggtattcgattaaaaatgtcaaaccagagagtaaagaattagtttctaaaggaaagatttgtattgctgctggtggtgaggggaagaagcaggatagtgttgagttaaagaaacctagaaagaaatggccaaagggatggaacatttggggattgatacagaggaaaaacgaggcgaagaacgagataaagactgagcaaattttgaaacttgaaggaaatgcggttgagggttctttggctgaatctctgttaaagcttaggagagtaggtaaaggagaaaccaatgttggtgttagtgagaagcttttgaaaagctatagtgtaagtgcgagaaagtcttgcgatggcgtgcgtagtggtgctaacattgtcagtggctttgaaggtggaagaagctcttgtgatggtctgtttcatggatctattaacagtgttgaggctggaagaaactcttgtgatggattggttaatggcattgaaggcaaacaaaatcatcatcttctccagagaaacgcaaatgttggtacgtgcagccaagaaaaccttgagaagagtatgtttagattctatctgagtccggtaaagagccataagactagcaaatccgggaagagtaggctgaagaattagtttgatctgacatttgtgttaactcatgaatattatgttgtaattagcaaattagcaactaatgtatttgttacttcagtctatagataagtccgtatatcacatcaacaccaatgtttgttttccttctcatatattttcctcataaaagcacatcaacaatacattgtttttgcatggtttgcttatacaaatacgacattgcgtgtaatatatgtcataacataattccccgatgttcctgtacatcaatcagaccagtgaagttacactggttttgaattgagaccgaaaccaaacgggaacaatgggtcataagaattggcatgagcatctagtggcaaatgctcaacgtgtttgaaccagctcactggcaacttccccttgaagtcataatctccaaaaacaacgtcagccaccccttgcccttctgttccaggcagccaagcagcaaccagagcctctgtcttttcaagaaccgtcggctccaaaaccacaggtcgtcctgagatcaatatcaccagagtcgggattatctctgcaactgcggtgacaatgtcagtaccattaaaaggtattctgagttccgagttatcccccatcgtctctgcatagggcggttccccgactgcaacaatggcgtaagagaatccttcacttgaggctaaggtttcctttgatggagttttctcatagattacttcggtttcgtctccaactgcttcttttatggcgtccaaaagtgtagtgcctacatttgcagacaaagatggattcatactgattaacttttcaacagcatctattagcctctgctagcaatcgttttaattaccaattgtgatcctgccgcttagaccgaaccatgtctttgtccatcctccgcactgatatccaagatcatctgcgtgagttccagtgactagaatcctcttagcgttgcgatctagtggcagaaacggtttatcagcatttttgccactctttagcagaactaacgactttctaactgcttcctgcgccaattctctatgttcctgcacacatgaaaaaatcttagaataggggtagcactctggtctaatggccttcagtacaagagagctcaccttgcaaccaacagtaggcaacaaagatcgatctgtgagaggatgtccaaaaagaccagcgacaaatttcactctgagtattctttcaacagcatcattgatccgagccattggtatttcccctgactctaccagatctgtcatgtcctgtatgaactgttcgtacttaaatggtaccataacctgcaacatggattatataatcttcgcttcttcaatcatccgagatgatgaaaatcatttactaagctgaaatattttgtgtacggggttcacactctaccatgtcaatgccagcattaaccgcagttttaatgcagtagcggtagtttgatccctgaggctcactaagccggtccaaaccttcccagtctgagactagaaatccctagtaacatatacaagcaaactagcttaatgcatacacctctagcttatttttctttctattcaattaaatttacacgaaccttgaaaccaagtttttcctttagaatttctgtcaagagaaaacggtcggcgtgcagtctagttccattccaactggagtaagacgccataaccgtggaaactccctgagcaagacacttcagataaggaggaatatgtatcttctctaattcttcatatgaagcgatggtgttcccttcatttatgcccttgtcagtaccaccatctccaacaaagtgtttgacacacgcgacgacgttgtttctataaccccaataaacaaatccatgagaaatgacatcaaacctattaatgtcccaaataagtttacagtgtactgattcatatgataccttcctgcaacaaaaggataaccatttgggtgttcttctggtggcacaccttgtaggcccgagacaagagaagtcatctcacagacaagttcaggatcttctccataactctcatagcatcttccccacctcggatctctcaaaacctgcacaaagacaaaacaacaactttcacattcaatatttacaaatcatttcgttcaatttcagttgttaaattataaaaaggaacgaacttacggccacgcaaggagaaaatgcccaatgaaccccgctcgctcttacttcaagtgcagttgctgctccaattcttctgaccaaatctgcgtctctacagagttaccacaataactactactgttttcacattaatagcggccaaacacagcatggctgcaatagaagcaccaatcttgaacacaaacagattctactcatccatagccactgcaatactacttctactttgttttaagaagcaagctcagaaatttaaactagacctgaatcaactaagtagcttcggtaaggtaagtttccatcagatagaccagtaacagaacaaagctttaagagcacacttctagtttgcttatggtaaatcgagaataaacctggtggctccgaggccaatgttgtgagggaagacagtggcgccgtagacattattgttgccgtggacagcgtcagtgccatagataattggaattcccaaacgcgacgctaacgctgatcgctgaaaaccatcaatcatatcagcccaatccgatgacttagcgtcctcgaacggtacactacctccagcgtttagtacacttcctgcaaacaccaaatccataaagttactaattttagtaaattgcaaatgcatttttcaaaattgaaagttcaaaaaaaaaaaaaaaaaatgtgtgtaccgatgaagaaatctgtaaaggcggagggagaagcgactctgcgttcgatttgagtcatctgaccgatcttctccggcaaagtcatgcgagagagaaggtccttcacacgcgcctccactggcgcgtctccgttcttgtaaacgcatgatgactcctcgacgaccattttctttactcttcttcttcgttgtagttgttgtacgactttctctttatctataacaagatgagacgtgacacattgattttgactcaaaatgcttaattaatgattattgctttatgtaaaaaattcatcaatttgattaacttattaaattaaacgtgtggttcatatggtaatcgcatatttttaatacaagttaaccggtgaagttaaaccagttaaccgaaattggaagtgagaccgaaaccaagaggaaacaatgggtcatacgaatttgcttcagcgtttaacggcaactggtcaacgcgtttgaaccagctcactggtaacttccctttgaagtcataatctccgaaaatcacatcactcatcccttgcccttcagttccagggaaccaagcagcgaccaaagcttcagtcttttcaagaaccgttggctctaaaaccattggacgtcctgagaacaaaatcactagagtcgggattttctctgcaaccgcggttataatgttgttaccattgaaaggtatagtgagttccgagttatctcccttcatttctgcgtatggaggttcccccactgcaacaatggcgtatgagaagccatcacttgatgctaaggtttcctttgttggagttttctcgaagatgacttcagttttgtctccaactgctgcttttattgaatccaaaagcgtcgtgcctgcatttcaaaacaaacaagtatataagtgtccacatcattttttctgatatcttctaattcgattcaactaccaattgtgattctgccgctttgaccggattttatctttgtccatcctccacactgatttccaagatcgtttgcatgcattccaaccactagaatcctcttggcattgcggtctagtggtagaaatggtgtatcagcatttttaccattcttcagcaacactaatgactttctaaccgcttcacgtgccacttctctatgttcctgcagttgtggaaaacatagtcaatcatgctctcgtacatcttacaatagtggcctcagctatagatacctcaccttgcagccaacagttcccaacaaagatcggtccgcaagaggatgttcaaagagaccagcaacaaacttcactcttagtattctttcaacagcatcattgacccgagccattggtatttcccctgactccaccaaatctgtcatgtcctgtatgaactgttcgtacttgaaaggcaccatcacctgaaatatcattcattaacaatcttcgtcttctataaatcattcgaaacatatgaaaatcattcgttaccatgtcgattccagcattaatcccgagtttgacgcagttacggtagttggaaccttctggctcgcttatcgtctccaaaccatcccagtctgaaactagaaatccctggtaacaaaatgacaaagtacattaaacgagctcaatgcatacacctctagcttataaagattcttttccatattcaataaaccttgaaaccgagtttctgtttaagaacttcagtcaaaaggaaatagtcggagtggagtctacttccattccaactggaaaatgaggccataacggtcgacactccctgagcaatacaattaagatagggagcaacatgtattttctccaagtcttcatatgatgttatagtgttcccttcgcttaagcctttctcagtaccaccatctccaacaaagtgtttagcacacgcgatcacgttgtttctatcaccaagtaaacaaatccatgaaaaatgacaacaagcctattcaagtctactgcattttaatgtttatatgtacatctataccttcctgcaagaaaagggtaaccgtaagggtgttcttcaggtggctcgccttgtaggcccgagataagcaaactcatctcacatacaattttagcagcttcactataactttcatagcatcgtccccacctcggatctcccaaaacctgtgagtaacaacaatttcatttcaatatttacaaattagtatcccaatataccaacaatctacaagggacttacggccacacaaggagcaaacgtccagtgaacgccactagcccttatttcaagtgctgttgcagcaccaattcttttgaccaaatctgcgtctctatcgagataccacacaaaactacgattgttatcacatcaacaacaaccaaacacagtacatggacagatcttaaacacaatcagattctaatcatagctagtactactactgtgtgatcaaaagctaattgaagcaaaatcatcagaaactccaaattcttgtggaacatgaattaaaacaatccgacattgcttgtaacttaacaaaatgattcaaactttttaatcaaaattcaaaagctttaaatccatagacttcctaaaaccccattatatgcaaaactctctcattctctgactctcttttgcagaaactaaagtttgcttaaagtggaagagaatgtttaagaacctggtggcgccgagtccaatgttgtgggggaagacggtggcgccgtagacgttattgttgccgtgaacggcgtcagtgccgtagattattggaattcccaaacgcgacgctaacgctgaacgctgaaaaccgtcgatcatatcagcccaatccgacgacttagcatcctccaacggccaacttccggcgccgctctgtacactgcctgtaaaaccaaagttgtgatttttattttcgaaaggaaagtagaaaagtttggttcgttgaccaaaacaaaaacaaaaaccgttcagtggtgttattgtatcactattaccgatgaaagaattagtaatgacttgaggagaagcgacggagcgttctatctgagtcatctgaccaatcttctccggcaaagtcatgcgagagagaaggtccttcacacgcgcctccaccggcgcgtctcggttcttgtaaacccatgaagactcctcagtctctgccatactcttcttttgtctttttctctaaccgaatctagtcactccacttctctttatctagccaagctggaggacacgtcacgtcacacttaattacgccactacactcaaaattcttaattaattggttaataattgaagaacaaactcactaaacacatgtgctatctcttgggcttttgtttatttccttctttttttaggtcttattataaacctcgtaggcctactatatatagtacattgtattccataattttaaatgaaacaaaattttaagactttctctgtccaaaactctgaaaagtttctgtcgaagtttaggattctagggtttagcagcgctatggaaaaatcgcagaagcaagtcacccgcccaagcaactcccgaagagaatactcgaaggagataccaattgatctgttgattgagattttttcaagattgtctacgggagacattgctaggtgtcgttgcgtgtctaagatctggtcttccgtaccgcgtctgcgagatttcactgaactattcctgaaaatatcttcggctcggccgcgtatattatttaccttcctacataacggtaagcgtatgttctactccatatctcagcatctacattcagacccgagttcatctcctttggttccctactatcatatgtctttttccaaaggtatggttccttcctatgacaatgagattcatgcccctgtacgtgggtttctttgtagcaaagctagtgtctataaccctagcacaggagagtgtgcatacccttacctagagcttctagtaagaggattgagagaacctattttgggtatgatcctatcgacaaactattcaaggtgtagaaaaggggctttgggacattctccccgtagatgctgagaatcttgcaaagaaagtgtgcgtgcccaaggtattgttggcgtccgaggattttgcatgtcgagtttcaacattaggaacggaagaagtttgctggagaatgatccaatgctcgctaccccataggccttttcgtgatgagatatgcattgatggagttttgtactatttagctaagtgcattggaaattaaactcgagaaccttatatggtagtttgctttgatgttaggtctgaaaagttcaagtttttagttgtggaaaatataatttggtgttcaagtctcataagttgcaaaggtaaattaggcatactatggccagtgccctctggagatcagagtcatgaagtcacaagaagttttgtgttgcggattctggaagatgccaataaactgatatggtcgaggactgtctacacattgtcttttaattggaagaaacttgtgaataaatctctatacattgttgggatgactagtggaggtgaaattgtgttatctacacgccatctaaactatcctttctacattgtctactataatccggtgaacaacactgcggcaaaaaatgaaatccagtttgggaatatcgctaataagaaggctgaaaactcaaggatttatacgtttatagaccatgtagagaatgtagagcatatggattaaaactctacaagagtaatagtttgggcatccctttaaactttgtactcttaaatactgttattatatgactatttttatgtgttactttaacaaagttcattcatctttttacggaaactgtgtccataaaaccatgtacatcgcttatatttttagagtatcaatagcccatttataattttttaatagaccaaatacagaaaattgggctgagtcgtatcagcccattgatacttttgatactcaatttcatcttacgtggtaggcactgattggtcgctcatttgtttttttcggaaaaaaggaaaaaaaaaataaattccttttgtttctctcaaaatttttctctctgggcgatttcgccgatcaattttcttctatttcgattccttttgaatctcttcccttttctcgaaaatccttcttagatcatcatccatggcactgacgccgttcacggcaactgccgtagacgttgttgttgccgtgaacggcgtgagtgccgtagattattggcttatcaatttaacttacaccatagataattaatatgtagattggcttataagataactgattatatatttaaataataaataacattttaaaaagattactttccatgatatagcatgaattagaacctaatgaacaacacacaaattggaaaatcaaaatactccatccttttgataaaaaaaatatggtttcagatatctttcatgtgaattaaatttcttatttaaatttaataaaatgtctctatttagtaaactagcaattaatattatgaatgaaaaaattaaagatatatttgaccatatatagttaagtttgataacatagtcataatggtgaaaaaaaataagggttttacctgggtgtttccatatattatagcctgatatgaattatttacactaggattgaacttgaaaaatgaaaacaacgtggaagttaatggaattgacgtgtgtccatctttcagaccaccagttttccttaacaaatagataaaagatcttaaaactgtcttctgtcttaatcttcttaatcccaaaaaaaaaaaaaaaaaaaaacacaagtcgctgtcatgtctgggatgttagggttaagcgccgtcatgggaaaacggccgaagcagcaagtcaccgcccgtccaaggaagtgtccaatagaaaaaccggaggagataccagatgatctcttgattgatgttttctcaagattgtccattgaagacgttgcaaggtgtcgttgcctgtcgaggttttggtcttccatactacgtcgtcgatatttcacggaactgttccacaaaatgtcatcgacccggcctcgtatactattcaccttcctttactatggtaagcgactcttttactccatgcctcaagatctagaccccagcaaccactactcgcctctaccttatttttcgatatcatactctcctatatctgcccattaccagatgcatttccctaaagttctgggtgcttcagcaaaggtgtgtccccctatacttggcttgatctgttgcaaatctagtaagacgatgatttttaaccctagcacaagagagtcaaagttcatttcaacaacgaagagggttggcgtgaagagtacttcatttgggtatgatcctatcgacaagctattcaaggtattgtccatgtccgatgattttgtgtgtcgagtttcaacattaggaacggaagtagtgacttggagaacggtcgaatgttcggtaccccatcaccctttacatagtgagatatgcatggatggggtattgtattatttagctaggcgtgtgggcgatgaaactccaaaaccttatatggtagcagcctttgaagttagattggagagattcaagtttctaccaatggatctcagatgtaaacacattggttgttcagcagtcatagattacaaaggtaagttggccgtagtatggctaaatgtggatcgtgacaatcaacgacacatagaaagttttgagctgcgtgttctaaatgatgttgatgaagtgaaatggtctcaaattatttacgaattgccaaattattggaataatctacctgcggatatcgacgtatccattgttgggatgactagtgcaggtgaaattgtgttggcgacaagccatatacggcatcctttctacatcttctactacagtaccgtgactcttgctatagtacaacttcgaatcgatttcggaattgaagctccggaggctaatcactgctcaacgatgtcgacatttgtaaaccatgtggagaatgtagagctagcttgtggattaggtctttctagcatagccatgtagcttgccttctaaggttgcatccatcttgttcggttattgtttgaatgttctatttatgattgtttgttgtaagctatgttttagctatttgaacttttcttgttataagctactttaaagctatttgaacttttcttgttgtaagctactctaaagctatttgaacttttatattcttgagcaaccaactttgtcttcgtgaattttactgttagttttatagatagttagatacaattaaaaatagattttgatccatagcttgttgaatcggtctttaaacactatccaacctctagatttctctaaaagaaggaatttggtaacaaagatacagtcaatcaatgatcattctcatcattcatttcttctcagttctcaccatcaatcaattatccaaacaggtacaaggttgtcgagtcgtcaaatcaactgtccaaccgaatttcatttatagtaaccaatagtaaagaattgtacattaccaaattagagtttcacaaatcaagctacaagtaaacccattcaaggaaacataaaaaaagaatttcaaatttggatcagtttcattttatttctactttccacttactgcaagaaaaaaaaaacccaagaaaatacgtagtctgtaaaatagtttcttgtcggacaagaaagcaagataatgatagaaacaaacagacttgtgagcaaatgatgttattagattttggttttctttgagtttttttttttaattatgaagacacaagaccaagtacttattcatatgcacactagtccaagcgttactctgaatatcaaatatcacactttcacacattctcactggaattgtagttgagaccaaaaccaagaggaaacaatggatcatatgaattagcatcagcggttaacggcaactggtcaacgcgtttgaaccagctcactggtaacttcccctcaaagtcataatctccaaatatgacatcagtcatcccttgcccttccgttccaggaagccaagcagcgaccagagcctcagccttttcaagaaccagcggctcaagaaccaaaggccgtcctgagaacaagaccactagagtcgggattttctctgctaatgcagttacaatgtcgttaccgtttaatggtattgtgagttccgagttatctcccaatgtctctgcgtagggagtttcccccactgcaacaatggcgtaggagaagcgttgtaacgaggctaaagtttcttctgaaggagtcttctcgtagatcacttcggtcttgtctccaactgcttctttaatggcgtccaaaagcgttgtccctgcaagttcagaccaacacagatacgttttgataataatttactaacaacatctactagtctctttgattggagtcgctttaattaccgattgtgatcctgccgcttagaccaaaccatgcctttgtccatcccccgcactgatatccaagatcgtctgcgtgtgtcccagtgactagaattctcttgacattgcgatctagtggcagaaatggcttctcagaatttgtcccgttctttagcagaactaacgactttctaaccgattcacgcgctagttctctatgctcctgaagccatggaaaaacagagtcaatcatgtgcttgtcccaacactttggtctaatgacattatgtacaagtgacctcaccttgcagccaacggtacccaataaagaccggtccgtgagaggatgttcgaaaagacccgcaacaaacttcaccctgagtattctctcaacagcatcatcaatccgagacatagttacttcccctgactccaccaaatctgtgaggtcctttataaactgttcatacttgaaaggcaccatcacctggagtaacattgattaataatcttctctccattattaatctaaaagatcaaaaatcattgactaggggtttcagactttaccatgtcaactccagcattaactgagattttgacgcagttgcggtagtttgaaccgaatggctcgcttagccgttccaaagcttcccagtctgaaatgacaaatccctaataacagaagcaaaggcaactacctaaaaccacacacctgtagcttatttagctaaattcaaatcagattttaggcaaaccttaaaaccgagtttctgtttgagaagttcggttaagaggaaatagtcagaatggagtttacttccgttccaactggagtaagaggccataactgtagagactccttgagcaagacaattcagatatggtgcaagatgtattttctccaactcttcgtatgacacaatagtgttcccttcgtttatgcccttatcggtaccaccatctccaacaaaatgcttagcacatgcgaccacgttgtttctatcacatagtgaacaaaaccatgagaaatgacatcaaacctattaatgacatcaaatctagctagaggtgtatatatatataccttcctgcaagaaaagggtaaccattaggatgttctttaggtggctcgccttgtaggcccgagacaagcgaactcaactcacaaataatgtcaggatcttcactgtaactctcataggatctcccccatctcggatctctcaaagcctatcaaaaagatttataaaaaataaaaataaaaatctctttcaccatttcaattccttcctcatatatattttcttgattttcttgttaggaattcttccttgtatagacgtctaaggattaagaaaattctcatgtattgaacacatctcatacttaatggacaacaacacacatatttggcattaggatgggtgagatgccaaataaaacgtatatattctcaataaacactcaaagatatcccaccaaaggctctattcaattgactaagctataaggaacttacggccacgcatggagcaaacgcccaatgagcgccacaagctcttacttcaagtgctgttgctgccccgactcttcttatcaaatctgcgtctctatcacatttaacaaccactttgttacgacctaaagatttaggttccaaatctatatggagcaacattacaagactcaaataatcgaatacttatgttacgacctaaagttacattttcagccaattatatgcaaatgtctctcttttgtccaaattttctagtcagttcaacgtgaaagagaatggtaagaaaacctggtggctccgaggccgatgttgtggggaaagatagtggctccgtagacgttgttgttaccgtggacggcgtcaatgccatagatgatcgggattcccaaacgcgacgctaacgctgcgttttggtaaccgtcgatcatatcagcccaatccgacgtcttagcgtcctcgaacggccaacttcctccaccgttcaatacactacctgtaacccccaaaaatccattaacacaattacatttgtatcttgttatcatcaaaatggacttgggaaactacaaagtttggtcgttgaccaaaaaaaaaaagaaacaaaagtggtcagtgtttgtgaataccgatgaagttatctgtaatgacaggaggagtagtgacgacgcgttcgatctgagtcatctggccgatcttttccggcagagtcatgcgagagagaaggtcctttacacgcgcctccactggcgcgtctttgttcttgtaaacgcatgtttcattgcttccttccatacacaatatttgttgtttcttccttttgttcttatttttttatccttctgttacaagtttgcaacttaacctttatatattgccaaggttgaggatacgtggcatgataaagtcatacgaagttctgccgtagccgactagatatgcaaatttagcttagagtggattagttcaatgataaagaattatagatttaagtgaaaaatagtaatgatctgaatttttctccagttctacatttttttttttttcgattactaagggaaaagcctaagtaaatttgaatgatcaagtcaaatctagtatataaatcacacaacctaaataaatgatagagcaaagaaccataataaccatcgtttaaacatcctaatctagtctaatacatgatttcaacaaaaagactacccattaacatgaaatatgatgaagaacaaagaaaaaaacagtaacacatatttcatatccaatatttccacaactatgttctttaaggaagactttgccccaaaaaaaaaaaaaaagacttgtctaattttttttgaaaggtcgtctaaatataaaactacgactcaaaacataaaaatgttggtcaatgattaattgaatacaaaaacccaactactggaacaattcgtaccgtgggaattaaaaaacaaagacttgaaaatagtttatttgagaaaatgctttgatgcatgagtctaaataggaggaaccaaatgttgtgttgacgacataatatagagataatcaaggctagatagacgtatgtaactgatatgctaattaacatgtcttttcaagattgacgaacatatttgagagaccaatcttaagctgttagcatatgaagcatgagagtgacctttttgtgcatataatcctccaaacttattccaatgtatgaaccgattttaacaaaatcatttttaaaacagaaaagtagtcccttgaaattttgttaaagatattcaacaacaaatttaaaccgtgtcagagttctccacggaatcaccattgagaccaaaaccaagaggaaacaatggcaaatacccatttgattcgatgtcaagaggtaactggtctacacgtttgaaccatgttgctggtaacttccctcggaagtcataatctccgaatattacatcagcaatcccttgcccttctgtaccaggcagccaagcagcgaccagcgcctctgccttttcaagaacttgcggctcaagaaacataggccgtcctgagaacaagatcactagagtcggtattttctctgcaaccgtggttataatctcgctaccattgaaaggtattacgagttctgaattatcccccatagtctctgcatagggcgattctcccaccgcaacaattgcataagaaaatctatatcctgaggctaaggtttcctctgatggacttttctcatagatcacttcggtttcgtctccaactgccgcttttatggcatctaaaagcgttgtgcctacattttcaaacaatatagttagaaattcgacgagaccatttagcatttcctaccaaaggtgtttttcaaaccatattgcagtagctctagttaccatctgtgatccttccgctttgaccatacattgtctttgtccatccaccgcattgatatccaagatcatctgcatgcgttccaaccactagaattctctcggcattgcaatttaatggcagaaattctccatatctgccgttctttagcagaactaacgactttctaaccgcttcacgcgccaactctctatgttcctaaacctcgtaaaacagagtgaaatcatcttttatatggtcttcaataatcttagcactccagtttaatagcatttcagaacaagagagctcaccttgcaaccaacagtaggtaacaaagatcgatctgtaagaggaaattcgaagagtcctgcaacaaactttactctaagtattctttcaacagcgtcattaacacgagccatcgatacttcccctgactccactagatctatcaagtcatttctaaactgttcatacttgaaaggtaccatcacctacaataacattaattggtttaattatatattctcttgtatcatccgagacaatgaaaaaaagttcactaccatatcgattccagcattaatccctattttgacgcagttgcggtagtttgaacctggtgggtcgctaagccggtccaaaccttcccagtccgaaactacataaccctaataaccaaacaaaaaatatgaaatcaaatgaatacaatgaatacatctctagctttatttagattgttttcaaactgaaccaaccttgaaaccaagtttttgtttgagaatttccgttaagaggaagtagtgtgagtgaagtttatctccgttccaactggagtaagaggccataacggtagagactccttgagaaatacacttcttatagggagcaatgtgttttctctccaagtcttcgtaccgcaaaatggtgtttccttcatttatggccttattggtaccaccatctccaacaaagtgcttggcacacgcaaccacgttttttctatcatcaagtgaccagagtccatgagatatgaaattaagcatactaaagacacaaattaagccacaatgttaatatatataaacataccttcctgcaagaaaagggtaaccatttgtgtggtctttggatggctccccttgtagacccgagacaagtgaagtcatctcagaaacaatttgagcaacttcaccatagctctcatagcatcttccccatctcggatctttcaccacctttagtaagaacaccatccctttcagttgactaataaaaccaaaacatattcgatcttgttgctaaaatctaggtatgcaggagacttactgcgacgcaaggagcaaacgcccagtgagcaccgcacgcccttacttcaagtgctgttgcagctccaattcttttgaccaaatccgcgtctctacaaagttaacacatgaagtaccaatgttatcacaagccaaacacaacatggccacaataaatgcaactaattatttaatactaatagctagcattaaaaagttagtaagtgtaacatgattatatcttcaaataagactcaaatgaatcagtgaaggcaagtctcatcagatcaaatcaatccctttatatgcaagtctctctctagtctcttctactaaatttgtactttgcttaaaagaaaaccagacctagtggcgccgagaccaatattgtggggaaagatggtggcgccgtagacgtcattgttgccatgaacagcgtcaatgccgtaaattatcggaattcccaaacgcgactctaacgctgatcgctggaagccgtcgatcatatccgcccaattcgacgactttgcatcctcaaatggccaacctcctgcgcggttcaatacactacctgtaacaatatgacaacttgctttgtatcttttagtatgttcaattttcataagagaacaaaaaaagaattagagaaaatctaacaaaggtttggtcgttgaccaaaacaaaatttagaaatggtctgtggttgtgtataccgatggagaaatctcttatcacggcctcagaagcgacgctacgttcgatcaaagtcatctggccgattttttcagccagagtcatccgagagagaaggtcctttacacgcgcctccactggcgcttcccggttcttgtaaacatatgacttctcattgtcaaccattttcttcctctttctcttcttcttcttacaatgtcacttctcctctttagtctttaatatatatatagccaagctagggacacatgggatgggacgttgacttggaaacacactcggattaaggaaggacaaaatatcaactagaattcatttcatatgtatgtaaggtgtgaagtcttgagaacatggctaaaacaccaaaaacataaattaatttttttttttgggtgggaaaaaaacgttataattaaaatgttgtattgtaagattaaaatcaattggaattttaggtatgaattcttaccaaataaaaaataacgagaaaaatgtttaacattgtgcataaatattattacatgattttcaaagttactaaacacaaactaaggtagtctaggcatgcttgtattgggtgaagtcacataaatatttttgattaataatatgagtaaacatataaaaacatttggttggtatacttaaaagctcttcaaacatttggatcggaggaggtgctggggttctacggacgtttattagcggctgcacagaaagaccaacaccgatcggcggtgtcaacaacgacagttccagcaaaacctgtgcatttaaactgttttccatatggatagcacggtggttctttaactttttcatttgtgataggatttcttaacgggtcatctttgaaaggatttcttaaagaatctacaaaagcaaataaatgaacctttttcagactatggttatgattataatggtaatgatgctaaatgacgatctgaaccaaacctaaagtacttataacattaactcaccacattcatgaagacttgctagaaaaataagaacgatacaaaagatactaaaattagatgacgacattgtaattttcacactaagaagttttgttgttttatcatagaaaaacttatatatagacaagtctttgattactgctaaatttttgtgaggtgatccgacaaaactgtcattagatttgtttggctagatttatttcttttctattctaaacttataattaattactttgttttcgaaagtccctaaagtttcgaatgttgatcaataaaagaaaacatagtaaccagaaaataggaccacgattaagagtgaagcatatggtggatggagctaacaatctatttttctttttcataccaactaccacacattaatcatatacttttcttgaattaggtctagagcaataaagtcagttatttaattagtatttacttgaataaatgaatcttgattcttgaccgtttcgataatcatggtcttttcatttttatcattttgtgcagattgattgtaccatgtttatttctgtttctaaccaacattcagaaacatttttattcgtaagaagaagatgcaagaaatgggttacaaggttggaggtagagggagactcggagattgtggtggggttccttaagtcgggaatcacaaactcacatccattctctttcttaatacgtttgtgctatgactttttgtcgcgtggctggatagtccgcgttttttcacgtgcatagagaaactaaccgcctaacggatgtgttaactaactatgctttttctcttcccttagatttttatttgttcgagggtagaccggatgtggttgtctctattgtctttgatgatgcgaacgggtctgcatacccacataatgttcgtatttgatttagttttaatttttttaattaataaaatgtggggacattgtcccccaaccctaccaaaaaaaagaaagaagatgcaagaaatttggaaagaaaagaaaagagtatgattgagtgatttgtcttttaggccgattttgggcctctttcggcccaataaactctatattaattcttccaattatatgtccacgtgtcctcttgcaccattcggttccgtacgccgtgtcacacttgattactcagctttgccgatgagataattaaccgtcctccgttgtatcgacggtcgaattttaatatctttgatccaacggtcacaattcgaagtcgtatttcccagcaaacatcgtcttcattgaaaattagacagatcgatataaatgtgttacctttgatttccccaatttctagggtttcgaaataatgactactacattcgaatttctgcaaccaagaatccacggatttgcaacttgttgtagtagtaatagtctattgtactcgaaagcttcgagatttttcaacgatcgttgtagggtttatcgccaaaatccgaatcggtttgtctccaattcaatcacgcttcctctgcagaagaaacaagttacagtgttgagaaatcacgaaaggtttaatctttgggatgggttttcaagaaagaagagtagattagttgtgaattgtcaagaagatgatcagaacgagagttctagtgaggaggaagaaagcagtcagagtactccggcgaagtcggagaggaaaagagagaagaaagaagataaggtgtggtggtcaaagggcaagaaatggcagtggcagccaataatccaagcgcaagggattggagttttgttgttgcaattgagtgttgttatgtttgtgatgcgattgcttcgacctggtatacctttacctggatcggagcctcgaattcagacgacttttgtgagtgtaccgtatagtgagttcttaagtaaagttaacagtaaccaggtgcagaaagtggaggttgatggggttcaagttttgtttaagttaagagatgatgggaagtggcaagagagtgaaactagtaggttgtctcagtcgtctgaatcgttgttaagaactgtggctcctacgaaaagggttgtgtattccactactaggccgggtgatatcaaaacaccgtatgagaagatgcttgggaataatgtggaatttggatcgcctgagaagcgttctggtggcttcttcaactctgcattggtatagtttcatttttactatttgtcctactccttgatgatgatgctttatagttttgcaatgaatggtgattgtgctataaaataggttgggtcttttcaaaagtttctatttttgtttgttgcagatagctcttttctacatagcggtacttgctgggcttattcgattccctgttagcttctccacggtttgcatctctactatactttaatgtggttgtttaaaattttgaatttcctaaaagaactatgggtgtacacagagttcaaccggccagcttaggacccgaaaggctggtggtcctgatgggggaaaagtctctggtggaggtgaaacaatcacttttgcggatgttgcaggtgttgatgaagcaaaggaagagctagaagaaatcgtggtaggtttttcagtccttaaagacgctgcacatgcttattgatgatcagattgtttttcatagctttattctcggtttggtaattgtcttttacacatcggttaatcaatgcaggaatttcttaggaatcctgaaaagtatgtccgtctaggtgcacgtcctccgcgtggtgtcctattggtgagttttatcatttgatttcactttattcttatattacgtatatatcatggtttaacgtttggttacaagagctctcctttagaatgatatgcctttgactcctttcttttccaggttggtcttcccggaacagggaaaacccttcttgcaaaggctgttgctggggaagctgaagtccccttcataagttgctctgcaagtgagtttgtagagctgtatgtcggtatgggtgcctcacgtgtaagggatctttttgcacgggccaagaaggaagctccatcgattatatttattgatgaggttagaataggtagtcgatgtcagattacctccggtatattaaacctctgggcatcttaaacaagattttctatttgcctctcatgctccagatagatgctgtggcaaaaagccgtgatggtaaattccgaatggggagcaacgatgaaagggagcaaactttaaatcagttgctcactgtaagtctgctgtcaagcacctttcctgtgtaagtagcattcttgatctttccatgacccattcacatgttggaaacttttctgcaggagatggatggttttgacagcaattctgcggttatcgttcttggagctacaaatcgtgccgatgtcttagatccggccctgcgtcgtcctgggagatttgatcgtgttgttacggttggtagaatggatcagctctgcctatttgtaaatgtttaatatggttttttcaaaggcactgatgcatttttcaggtggaaacgccagacaaaattggaagagaatccattttgagagtacatgtgtcaaagaaagagcttcctttgggagatgatgtcaacctcggtagtattgcctcaatgaccactggtttcacggggtacgcttttgtatattatcaatgatttgaagtttattcagttatacgtttttgggtgtatatctcataaactcttttgtcctatttgcagggcagatcttgcaaacttggtaaatgaggctgccttgctagctggaagaaagaacaagacgaacgttgagaaaattgacttcattcaagctgtggagcgatcaatagcggtatctctataacctcgctgttttattgattacgtaaggcaattgtcaaaatgtgttttcttacaaagacctgtttcagggcatagagaagaaatctgcaagattaaaaggcaatgagaaggcagtggtcgcaaggcatgaagctgggcatgcagtggttggtaccgctgttgcaaatcttcttactggacagccacgtgttgaggtaaaatgcaaaaactttgtctacatttacgctcattgtttatgttgtttagtacgtgcaaatgattcaagttttgctcatctttgtggtgttgtcagaaattaagcatattgccaagaacaggaggggcattgggatttacatacattcctcctactagtgaagacagatatttactcttcattgatgagctgcttgggcgtttagttacccttcttggaggtcgtgcagctgaagaagttgtttactcagggcgtatatcaacaggtgcatttgatgatataaggcgggcaactgatatggcatacaaggcagtagctgaatacggtcttaaccaaaaaatcggacctgtgtctgtggctacactttctggtggtgggattgacgattctggaggctcgccatggggaagagatcaggtaacttcatgttgcaatgcacttgcctaggttgtcttataatttccaattgtccatgcaaaagttaaccttccatgttaatacacaggggaaactagttgatcttgttcaaaaagaagtgacaattttgttacaatctgctctcgatgttgcgctgtctgttgtacgcgctaatccagatgtattggaagggcttggtgctcaacttgaaggtgtagtataagtttatttgttttcatcagaacagtttttgaaaacatgtaggacactaaaggatataactgcttgcgagaaagattatatcccttgtcttgagtttggttcatgtgacaactggctgattttgctgatgaaatatcatgttttggtgcagagaaagagaaagtagaaggtgaagaactgcagaagtggttaagcatggtggttgcaccagaagaactcgcagtctttgtcgaaggaaagcaagagcttttgctcccagcacaagctagctccagttaacaactactctgttctatcatcaattatagctataaagacagtatctaacacggatcatcagctctttccttgctgccttctgtatctccaggtcagatctggttatcaccattgccctttagcatccatggttccagcatgcatagaacacttgaatcaaacttgaagaaccatattgggatatgacttttggtgataactcatagattttggtggatgtgttttaagatttggtattcttgctagatacagtctctttaacttggcaaaaaagtgtataattgattcatatgtataaaaagccagactgatatgtgtaaagatcttaaagacccccacaaaaggttgcaacagcatcactcattgtactccagaaaaagttgcattagcattactcatattagtctattattctcagatttctcgaagtagtggagttaatcttgaaaatgttcagaaaaataaataactagatcatgtgatgtcaaataagattaagaaagagtagcttatatataagtgaaatccgaagaattatagagaatgaaaacagaggcatgaataatgcaaattactatacatttttttcttctatttcttgaagaggcttcctaagccaccaaatccaccctcgctcttcttcggcacaggcgtcggagctgagtttttaccaccgcgaacggttcctcggcctccggtggtggtgccttctttctcatccaccttctttagaagtggattagtctcatagaactgatcttgttttgtcataaacccaagaacaaagtcgatgggattcttctcctcctttgggccgcctgaacctccctttgtgcttgtggcgtaaaccctcacggtggccggagcaaatgacataagaagcgaagaaaccattgttgttatctctctctcttctctggtttttctttatcggtagtgtgtgtatgtgtgtcttcgtgtggcatttgttacgaagggattataacgaggttggttgaatctgagccgttggatttttttggcacaagctctccacaagtgtcttatcctctttcttttttcccttcacacatttttctttgaatcacttggatacattttttttggtttaattgtttttagatatatcttggcacaatttatgtatattcttctcaagttcttaaacggaaatttgcacagagagtcaaagtcttcaatttcagatttataatttatttgtcaaatgaaatgtatgaatgcggaagagacacgacttgattttttttaagtgtgtgatcttgtccctgaccatgttggttgttagctgctgcaacttgagactctgatcaaaactaaaaaccttttttctgttattgggccgacgaggcccatttctttaaaaggaactgtgacaagatgggatataaagctctagagtagactcctacgagtagcgccacaacactgatgaacgaagctcgaagaaagttacaagataaattccattaaacgattcaaatatgcgcacttattatttcaccaaaagcaatgctcagtgtttattattcgtgtaatagtgttggatctacacatgttcttattcgatggaatctgcgaccgtatatactactgagtgaaaaattaggcaaaagcaaaaagaaaaaagaaccaaagagaagcaatgtttcatcagccgcaatggttcactcaaaaacactacttacacttttcctcttgcttctatcgtgtacctaagttccgtgtcgctgtctcttcactccaaacaaaccaacatccattcactgccattcgctccttctcaaaccatttcctgagtagaatcttctaaagggaaacacgtctcttcaccaccggtattccagaggaaattggcgtagttggcggcgtagaaggagttggtagggtctgcagatatagcttctagaaagttctcctcagcagcccagagatcattccgaactttccacaggaagatggcgtatttgctgtacgtttctgcgtctacatcttctgactctattgctttcttgaagcagttctccgctctaatacataaccaaaagcaaacatcatttgtcaagttccagagttacatagaatcataaccaatcttttgatactcaatgtgtcaagtgcaagcatatacttctcaaagtacaggtaataaagtcttgaatgttagatgcaagaataggttaaaaggatatctcacctctcatggtcttgagtaacgaggtaaaggaactgagcgtagttagctaggagcagatgattgtcaggctcttgagccaaacctatcttatataaaagctcagttctagtgtaattggcataatcatccaattcaatccttgcagtgatcggtgaaacaagtctcaatctcatgtcacgatcaacagaggaatcttgcatttgatctgcttcttccaccatcgaattccacagactcacctcctcttctctcatcccttctcctgaaaccgagtctcgatgtctcggcaagtgggaaaccttgtcaaaattgatcgatcctaaccatttggacccatcaagcttcgtagactcctttaacgaagaaaaatcaatcctttgttgcgtctgatccggacctttattaacaactggaggagatgctgcaataggtaggtttgatgcaactgaatgcacagtgtagttcgccaaaaggatcatcacataaaccatcaaagtaggtgtctgagagaacacacgttggaaaatccacaacaatgaagcgtgcatttccttcttaacctgcttaagaacacccactctagtctgcaacgcaaagctatgaagctcctcaatcatgaaaaccatagaagaaaaagctctattgatagaacagtaagtagtagcactagctttcttaagagcttcttcttgtaacttcctctttattatcctaagtgatagaggtaaatcaacactgtttgctttacgctcaatacttgaatggttaaccatctctgcccatggagcttccaaagaagctaaacctggaacagactcttgtaatagcttcaaagaaccaaatctatgattattgctatcgttatcgttatctactgcttctgatttctgtttgttctcttcttcttcttcatcgcctgcgtttctgaattgtgaagctaattcctgcattttcacagagaatgcttcgtcggaggagaagaaaccggagctcgcactacaaactcttctcaaaggattatgtttcttcttcacatcagttctaatcttcttcgtggtggaattagaaaattgccaaagctcacatgatttagatcggtgaagtttcccagattgtgttccgagaaacgtcgaaggttttaatctcaaagatcctcctccgacggaaacatcaccggctattccacgagaacgacggcgtttagatgaagttagggtttgcgaaaatgacggacattgaggaatcgctgtgtgtcgtcctgaccaatgaaacgacgtcgttgttgctactttcacttccattattccgatgaaacgcaaacaaatctcagaatctgtataaatcgagaaaagctataaagattaagacaaaattgattacgagaaattgaaagataagagagaatgagaatgagaaagagagagagcttacttcttcttggtgattcgaaattcgttcgttgagagagagattttctcgggagaattttttgtatggttgtcaggtcaaatcgaattcagaggcttacgagagctcctgaactttgttagaaacagagaagaagaagaagaagaagacaaaagcccttgtatgtttatataccaagagagaaaaattagtaaattatttaattaatttaccggatataggcggtgaaaaggcgcgtgctattttagagaagagattggttttatttatttattccacgggtagagacggttacaggtgatgaatgataaggattcggctaaactaagcgacgcggtttattcgggaaaattttgctttcatcgcggcttcatcgatcttgatctgacggatgagaatgaatcacgtgttggttgatatagcttcggtttgatctattgccacgtagggggttgaagaatatggagatgggttcacggacctaacgaggacacaaacttgggttttctcgatattgagtgttatgaaatttgtattttctcgatttattcctgaaaacgaaagtatgaaaagaaaatagcttgttttagagtagattatctcattctctaataagatttgttttaacaaaaattagaatcagatttttagaaaaagctttaaaatcttgatatagatatacgttcaagaaaatggattatctttaccaaatacagagataagtctatatgcatgatgcactgtttagtgcaattttatggcataaccatacaattacatataatgaaagacaacaacattaaacagtacttggggccttgacaaaactaaatgggctttatatcttatcacgaatatggacccatcgaccattggacccaagtctttggatttaaagagtctctgtatttggctttacatgacttcccagccaagaaactgcaaactgtagtctagtttccaaaacctaacagcaggaaacaagaagcatcaaaacagtaacgaaaagacaaggatagagatccaagaattgtctggtttagggtttattgaggagcccaattatgcgttttagatttgcagcaacgagaaagagaaacgagggtttagggtttaagacaatgatggaaataagagagcataaacagaggaaaaaaacaaaccacagattacgaaagacagtatgatattatataggcctcaaagtaaggcttttaagtggatggcaaagtttgtagagaaaaccataaacacttcaacgtctggctgttctccgggttttaaagaatctctctctgattgagattaactccttggctgcttcactcgttgccaaccggttcagcggagattcttcacaacatctaagtcccacatccaaaatccctttcaagcactcaagtacagggaaaccaactctgagaccactatgaagaatcgatttgtctgcaatgtccaaaactctttctggcaaggccgccttggtgtagctgttcagggtaaagtttcctccaaataactcattggttggtctttttccagtgaacatttccaaaacgagaaccccaaagctatatacatcaccgtgtattgacggttgtcctcccattccatattctgcaccataattcacacacacaaaaacgacaacaagattgtaatgaaaaaaggaacacataaatattcttcatttaaacgttccatatgtgtaatagttttacctggtgcggcatacccaatggttcctctaacaccagctgagcttagttggttgaagaaagactcctggtcgaatttgaggagaagacgagcgagaccgaagtcgctaacatgggcagttagatcatcgtcgagaagtatgttgcttggcttaagatcgcaatgagctataggctcatgacagtgaacatgaagatagtccaaaacagaagccacgtctatggcaatgttaagcctttcaagaagtgtcaaagttcttgagggcctatgaatctcttcgacttcctctgggtgcagccatttatccaaacttccattcggcatgaactcatagatgagagctctgaattcgttaccttggaaatcaatactagcgcaagctgtcaatagtttcacgagattacgatgccttatatccttcaaagattcacattctgccataaagctcttcatagctccacgtctctgcatgtttagaactttcactgcaacaatcttgttctccgtctggagcaatgccttaaacacagtaccaaaactacctgacccaactatattgctcgaagagaagccatctgtcgcatttcgtagatctccataacttagcttttcatggaaaatctccaatgtaaaaggagctgaattattgatcttctggttgttctttctttttttgaaccagcttagagaaactatgaacaatagcaaaagcaaagctatgcctacgctgaccccaatcgcaactttcttcaaaagagatggatgccttgtctccactggtggtgcttgggcaatgcatggctttagtttcagttccttgatgcttccacaaagatttttgtttccgaatactgaaactaaagtagcattttgaaatattccttctgttgggactcttccctcgaaattgttatcggatagattgagatattccaacttggaaaagttttcaaaatattcagatatacttccagagagattattgtttgacaaatcaacgtttttaacacccatcaacccttttatatctggaatggttccatcaaaatggttttcttgtagataaataacttccatcgaaagacattttcccaaagtttgtgggagatgtcctgataagttattattcccaagtaatagctcaacaagattttgtaatcttccaatatcgtttggtagagagccactcaaagaattagattccatgttgaggtgaacaagggttgggatttgcatgatctccttaggtatagtcccatttaacttattatacccaatctgtaagtcgagcatgtgactacaatcaccaagactcggaggaacgattccttcaaaactattgttggataaatatagttttactaactgagtaaggttgcctataaaagagggtatctctccagaaaacctatttgaaaacaaaattaattccccgagccctacaagatttccaagagaggttgggagtggtcctgttaatagattatctgccaacaaaagtgattgtaggcctatgagatttccaatatcatgaggaatgcttccataaatgaggtttcctttaaggttcaaaacggtgagttccgtggacatattgacaatggatgtaggcaaagcacccccaagcctattgtaactcacagataacccatgcaaatgggagcaattagtcaaagcatcaagaaatgcaagatctccaaaagagtaacttcccaaagaattgttagcaagttctaggtaatgcaaattctctagttttccaaagttgggagagatacttcctgtcatcctgtttttaccaattccaaacatttccagagttgaaatattggcaagtgttgttgggatggctcctgttagaaaatttccatgcaaagataactcatgaatgtttggtagcagattaccaaaatcaggcttcaagttacccgagaaaccattaccaaggaggtataaattctcaagtgaggacaagttgtagaaagcaggaggaaaaacgccagagaagttgttcattgttaatgtaagagacaccatttgactcagcatagctatatcatctggaatttctccttccagatgattatatcccaagttgagcactattagagacgtcaagtttcgtataaatacggggaactttcctttgaggtcgtttagaccaagatatagataaagaagctttctcaatgaccctagttctgaaggaacaccgtctccaagattgtttgaaaataaatcaaggtacaacaatctagagcagttggacaaactggctggaatctctccttccagataattaaagcccacagccaaatatttaagtctaaacaagtttcccatctcttgagggatggttccaccaaaagagttattagagaggtcaagatatatgagaaacgaaagattaccaatagatggtgatatcactcctcccaactgcaatcctccgaggtccaaacgagtaactctcttgtgtttgcggccacatctaacccacttccagctgcagagagggaatgagttattccacgcggacaaggcatcccttttgctttcagaaacttgagacttgatctccaacaacgcttgcctatcactttcatcggtaaaaccatatgcttcgagttgcatgagagcattgaaagcaagtaaaagaaatagtctcatgcttctcttttctttttttgttggttaaaatattgtggttcttctcaaactttgcaggaagtaaatatataagagacgaagcaattgcaaaatgcctacttgtagtgctaacgcaacttgaagccaaataggaatgatcaactaccagatttttccaaaatataagtcaagaagtcaactgcctaaaaagacaaggaaagattaagatgcgcatttaactagtctttctgacttttctataggcatcatgtggtggctggatttatcggtcccatatgtctggaatctgaacaattaattagcttaagcatggaacattactatcacacggcagtcatcttttgtcttaaaccacacaacactactttatgatattgagcaaccatacatgtgacaagccctttcattgcttgcaaactttgtagaggaaaccaaaaaaacacttcagcctcgaaccaatagcttgagcgaaggtgctcgcagttattcttcccagtaactcagatggacaaaaactacagaacacacgttacacttacatgacagaaaatctgaaataacactaaataatcaagcaatttacccaaataattctttgattccatttttgcatagaccaagtcaataagattgaattaaaatgaaaaagaagaaatgcaatttacctcttaaacttgctttctaaagattaagacgagaattgattgatcactgcaatcatgaacacgttcaaagctgctggttcagaaaaaaccacagaaatatatagcaaaaataaatggttgcagctttaaaagtttagcatgatcatcgcagaaaaacacattttcagtttaaaacttgatcagctctaacatcacaatccagagactttttcttactcttcggtaccaaaaaagaagagaaggtaaagaaggtaagcgaatggcttcctttgaaattgctgttaggttcccaagagatgcagggaaattccctgtcaggttgtttacacggagagataaaaggacaagcagaggaagcgaacccagtttagaaggaacctcgtgttcaagattgttggaggatagatcattggtcaaaagggaaaaacagttagatatatatgccaagtggaatcccacctccaagaatgatcttgctcaggttcaagtgttgaagcctgaacagcttccctacctcaagagggatactaccattggaagagttgtacgtgagactaagagatgtgaggaaatagaggttaccgatagagggcgagataacaccggttagtttcattccttcgagatccaaccagtgactctcttgtgattccgactacatgtgaccccagtccatttgcagagagaaaaagagtcattccatgaagccaagacaactcaggtgttctctgataggttagagtttactgaaacttgagcggtgcttgtttatcggtcttatcagtgtatgtggatgcctgacagtagaacacaagagcatgaagagagtaaatgaaagacatatttgtgtaattttgtagtcttcccttcctgagggggtaaagtatattaaaaaatggcagtaattattcaaaagtacctctgccagaagagtgtcgccttcctaatcaattaattggaaaataatcaacatccctgcatcattaagagaagaaatatgttattttaaggaaatacaatatgttgattggaagccatcaacagtattgtaaatagtcaacagaagtgggcggtaattaaaaaatagcgaaagctcgttaatactttttatgttaagactttctttggagtcatcatgaaaatgaaagagtgctcagagtgtgacaaactatataattcaccattgacactttggctgtcgtccttttcaggtaacatctccagcagcaggggtccatagctgtacaaattcctcattaccatactctgatacagatttcttagagacatgagagctatgaaaactgtattttcttatccattcataagagaggataggtgaataagtcttctaaatgtcagtaactccttttgtacctgcaggttgaatcaaatggtcacattatagagttcgtctctttaaagagttagcaagacaaaaagaagaggcatgtgacaagggagctgctgttgaagatgcggaaagactcattcagcaagatacttagaatgttaatagtaaaaaaaattgaaaaaatgaaagaaaaaaaaaattaatctacaatgtgaagatattttattgaataagacagagaatgtttaatagcctgtctcattgcacaagacacattacaaatacacccatgacactggcacaataatttaaaactacaaaccattcagtagaatactcgtacattcataaaaatacagacacatctagtaaagagatatatatacatgcgtacctatatctcgtggctttaatagtagtctctcgtacgacaactcgttaagtctcctcgtctctgaaaaaactttctctgatagagaccagcttgcttatagcctcagccattgatatccggtttaccggtgattcttctgaacaactgactcccacccgaaacacaagggtcaagcattcgaccatattgaaatgctgagcatatgcaccacggagaatagtttcgtctgtgatatctagtgcttgtcgtttctgcaatgctgatttagtaaaactatgtagagttaaaccgtccacgaataacttattggtgggtctttttccagtgaaaatctccaataggacaataccaaaactgtacacgtctcccataattgatggatgacctcccataccatattctacaaagttcagtaataacaacaacaagactaaagaatattaggacgactgtctggtctctgcttgagataattacctaataacgattataaattttaaagtaaaataagcatacctggtgcagcatagccaatggttccacgaacacctgcagagctgaattgaatatggaatgtatcccgatcaaattttagtaggagttgtgccaaaccaaagtcgcttacatgagcagtcaaatctttgtctagtagaatattgcttggcttaatatcacagtgggctatagggttgtgacaataagtatgaagataaaccagagccgaagcaacatctatggcaatgttgagtctcgcaaaaaggcccagggttctcgagggattgccagtttcttctatttcatccgggtgcagccacatgtccaagtttccattaggcatgaactcatacactagagctctaaaatcatttccttcaaaatcagaacttgaacagatagtaaccaacttcacaaggttgcgatgccttatacctcctaatgcttcacattccgctatgaaactctttgcagcaccacgtttgcagagattcaaaactttaatggcaacagccttgttcttggacccaagaaatcctttaaacacagccccaaagttacccgacccaatcaaattgctggaagagaagccaccggttgtcttgtagagctcatcataacttatcttttcataaaacgatttcactggggagaaagaccgatcattctcattattattagctctgacactcttcactctcagtttgtaccagcatagataaaccacacacagacatagaagcaaaagtgctgccataactgcactgacacaaatggtgattatctttctgactgatgaatgccttcttggtaattcaacagagcatggctgaagctgtaatgacgggatgcctccacagaggtttatgttaccaaagaccgacatcgcactggtattacgaaataccccttccgttggcacagctccgtcgaagttgttcaaagagagattcaggttctgcagtttggaaaagttcgccatatattcaggtattgtaccagagagattattcttcgacagatctaggaatctgaggccagtcaaccctcttatatctggaatgggcccaacaaatgaattcccttgcagcaaaaggaattctagtgagagacaattcgccaaggtttgtggaatctgtcctgatagtttattgtatgaaacgtctagagctaatagaaatttaagctttccaatgtcttgtctcaaagggccaaccaacaaattaaatgagacatttaagacgacaagagatggaagttccataagctcatggggtatgctgccattcaacttattagtaccgaggttcaagtctagaaggtagctgcaacttccaagacttgaagggatgcttccttcaaaactgttgttaagcagatacaggtatgttagcccactgatattccccaaggaagatggtatctctccagacagtccatttgaatagagcaagacttttctcaattcagaaagttctcccaatgagggaggaagtttgcctgtcaacagattttcgcccaagtctaatgtttgcaggcttacaagattccctatgccatgaggaatacttccagagatgagatttccaccaagagagagctcagttaattgggtggagagattggctataaagacaggcaactgaccgccgagtttgttgaagccaacattcaaatactgcaactgactgcagttagtcagtgcaccaagaaaatcaagatcaccagaagagtagtttcccagagagttattattaaggcctagcagtaatagattctgaagtcttccgaaactcaatggtatctttccagtaagatggttagacggaatatcaagttgtcgaagacttgagatattggaaagtgtctctggaatggtacccgtgaaactatttatccccatatatagtatttgaaggttagggagaagagaaccaaagtcaggtctaagggtgccagagaaactgttgccggtaatggacaggaatattagtgaagacaggttgtaaattggaggagggaaaaccccattaaacttgtttaatgctattcggaaaaagatcatctgtttcagtctggctatatccccagggatctctccttctatttggttatatataaaatcgagcatctggagtgatgtcaggtttcccaatgaggcaggaaacttccctgttagattgtttctaccaagagagagaaggacaagcttagacagcgaaccaaactccaaaggcacgccttgttcaagatgatttgatgataaatcaagtgttgacaggctagagcagttcgacagaacaaccggaatcacccctccaaataaattattgctcatgttcaaatattgaagcctgaacaagtttccaacctctgaagggatggcaccatggaaaaagttgtctgcaagattcaaagatctaagaaatgagaggttaccaacaaagggagagactacaccggttagttttagtcctccaagatccacaccagttactctcctgtgtttgaggccacacttaacaccggtccagctacagagaggcagggagtcattccacgagcccaacacaactctacttgtttcagaaacttgagacttgaactcaagcaatgcttgtttatcagtctcctccgtcaatctgattgtttgtgcacagaccatatctgaatgttcaagtgacacagagacaagtaaagcagatacaagaatcagtctcataacaatacaaggaacccccatgggttggaaaagctttttttttcctaaacgaaacggagacaaaaaattctttcacaaccaggatgactgttgagattatgagcaaataaaaatctggcggctttggttccctatacaataatgaggaatatgtagtatagtagccttttagaaactcgcaaacaaagtaatgatattccaaaaccacggggcttgcagcctgcggtatgcagattattctcaatcctcgttgactattagggtcaaagtccaatagagcaatgacttattctcatgttgcctcattattcactgcttcatttcgcccaagtcaactatcagacgcttatcaaatactatatactttagttttaccaaggaaaacttgattaattaacactaatagcaacgaccattcttataaaaatgtagctgagggatgtttgtcaagttcttagcagtgaccatgacatcaacgatttcgatatacaccaacttgcttctatatatttctcagcaaaatacaataaaataaataattcgagagtatcttaatcatattcatatctagcagaagaaaaattcaaatctcactatatgatacagtaatttatacacaattctttgttcagttttttatagacaaagtcattaggaattgaaaggaaaatatttacagtttacctctttaatttgcatatgacaagaacagcaagcgttgcactaatccatccatatgacacgtacaaggagagccagagtcactcatccctgtagaacctgagtctgtaaccacaggtcaacacagccactaacaacaaaaggtataatgagatagcaaaaattctgtaaataaacgaaaaaggatataacgacttctttcattccaaacggaaaaatcaacaagtctcaggtgtcacaacaaacatagaatccccgttacagaatgaagcagtttatataaccacaggtaactctcttggaaagaacaaaggtcatttccacagacactagctaaaactgaaaaccattgagtatgcataccactatctacccctttaacgacggcgatcttcccttcttaatgaatccctatctttttcctccctgtcgttacgatctcttctagattctgccttccttttctcccaatcttgtgctctggatcccttgtcctcccttacataatcaatttcatcattgtgccttctagaatacgcattatcataccgtcctgatctcttttgttccttcatatcataagcatctcttgaccttggccccatatcctccctatccactctttctctctctttagggcggccatacgaggcatctccatcaccccttcctctgtaacttttctcttccacatcaggtttgaaatctcctcgattgccaaaacttgtaccaccctttttagcaccatttaacttgtcttgatcccacttggaacttctatcctcttcatgaccccaaccagtagttgcagctctctgtccattaaaaaaggtttcaagaaaataaatgagataaacagtatgttataacttctatcaagtatttattcaaaatcatctctcgaaagaatagattactcgcttacatactttttcatcatgtgaaaatttacaagaatcaccacgagtacactctcctctctgaaaagctctgcaaacaccacgaccctctctattcttgtcatgatcccacttggaacttctatcctcttcatgaccccaaccagtatttgcagctctctgtccataaaaaaaaagggttaacttctatcaagcattcatcaaaatcatctgttgaaaagaataaagtacaaaatcacgcttacttactttttcatcgtgggaaaatttgcaagaatcaccacgagtacactctcctctctgaaaagctctgcatacaccacgagcctctctattctggcgtcgcgtctcttcatcctcctcttcgtgctttttgtatgccccacaatggtccaccttaatggtccgtcccaacacaagagctccattcagattatctacaatcaccaaaaacagaacccaattacaaatcctaacacctaaaaaaaaagtaaatttcacatgtacaagagtcagtttcactaaccaacagcaagaatggtacttctctgatcttcataagcaagaaaagcaaaacctttagatttacccgttcccttgtctcgaataagattgacatcaacaatttcaccatatctgcaattccacaaaacaaaaagacattaaacctataaacccattaaaaaaattgaaactttagaaacgaaacacaacacttactgagagaagacggcgagaagatcaccttcggtgagatcgaacggtatgcctccgacgtagacatatgcagagtttttgtacttagcgtgccatgaagcttcatcagatattcctaaatctgattccctagcgtttatcttctgtagattcttcacctgcgtcaatggattcatcttttcaaatttctctgcgttcgttgccgggaggaaccctaaaactaggaaatgagagattagcctgagcgggtcgggttttaatgacccgtttcctaattagattaaccgacccggattgaggcccatttattctattccctttctagaataaatgtctaatattatttttacatcttctacgtgaattcgggtatccgttcgggttcagttctttttttcggatacccgttcagattcggttcttttttcgggtatcggatctatttgggtaggagattgagaaccattcgggtattcttaaatttcggttcggtttcgattcgggtcggttcggttattttagtaaaaatgtaaaaatgaccaaaaatatccaaaatattttcaggttcgggttaggttcgggttttttctcatatatacccaaatctatccgaaatacccgattacccgtaaatatattggttactttttatccaaatataaccaaatgtaacaaaaatacttaaattatctaaaaaaaactataacattggttacttttatcccaaatatatctaaatgtatatgaattactaaaaatatctagtatattcggatttataattttaatttttggtgtttgaggtattacaaatatatatataactaatatttttaggtttatatttgtattcgggtatctacgggtattagattaggtccgggttcggttcgggttttttcgggtagtgaagtgtaggatccattcaggtaattctaaaattgagttcgggttcagttcgattatttttcgggtttttcggttcgggtatttggttccggttattatggccaggcctagcgaatatgttcaattttgatatataaagaaaaattctaaaactccaattaggttaagttaggtttcgctagaatagcctttgaaacgtttgaagaagacaatgaagttgtgtttacggctattgtgcatccaccaaaagaaatttttggctaagaaaagggaagcgaaaaaggttaaagcgaagaaactcgatcctctatccggcaccgatttacattcctctcgatcttcagatctatacacttttaagattgcctgtgaagtctttattgagattccggtgcgcctccaagctttggtcctctatcaccaccagccaatatttcaaaaaacagcacttgaacattacatcttcctcagctcctccacgtcttctcattgcttttcaggactttcacggtaaaaagcttatgttagtctcgtcgcctaacccatacgtatcttcctcttcctcttcctcttcttcatgttgtgtaccttataaagatctgaacgtctttaaaattaatgggaaactagtgtataatgcggttcggggcttgatctgcataagtagactaagtatggggatttgtaaccctagcacaaggcagcttcagttttttccccaactcaagtacaaagaagatccaaaactttttacatgccccaattattttgttgggtacgattctattgaagatcaatacaaagtgctcgcaattgatcgttttcatttgagaatggagcacaagattctgttattgggaagagaagaagcttggagagaggctccatgtgttgcatgtcctcatgtttctcatacctcggggctctatatgaacggtaccctgtactacggggcgtctaggacggatatcgatccctggaataacaattctgtaattgtgagtttcgatgttaggcttgaaacgttcaaaatcatcaatgtaccaagcaaagttctaccaatgggttatgaaaatatgtggcttgctgagaggtggaggaatcttacagataaaactctgatcaactacaaaggaaaaatcggtgtggttgagaatgctcgtcaaggtagttttcgaatgtgggttgtggaagatgctgagaaagaggaatggtctatgaacactttttatttgccccaatctgctgctggccttgacttcaacatcatggataccttttataccggcgagatttgtcaggttccgaaagaattgtcagatcctttttcgtctattatggtcttatgagaatatgcacaatactaatatgtagatgtgtacgaataaaacttcgatcaactagggagaaaaatttggtggggttgagaatcctcataaggttttcgaaggtgggttgtggaagatgctgagaaagagggatggtccatcaacacttttcatttgcctaaatctgcttttttccttgacttcgacgtcacgtacggatacctttgatgctgcaacagcctcaatggtttttttttgttgacacaatggtttcttcttcagttcttgacacaaatgttaaagaagatgacgatgaaaggataatgaatctgtgaaagatgattagtaattatctgtcatagttctcttaaaagtgttcttaagtcttagtacatctaccttctgtcttttttttttttttaattgaatgtaaaattaattcaaaaccataaaaataaaaaactgtttttacatcaagtgctgcaactaccttctgtcatggttctttttctaattgtatccttgttaagttttcatttgtttccgaatcttgagattgtagttgatgatcatataaattatagaactgaacaaagttagaccaaatctataaatgttatagtcaacagtaaactcgaatccgtgagtgcagttccaagccttttagctctagatttggaggagaattgaatggtctgttctggaatgatcttctgtcatgtttgtttgaatatttatccaagacacacacaaaaaaattgtttgtttgcattcactttttgtttgttgggttgattttttaaaattcaacaatccatgatgatctaatgttctagacctatcattttggtaaatctataccactaaaaaattcatagttttatattttaaattagtacttgataaataaccgtaaaagtaatgaaaaaattatgtttgaaaatataatgattgaatataacttaatatatattgataactaccttgtttttgagttattatttgaaaaatacactttctttattttttaacaaatattacaacttttaatatataaaataacagttttgtccagatttaaaacaaaaactgttttcttaataaattaaaaaaaaaaaaaatttagaaaaaataaaataagataaagtcattagcttgtttatttttcaaatatttttgagataaaaacagtttattatttttatattaaaattttacaaaatgatatctaaaatattgtttagtctatcacttaataaagtttatttatttatttgtttggacgaattttatttaaaaatatttaagataagaattatctttaaaaattttagttgcatcaacttttaatttatggatttctttttattttaagttcaaaatatttttaactattgctaaattttagtgaggctatttaattatttatatattaaaattttaaatttaaaaaaagaaaaaaggatagggtatttttcaaatgaaaactcataaagaagttattttccaaatttactctaaagacaatttcttaaagatgaatttcaccaaatcaacatcataatttaatttaaatttcatgaagaaaagtatatattgtaaaagttctattattttgattccatttataaaaaaaaaacaaaatctgttaaatattgatgatgattttgttttaaattattcttaaataaaatctataaaatcaattctttttgttaacactataaaatcaattcttgtgatatttttcttaagacttttatatttccattgccatttatttcccctttttccttattcatattgtttcttccggaggaaaaaaaaaatagttttagggttttgtagagaaacaaggcttctgtccgattttgacagcaatctagccgatgaaaccgatttacattcctctttatctccagattaatatactcttaagattacctgtgaaatctttattgagattttgatgcgtctccaagctttggtcaactatcatcaccagccaagatttcggaaaacagcactttaatattacttcttcctcagctcctcttcgtctcctcattgcttttgaggacttttacggaggaaatcttctgttagtcttgtcgcctaaccgaaacatattttcctcttcctcttcatgttgtgtaccgtactgagatttgagcctactcaaaattaaaggtaaaatggtgtataatacggatcggggtttgatctgcgttggaggtttttcaaatgttgcgatctgtaatcccagcacgagacaactgcatatttttcccgaattcaaattcaaaaaaagtccaaaagtttttccacgcccccagtacatgccgttgatactcttccttggagattagagcacaaggttattgtattgggaggagaagaagcttggagagagacttcgtgtatcgcctttcctcatattggctatacccaggggatgtgtatgaacggtaccctctactacggagctgcctggaaggacactcattccccggatagtaattctataattgtgagttttgatgttaggcttgaaacgttcaacatcatcaatgtaccaagcaaacttctaccagtggattatgagaatatgtgggtagttaagacgttgattcctacagataaaactctgatcaactacaaaggaaaagttagtgtggttgagcatcctcgtgagggtgcttttcgaatgtgggttgtagaagatgttgagaaagaggaatggtccatgaacacgtttcatttgcatgaatctgttgttggccttgacttcaaggtcatgaataccttttatactggcgagatttgtctggttccaaaagtattgttgacaagtattgttgacgatcacttttgtcttttctattacaatttggagaggaaaagcatgagaagtgtcacaattgaaggactgcctatacccgagcttaagcgactccgtaatgacctgtgactgtttctgatcatcatgagagcttcatgttcttagaaaccgaaagttaattttggcttttctttatatatatggttttttctggtaatcagggtgtgataccgcttttaccacttattagttcttctacggtgagtgtagccatctagtagctcactgaccgggttttctaatgggtagaaagcattgtatcccttcgaataaatcaaagataataatttcattgaacttggtttattatatatgagaacattagggcatctccatcagtcggatactttctgagtttctcaaaaaaaaaaagtattttaataaatattagttttataattaaatttttaattataaaataaaatttaaccaatagttgatatacatttgtttttatggatttcaagtgataaatgagtttctcatagtttctcactttagagactttctccattcacttagactaccagttgtattgacaactttccatcttgttgacttatggtggtgggatgcttgtgtacttaaattcagttcggtctaattcctcactttcgtttgaatcttctcttaagcatgtttgatataaatatttgaaaacatatataaaccaaaaaattatatatttgttctgactttaatacacaagtcagagaagtaaagagaaatacaatatatggaaaatatttctactacaagaacacttccaaattccaatgagggaagggtttgctagggttttcctttgattatttatagggttttgtagagaaacaaatcaatcttaaaaagaagacaatgaaatttggtccgaatacgacacagatttacattcctctcgacctccagattaatatactcttaagattacctgtcaagtctttattgagatttcgatgtgtctccaagctttggtgttctattatcaccagccacgattttcgaaaccgtcactttaatatcacttcttcttcagctcctcctcgtcttctcattgcttttcaggacttttacggagaaaagcttctgctagtttcgtcgcctaacccaaacgtatcttcctcttccacttcttcatgttgtgtaccctataaagatctgagtaaagtcgaaataaatggacgaaaggtttataatgcggtttggggattgacttgctttgaaagtagattaaaggttgggatttgtaaccccagcacgagggagctgcatatgtttccccaaatcaaattcaaaaattatccagacatttttccatgcatcatgtactttcttgggtacgatcgtattgaagatcaatacaaagtgctcgccattgataatttaccttggagattggagtacaaagttgtggtattgggagaagaagaagaagcttggaaagaggctccatgtgttgcatgtcctcatcttgctaatacaatggggcttaatatgaatggaagcctatactacgggcctcgaggaaggacaagggttctccaaatatatctataattgtgagttttgatgttaggtctgaaacgtacaaaaactccaatgtaccaagcaaacttctaccaatggacacttctgataatttttggactgctaattgcaattgttttattggggataaaactctgatcaactacaacggtaaaattggtgtggttgagaaacctcaacatggtagatttcgaatgtgggttgttgaagatgctgagaaagaggaatggtctatgaacactttttatttgccccaatctgcttctggccttgacttcaaggtcatgaataccttttataccggcgagatctgtctagttacagaaaaaatatctgatccgttttgtctcttctattacaatttgaagacaaatagcatgagaagtgtcacgtatgaaggactactacatatggccacgtttaagcaagcgttgcaattcagtgtatcatatcattatgagagcttggtgtccttagaaacttgaattgaattttagggtttttctttatatttattttgggaagcaccaagattcaagcatttccagcttaaaatcatggttttgagtatatttaaggaagttccaagatggcatcatgcatggtcgattagtgggggaagtccttttcagcttaaattcatggtttgagcaaagattttgtatactttaagagaacttttagctgaaacaataacagattgtagatttgtgagtgaaagccatttcttgaagaagaggttattaaattcagacatgaatgtacaacagaaataagagtttttgggaaccaaaagccaaatgcagataaaaagaaaagcaagtagaaatggacttccccaagaaatagttacactatattacttactactactctaaaacattatatacatatacattcagataaaagtttaccagacccggtttcggcttttgccaaagctcttctccgtcttatttacttgacatggcaatcataaggagaagaagcaaacacttgatctggaaccactagaggtagcttctctatatacacaaacaacctcttcttattctcccgctcaattgtatacatattaaccgtatcggatttctccattaacatccataagtcccctgagtttactctcttaagactgtctcggcaaaaagggcatgattctgacctcccgtgcctgcaagaaatcatcggttattactgattcatcgatattatacgaaaaaataatgcagaaatgacttaccaatcgcggtaacacttgatgcataaagaatgcgtacaattagggagaaccaccatgttgttcatctccatacaaatcccgcattcttcttctctctcgatgtcaatctccgagagcttgaccttttcagtctcatctttatttctgtaccgtattttgcagacttctttctgtttacgatcatccaggtctgtgatacctctttctagttgtaacaacgacggaaatatcacagctgtttttcacaacacgggcaaaaccgataaggattaaggataacaacaatcaacttgttaccaaaacacttgaatctgcacattaccatagaaatctttaatacttgtttttctctcataaaccgacattgtggttttcccatccgcataggtctgattccattgaacggattaatcaaacaaacacacaagaaaaagcagtagaagaataaggaagtgagaagttgtaacgtaccatgtaaatcagaactctgagcagaccgagtgtaccagcaagatggcaatcagtccattgtacaagaaaaagtaaaaactgagcagctggagtgtacgatagcctcatttgaacacgcgctccatccttctcccgaggataatctaaagctctgttaattcacagaggagaaacaagtgacaatgttcataagcaccataacaacatcacttgatgaaaaaacacaaacataacaaaattcatcattcaatgtattgaacgaatcacagagattataaacaacagaagcaattgatcaatgcaccattgagatgcatggaagtgaggaacttaaagatagcatcacaagtacacctcttgatcattgcagaaacacattttcagcttcaaagatcaaagtttgatttaatcaagcatcctcatatgtctaaattgattaagaaactcaccaaaacattcaccttttagacatagaacttcctaactcaactagattaccatcagaaatcaaatcaaataaaggttttagctttcaaatatttgatcatttcagacaaacacagtttcctctgagatcatcaagccaaagactttgttcagcttcaagagtcaacactcaaactaggacaagactacctaaaaatgacttcatcacccaattcgttggacaagacctacaatttcagaaaacccacttaaaccaaaaagatagattttttccacccagaaagaaataaaaatcgtaactttagataacaaaaacagagaaaactccaaaatgaacaaagaaaaaaggaatcaaatttgagaggcttacacagtgttagcgtgttgaatatcagcttcaagagctttcagagaatccttaaacgaaacttttgccatttaaaatctaattctcatcaaacgaacagaggaatcaaagagtattaaagcgagaagaagaaagaagaagaagatagaagaagcaaagaaaacaaagtttgatgcttttccttttagcaattagatagaaaagatatttcttcacccaaattcgatgatcagagatgagagagaagaatggtattttcgtaaattcgggtatgagacaatggtattttagtaactttgcatatggagataaacttcagttacgattctcgaagaagctttatcgagaaaagacgcggaagtgggttacaagattgaccattttgccctttgttcggctaatgttagagagagagatataaaaatcttgtcgggagttatcttctgtttatggcgtaggtgtctgatttgtgcattgcaatagtgttttgacacgtggaggataaggattaaatatctgcttgattaggcttaacaatcatttgtcatctctttaattatgaaaagtcaatcacccacttgttgttttgttttgtggtattatcattgaatacattactagaaaacagattctggatagatgacaaatgaaacaaattgatatataagaaaacaataaaggaaaatattatttttaatactgatttcatcaagatattagattttataattcaactagattattaattatacatatttaatatctatattgtacttcttaactgttgacaatataattttaatataaatttgcaaataatatttttgtttactaagaattttctttaaacaatgttaaaagtttggagaaatgtatgatttcataacactattttttcaattatattatatatttttatattatatatattttttttatcagattatatatttattgttaagtttgaaaagtaacagtaaatccctaatttataataagttattttctacgcaaacaaattaaaaaaaggaaaacttatgagaacaagtgaaaaaataaagatagagaaataattgatatcaatttttttgctccaagttttttcaatttaacaatttgcagattttggtatacttttttttttttttttttcgcggattttggtatactaagactgtgaatggtgacatagaccgcacccaaaatcgcaccgcaacagtgctgtaacagtatcaaaatctctacatatatatatatatatatgtatctgttataaccagagaaagagatagaagaaatgagtgtgttttccattgagaaaatggttctataggagtataaggaaaaggtaaaaccctacaaacatctagatgatgggcttagatgatgggtcttataatgggcatccatctttattcataacactcccccttgatgaccattatagtaccataactcgtaaagtatttgaaatgctgcctcattaaaaaccttaccaggaaaacctaatgggaaaaaccttggttaagggaaaaagagtgcaacatacaattactcccccttatgagtatattcgtcgagatctttgagacggcgtaatccgatacgatagactaacttcttgaaagtagcagtaggtagcgccttggtgaataagtcagccagattatcattcgaacggatctgtagaactcgtacatcgccgctcttttgtagatcgtgtgtgtagaagaattttggtaggatgtgctttgttctatcgcctttgatgtatccgtctttgagttgtgcgatgcatgctgcattgtcttcgtacataattgttggagtttttttccctgcatacataccacagtcttcttgtatatggtgaactatggatcttagccatacacactcgcggctagcttcatgaattagtaaaatctctgcatgattagaagatgtggcagagaataaacagtatttgagaataagtctgccaaatcttctcttgaacaaatttctaataaagtacaacgccattcttctgctcatgaatcttttagatgattcatcttaaccatcttatttatttctctaaatatcattagtgtataatattcatttggatgattgatagaatttcttaatattcatcaagtgtattatttgcgtgttctttaatgtctcgttaaaaatcttgtcatagaaaaatcatgtgggataaaaactatgataaggaaaaagggtacatccacgcatatcattcaatctccccctcggaaacatcttcttcaggagatgattttcaatcaaatacaatatctcgttgaaattaataaccataatcttaatgatcaaaattatatggttttcatatagacttataaatatcattatctactgatattttatcatagattattgtcatcgtattacttatataactctgtacgagttttaatgattttcaaaacaaatattagtttgatcaatatattttgacaaactcaacataaatatacatttatatgattatatgtcatgttacatatttctttttattcgatcgagtagagttgtagagaacataattctcatataattaatccttcagagattatatctttcaagaatttcatataaatgtcatatccagtgttccatctcttattgtcagactttagatacttaaaaatattacatccaccacaagagaatatatttcttcataatacatttcttatctttgtgaaaatctcattaatttcactattctttcacataaagactcatttattttccactggttttacacatcatgtgcatagactactagtccaaatatctctactagagattataattatatgtctatttcttcttttccatttttggctaatcattactttgtgtccacttttcaatagactttctttcatgatcctcctttttgtccataatatcaactgctcatagcatgcaattatattacgacgttgatttgcttttgattccattatattttgacatgacatagctagctagatctcttcattgtcaagtacttgaatgtttcatttgtcatgtttatgtctcttttagagatcattcactctcttcaagatatcatcaaaatatttatttcctcaatttggtcatttttaattttgtgctccttcacttttacgaggatgtttatatttggaaccaaggctattacgcttcatgcgatcttaagactcaatagcagtttgaaattggtccttacaggacattcattatattctggagcatttaatttacaactggtataggtgacttcatcactttatttgggtcagcaaatgcctctggcaattacaacgctaaattctgtaattgaattatcttttggactcttaatatacattctttactccgaggatcattgataattcatttctttttatctttttttcaccagctgtatacattctcccccttatgttggaatatctgactatataatatgatagtcttcaaaacgagcggtatataaatccttctaggatggcttagttatcattcatatccaacatgtatccttatcctcctttgagggttcatctcagcgtgccgtggtggagcacttttcacattcaaagattttagatgaaaactatttggtttctgacccaaaaccaataatgatggggaaaactattaattattcattgacttgatgcatatcgatattactaaactattttgtgtatgaaaatgaatttcaaaatgttaaacacttatcccaacggatatccaataatggttacaataaataaacactgaaatactcttgtattttaatcaagaaagtaacctcgcaaactctatattgcgggtttataacaaggataaatatgaccttctagtcgatgcaacaatcgagtcaatgtgtccattgaatcgatgcatcttttatagccattaggtatctaaatgtcatatagtgggtgattaacccataatcatctccttgtatatacttacgaatagataaagtccaaattattttgactggtaaaaatcacattatcatattgctttctgagcaagtaacaattgataaatcattagggagaatcttctggtttttcacctaatgtccacataattctcaatactttcgcatcatcaataaaccaggatgaccaatccggttaagccaaatatactcttgaaatttctaggttttttttgtttttttttttttaacttcggatttacttttcattgcttatcagttactctcttaatgagatcttataatcaaaattacttccatgtattttaataatcaatcatatgttaataaagcaataaacgagacaataattaaaattttatattctaatataaacgatattaaatgtaatttgactagctatataagatcttatattcacttaagaatatgagtattacttatcatcaataactcatatattttcttagcctttgaaaaacactcgatttaagttcataatagttcttaaatttctttcaaaatattgtgtttacaagacaacaatacttgcgtaaaagtttaagcgtctgttttaccatctccgcatcagagatattctcttaacaatgtgagttatattcacaaagagacttcaagtcttgaagttttagtaataactaattataacttattttatctaataacacattcatataagaattgctttatacaacttttagatctttagtagtcaaagattgaacataatcttctcgatatgtcacttattatctattcattacttctcctcctcgaaatgatgaaacttcaagttcatccatctcgtattgaattccactctagaagcaaatgtattttatatctcatcatattaactttgagatttggagaactataccgcatcgatgatcttaattttgtattcccatagaaaacaatgtatatgctcttctagagtcttttaataagattttatactacttgatatactagattatttcatcgttatatttattttttacttttggtgataatttaagttcttgaaaaaactttgaccatcaaaattatgatgtcttcttaagatacattaaactagtcattcataaaaatttctataagtgattatacctttaaattaagttatttatcaatcaatttatttcataaaataatcaagtattatataacaatacaattttaatgcaatattgtaaaaccaatcagaataaaactattttgtgaaaaatccggattttacatatatcttgataaaacttttatttagggtaatatgaattcgtgcaagatttgggtaaaatgatttcgtgcaaaattagggtaaaaccatgaacaattttgtttttttttttttgtttttttttagataccacaaagatttagaaaaaagaatcttataaaaaaaaaattatcttgcaacgtttttagtaaaaataataataacacaatcaaatatatggaaatcttataaaaagatttagataataataacacaaagatttagatatatggaatcttataaaaagaaaaattattttgcaacgattttagtaaaaataataataacacaatcaaatatatggaaatcaaatatttaatatggaaaagtcaatatctaaaagtgataagatatgtataacgttttaatcaaaggagttaaataagggatatcatatcaatcataaatggattttagacaatataatatttataaaatgatattgaatatagatgcaactattcaaaactggaatgctaaaacattaatacatgcttgcatcacccaccaccgggctatgaatagttacaaaattagttatataattataaaattggtaatttatatattcaatattgtaatagtaaatcacaaaaattaacaattaacaagcatgattctcttctttaacgattttctttgtagaatcattgaatcatgcgatagtaattatagaaacaaatgataagcatgattctcttctttattgaatcattgaaaacatgcttttaccgatctatactataatcatcgatcggttcatattgttttgtttcaataatagaaaataagtactatgaaccatgagtcgataagtaaacatggttcttaaaaaaatgtaagaatctctatatctatcttttagagcgtgctgataacgtgttataaccagagaaagagatagaagaaatgagtgtgttattccattgagaaaagggttctttatataggagtacaaggaaaaggtaaaaccctacaaacatctagatggacttagatgatgggtcttataatgggcatccatctttattcataacagtatctatgtatttttgttactatttgaaccgcaccgcacttctcccgcaccgcaaaacgcagtcaccattcggaccctaaaccttcaaaatctgcattgtttagagcgttaatttttgacaaaaaaaaattgctaaacttaatttgttaattaagtctaatgaacaagagttttgtggtcgatctatttaattcatgtgaaataaatgtacgcaatgaactaacccacaatctctattttttggatctctagtctaatcttgagagagtggttgctcaattcgcagattttcggatattatccctaacaaacaaatggttgacaaaaaaaaaaaaagtgaatttctttcaatctctttgaacacaaaagagtcaattgttacaaaataaatgcaaaaaccaaattgttttcttcttaaatccaaaataagccaagcatatcatggaaccaatgataataatacaagctagaatcatattcttatgagcttggaatcatgaactagcatcgtttcacggatggagtactgcatctatctcttccttgaacttggccatcgcgtccctaggtagtgttgtcagcacccgaacaccaccgctcttccccggaaccgcttttgacgctggtaacaaaacacacaaaaagggcagtgtcagaggaaccaaaggtataatgttcactaaacctccccaaacgtcttgatccaacccaagatgacgccaatcagtcagcatcatgaaaactcctccgtggatctccttggaagctaacttcagcttcattgtattctccatctctctaagttgctcacacacgtatccattatcaagcgccgctctcttcgcgtcttttatgagcctcacaaggcgagatatcggtgttttgcttagctctttcgctgtcaatgccacggaagcatgagtgaaggcatttccatagtagccttcaggtaatggaggctcgatagagctgcggatgctgacggatataaccaaatccgtaatcgtgtcgggatttagcttcatggctcgacatcttgctctccaaacgtaggccgcaagaacctccacggtcgtgatcttcatgttcttctccttctcattggtaaggttctcatcttcgataattatgttcttgagtttagtgatgtcttcggatgtaatgttcagaatttcacggaccatgtcttccgttggtgtatcgggcgaagaacaatctttctccacatcaacgagttttggattatttttgtcgttcccgagcttgcctaaaatcacgacgtgttaaaattttcacatggataaacgtaatatagatccattttcataatatatactgtattgatcaatgatctcattattcaaaattggaccaaactaaaatcaaatatttaagaaaacaaacaaaaaacgatcccacacatagaacgaacaaatattcgcaaataattatatattttctgatatgctgaaaaagattttgtagaaattatatgtgtatgataaaatggaaattgcatgtatatatgtaaattatgtgtatactagattaggacccacccaaagggggttttaaaatttttaaattaaattaacgatacttttgaaaactatattttatataataaaaaattaaccctaacgtgtaaaagaattaagtgagatagttgtgttaatttcttacatagagtactaatttggttagaagtgatcatgtgtctgtcccagacggggatgaccgtgggttgggctcttccggcggccagttcaagtatggcttgagaaaactgagccatgccaataccatcacaaacggtgtgagaatgaacagagccaatagtcattcctccacatgtgaacttagtgatctgtagagcaagaggcctatacccaagattacaacctttcaaagtgtcgtgtgaaggaacaagttggtatgttgcttccaagtgattaccactctccaagtaattgagagaagagagagtgcacgaggccgttgcctttatcaaggggactccatcgccttgcgtacaatctaattggagtgtctggtcgctcgtccgtcggtgaagttttccggcgagagggtaataatatacaagggcattagagagggcgagttgaataaaagaagccggatggtagttggtgtgatctcgaacgtatgggtttggggagaagacgcataggatgtccaggattacttcgttgttaggatcgttgtcaatggtagagagagacaaagtgacatcaggtgttggctttgagggtttcacaagaaccacttctgacttctcaacgacaaagggacatgaattgtcgcttcttggcattgtgtgttgtgtgtgtaaatgagtagtgctcttatcatagcttattcttatataatcatttcgaaaattctcccattttccgagtgggtttatttaacgaaagtagagtgaagatttataatcaatattgctaagtaatactaatatttattagtaagccgcttgatgtttagtgctctccctatcattacccgagcaagacttaatcagtatttggtgagtttatttaacgatggttgtaacatttaataacaaaattgctaagtaagactcatattagtaagccacttggtgcctaatgctctgccactaattcatttctcttcacgagcacgacctaatcagtatttactgggctccaaattttcctttctcttgattcggggtggttcttttttattttgccatgttggcttcgtggctttaaaatgagacggttttataatacaaacatttggcaagatatatataaactagaaaaagactcacccgatgcatggaaataatagaaaaatattgaaaaggggcgcctataaaggttggcctctgaatatcgtttataaaaatctatgttataagagaaaattgttctaaaaatttgattgctacaactgcatttttataagagaaaataatagttttccgataaggtgagattttcaagcatttaattgacgtctaatctaataatccgagattttgaaccatttttacgcaatgttcatgcacaaccgacttgtaatatatgtagacaatgttcattccgattgtctcatttgatccaaccttttcatgtaaaaaattttggtaaaaaaccgatcgtctgttagtataagtgatgatttaaatgcattaaaagaatcatagatagaataaaagggaggtttagagaaaaaatcattctaaagcaatgatccaatatatattcgtattattttattcttaaataataaaaggtcatctaaaatccatcaaatcacggggtatatccttcaaataacccctcacattgtttgtggttctgcaagccccttttaaaagcttttacagcaggcgtgggtttgatcttaaataatgcaatttcttgcaaattaatgacagaacttattggaagtttagagtcccacatacagaatcatttattgtggtctcgtgtgttgcggagagaacatgtccatcatagaaatatcatacatgcataaccattcttcgtattgcatggaaaagtgcatcgtggaatcattatttgtgggaattattagttgcaatctgattgaacatcatcaaagtggaataattgttttttttcctgtgaagaaagatataatatacttttgtgcgtacagaaagatccttcaaatcagaaaatgtactcgtgaaccatcaaattggcgaaataggtctccctacaaaattctacgacctttgtggcgtgttggttgtatgccctataactcctgaaattcctaatcaaaatatacaatttgagatatatattcttacacttttgcatagaaaatttctgattttaagagactaactctttcttttttttttaagtgtgaaagatgacaaggttgctataattttaactgaagactctaaagagccaacagtaacaatgtgcgtctccttcgatttgtctttgcttcattaagttggccggtgaaaatatgttttcaagtctttatctatatgtcgctcactaccctttcattatgtgtaacaaataaaataaaatccttaacggatatccatttatatctgtcaaaaatcgatttcatcaatggcattagagacttttcaagtctgggtgggtattcttgtgcatatttacttcgcatatcttatcttgtgaatttctaattcaatattttatattattcatttaaatttctttgttgtgttaaaaaatatgtgagatatgtatttacttttttttttatttcttaattaaatttctttgttgttaatatttcttaattaaactgtagtattctaagatcttttattttaatttatataattagttctggattatgtaagattcatatatcaccgtgcctcttgttttacgtatatatctttgattccttaaacttaataaataaaaatatgtaatgtttataaccaaaatgtaagtttattttctaaattcttcaattttcttttctggttaatttgttataagaatgagtatatttactaagtctcaatagctcaactagtaaaataccccatgcaaaacctagaggtcgtaggtttaatcccccaaaaaagttaataaactaattaatgataattaaaatatttataccattacatttcaactgacagatggttcagaacaacaaatgggacaaatcttctttgtctcaagccatttggttatacactcagagtggtatggatggtcacaaggtcggagaacgaccaaagattctctttcttcaaactccatttggcaaactacacaacgatcaatctcgtttttgttatgtgaaaatacgtatgtagatgcgttcaaacacgtagagatttcaataggagttagcccacggttttcgactccgatgaaatctccaagcgcaatcagttcctcgtaagacaattggtcgggatcaatctcatcttcttcctccaagaaatcatcctcctcctcaaggttggaattgctttcttgatcttcaagaaactcattgatttcgtcttcatctactccaaatccattgctatcgaaatactcgtagtagttctcattgatttcttcttcatcttcagattcttcgtcactttctatcattgaaatcattgagggagacgaatcatgcatagcatgggcaaaatgggaattagcttgggaggcagcaagagcaacttcagaatttgcttgctcaaagagggctagatcgggaagtttgtttggaggttgcttaggctcttcttcttggttatccattagagaagaataagtagattgtgttatggttaggaagccgagctccggaattttatatgaaaatggctttcatgtcagagaggttacttaagcaacaagaaatgaatattgtggacagcttccgtacaaagtaatacaaaagaaacatgcggaagttagggtatcctttttcgctattataagcaaatattgcataagttttaaatttgccaatcaggtatgcattttcccttaactttgggtttgcgaagaaagaaaagtcatatcttggacgatatgctgcatctacctaaaaagcatttctgagaatgcatgacatattcctctatatatatagaaattcacttgtgtataaccagcctaatagacaatcacattaaacttttgttctgactaaatcgcttgtactatatattattatttatttttgtgcaaaatactatatattacttataatctataaagattaaaacaatataatttggttttggtggtatcgaacaagattattagaggaaaaagtatatattcagtttattcttctcctccttagtaattttatgtggaaagcttttttctttatataaatttcatctcttctaactaatgcaaaactagctgatcacaaaccaaaaaataataataatgtaaaactagcttagaattgtattttacattttcaacctatttcgtaaaaattgagaagtattttttttttttgtgaatttgttcatcttaagatttaaccacttgtttgttgcctaggttgatggaagtttttttttttggttgtggggataagctttgaacttatttccatggctgagaaatggtgcaaatgtttgaggatccaaagtctaatgttagagcttattttcgtcttcttttaaggcactaagtttctttgtatttatcatttaacttgtatataaaagtttaatacacaaataaaccttgcaaatacaaaagttttgccatgcaaatataagtattttttaggatacaaagaaaaagcaaattgtaaatatacatattcggagaaaataagagaatacaagactaggggttgctcaggaacctagaaaggccgactttgctaccatgggtctcaacatcaagcttaacttgagcttcaaactccgagaatttgaatggcttatagcgagtagagttaaacatacagtctttgtccgggaacacaaagttaactatcgagtatctctctttcttcctcatcctctttcctactttatgcaacacactcttgtattcctcatcacttatcacctgtatcatatgattttttattgatttatctcatatgaaatatatcttaacatgcatggaacgttagttacttaattacctgcatcatatccccaagaccgacgacaaaagaactggcaagaggtttgacattgaaccattccccatctttcatgaactctagcccaccaacatcgtcttggtttatgatcgatatcaccgaactgtccgtatgagcttcgagtccgggggattcggtacactgaggataccgttgaacacgtatcacacctgttgactctgataagtagcccattttttggtcaccggataattcaagggacaaggtttctattatagcttcaaatagggtcacaataatcctagttacgtgcttcccatattcctccatcaccactctgcgtaactcatcacacaatgataattgataatattgtgagctatgagaccaaaagacaaaagaaatgaataatgggcgcaataacataatttatcctaaaactttactcattaatattcatgaaacgtcatttgtaaaactagtggtatatgtgctttcgacattaaattaagtttttatcgtctaatgattttgtagttttgtcactttttttcttcttcacattcgtagattatacgtaaaactcgtgactttacgtcggtgttatcatagatctagtcaccggccatctttaatcggagaagtgtagattaaaacaactttaagctataaaatttgaagctatctaatctgtgcaaaactagaatttcgatttgattaaattctttaaacccaccaatgaagtaagagttaagaattcagttaaacgacgccgtacgtaccggaaagactcaagcttgggatcagtacaagaaagtgcaagaagccgagagagagatgcaagaggaatattgatgccttcgaacaagtgaccactagattcttgtggggctctcgttacggcttttcccgatggacttaccgtatgtgttccccagtaatacgataacggagagttaacgccgaacaacgtccgtttctcttcaaacggcagactcaacactgactccgttatctctttcacctgtgacataaacgttaagggtatcccagtattctccaaatggaagatcccccagtctttgcatgcttctctcagtttctccatgtccaaatgctccatatcgataaccgggatatcgatatctttgctccggtctagacccgtttcagtggatttttcgctcattagaggtcgaaactctggtggataagactccgagttgctcatgttctcctttgaagtgcacccgttgtttctgatatctctctatctctcttgtgaataaggggtaatgcaaattgatattatctttctatagaaaatgaagcgttacaaacgaaaaatattgcatgtgtcaggtttatttagtaactgacgaccgagtactgttctgtaattttaggtttaattaaattttgttgtttatgtaagtgtttgataaattattcttttcatttttaggtcaattaatttcttttcatattttttttattgtgattaaattaaatttagaaatatatggtatgactttttcggatcataagtttggtaaagctattaagcatacatttagaggctagtgaactagcaacgaggatgcacatagcaactttgatggatagagagaggtagtgggatagctattgcttattgggcctctactggttgttgtcgcgacttctattattaggtcgaaactctggtggctaagcctaagactatgagttgctcatgctctcctttgaaatggactcattgtttctgctatctctctcttttgtgaataagaggtaatgcatctataaaaccatgatataaatttaaacaaaacgaagcgttactaaagagaaatatttatgagagttatttagttattgacgaccgagtcatcgttgtgtttgtgtatagtagtttcattttgaattaatttttctctctctccctctctctctctagaagtcatctatactattatttgagcaatgttaaaaataactttaacctggattgatgtgttagagattacatagaaggaaaaatcctactctgggtcaagttacccgacatagcttcgtttatcgacccatcccattcccagcccgcacggatctttccacctgtgaccaagccaccaaatataaggcccttgtatcacctgtgtaaaaggccaataactgaacaagcccaagcaatctttctaattaacttccataagtatagatgcaagtaatatttgattcaggtaagtcatggctataaatgtattgcttaatattgggatgtacatttgatatcattgtttatccttgaaaattcaactaatataactctttgtcacatgtcattggctttgtttgatagtcatggtctttcaaaaagagaagataaattaaaggataatatttttgaaatactcacttgacacgtttctaaatatgattggttagtttttcccttataatttcatatttaaataaatagttaaaagtaataaattaatatatttaagagatatccggacaacataacttttgccgatgaagatgctcttaccttttgtcgggtcaggcgtttacattttataaaggttaaattttttgatgatgatttctatttctagagagagttcatcaaaggaaaagatatcaacaagataatttctgcaaagtaacgataacatgcaaatatatgaaaaattcataaaaccatataggtagcaataacacaagataaactaaaagtcaatagacaacataatacaagaagtgaacctcaagctgatggtaaaacatatagatgcagaaacaatgaggtgtgtagaagagaagactgctcacatcttttgattttccctaaggaagacccaatggaggaggagctgcgtttccattacctttcttgtcgttcaggtaggaaagaatggcaacagttgactgtagcatggtaagaagaataacgaaaagaacagcacacgatgacagaaaagtccatggtgattcaaagtgtgtgtgcctaaagccagcccataatccattgtaccattttttggtgtactcgttcacgcccttaaacacattgtttaggtaacttgtatctacttcaaacacaacatctttactgatagttttgaagaactctgagacctcattattgctaccaaaatgattctctatgatgagcttgtcgtttctcaagaaagttacatcttcctcgttatttagaaggcatcccatgaagactatgtaggttgttatttcgttggaactgtcagtgtaaaactgttcaaaggcaacacagttgaggaagaatgagctgatgaacccatcaaatcttaactgtggtatctgaagcttgttcttctttaatcttacatttaatatggaatcttctttactccttcttagcctgaactttatcccttggaggcgaagtcttttggccgacaatatcaacggcaccgctttagaatctacggatggtacgtttccagatttaccctcatggagttgaacttgaacatgtggggatgatgctttgtcagattcactcgtgttaggtaagaaggtctcacggatgaggtcaagaagatgttttgccttgtagtttctgtgtttctcccaataactgccttctttatctattggatttttaaagaagtgaaacgctatcctgtttagatcactagagacaccaatcttggatccaacatacaaagtttgaagaacaaaaaaagggacctgattttccaacagtagaagatcactctgaatagacgagagaagccaggggatcgaaaagattggatcctcactcaattctatgtttcccgacatgatcagaaaaaccatgaggatgaagcacccatccaaaaccatcataaacattaagtcatgtcctgtcttaagttcctcagaataagatttccttatcttatcttccaaatcaactacagccttaaccaagacattttcctccacgtccttcttttttgcctcgtctaggaaaagctgtagaagccgaggcttgtgctgttgaatcatttggaggtgcttttcaccgtaatggtaaggaccaatggaaacaactttgggcttataggctttgggattcaatgctacgaagctctcagggactctaaagatgcaacaagattccttaccagctgattccaagagaagcactggttccttacttcctgaggataagtagtttctgaaagcagatggtggtggtggagaagctttatcggaagatgatgaaattatatccgtcttgtctgccatgattttgttccactacgatcctcctttcctaggttcaaagaaaaggtcgtcggattcaagttataaaaataaatcgagatattgattcgagaaaaatagagcgaaaatcttactgttgttgtgagtgttagttgaaccgtgagttcttcttctgccttactcttgcctcttagaggcaggtgagggttcattctccttttttttctttgtttttatttttttgtcttattttttctaatgggtaatttaattagtagtctaattagaatggtaatagatataatgtttaggaatttttttgttcgtgggtcttaccactgaggcaggtcttcttaaataagtaaaccaatacacgttataaaactcggaaaatatgaaggttttgatgtttttcaacgactttccaaagtgcaaagtatttataaaaaaccatcgttatgatatatggcgtggaaaatttagagagagtaagaaaaaaaaaacatgagaaaataaagtattgtgacaaaagttcgggaaaagatatctgcgatgtatttgggaatttatgaaacaagttaaagtggaagaaatagaaaatggctgttttaaaagaaacatgagtcgaagtagtcggcaaagtaactagaaaatggtcggactaggaagttgtcgcaaaggttttgagacaaaaaagtctcgagaacaaagattagcttttacaaatcacatgtgttaatttaagaaatttacgagttaaccaatgaatagaatttagctatatgttagaagaacatctaaattaacgttatttactgggttaaagctttaacattcttttatcggtattctactttccgatgaatattagaaaaaagttaatcgatcaacgtcaaggcttaatgtttaaaccgataaccgataaaagaatgttaaagctaataattatatttttccaaagacggatttcaatttgagaatattttttcaggtagcaaaaacgtaattggattctatttctccaaagacggatttcaatttgagaatatttttttttttgaatattgttgaattttgatgaagcgattggaagtagatttagactagttaatcctaaaatgtgctctgtttttggatttaatgttgagaatatttatggaacatgtttaagagattaaaccctataaacaaaatcatcgaaaatttaggtattaaacgacattttaatcatgtttacatactttgtctcttagtttaacatcgacctttgttccaaaaaaaaaaaaaaaaaaaaaaaaagtttaacatcgaccttaatataatataataagaataagttaactatttaattataaagttaacaaaaacttaaatatttaaacgatatatcaaaaagttgagaatttaacgtctataatttaaaaatataagcttttatagacattcccaaattttagcacataaaaaatatatatctattcaaagttttgtcagaattaaaaaaacatacaagtttatcatacacatgcagagccgtatttacatggagaaaaaagggcatttgcgccacacaaaattgaaaaaaaaaataagctacatctaaaaaagaataggtttagtacttacttttaaaatagtgtttaaggaatttttactttgaaaaacaaaacataacatcacatctaaaaaatatttatttgcattttataacattaactcactaaatctcgtttttaatgaaaatttattgtaaaaatgtagctttcctttttcacatataccatgaataaaaaatttatctgagaaaaaagaatataaaaggcaacatttataaaatttgccttaaacttttattgaccttggcacgatactgtacacatgtaaaccagtctcaaaatttttttttttttttttttttttttttgtcatccagtctcaaactttgtaggtaaacgtattaaatttcaaattacagggtcactgatgtcgagattcacatgattatccttaaataaaggacctatatattatttataaatatcaatttgccatgagcctgtaaggctgttacccacgatcaggtataggtaagtaggtaactaattagatgttttgtcttctaatcggctaatgaatacgaattaaataagcgacgtcgattaacgaattagctgtattgtcttaaccttgatcgccacggctcaaccggataaacataaaacatattttatttacagatacgagccaaccgtgtcttccaaccaactccaccaaccggcctttttaacccattaaccaaccattttattattatttttttgtcatttgtagtgattgataaaacaaagaaataatacattgtggaactatatgtgttgccgaaccgacaaaaaaaaatatgttgccgaaagaaatatttttttctgcaaactaagcccaaacgagaagaacataacctaaactatatgaaaactaaaggtccaaacgatataaatgtttacagcaaaatcaccaaacgaaagataaaaaggactttggtataccaactccaaacagaagagatcatcaagcaaaacgagagagcgtacttcaaaataagatgtctctatgttttttgggtctatttgttctcttaagatataaggttggttgcatatgtttctagtttaaggtttctttaaaatatatgttttgtattttttggtgtttcatcctttttttgtagaacctaatgctcgaaaatactttttcgactatatttccgaagatttttgttttgtctaccaacttaaatttcttttgtttgagaattgtatttctcttcggttttacaattacagtagaaactctataaattaataatattgggaccatgaaattttgttaatttatagtaatattaatttattctatttacgtaaaatataataccatatttttcttaaaatgttaatttatagtgatatgaaatatttacgtaaaatataatactatatttttcttaaaatgtttttaatttaattttccatatgttttgttgtttacatatataattatgttagatttttatttttatttgacttctttaatttatttttctttaaaatattgtgtcggtatatctacgatattaacgtcaagtaaacgtaaacgtgaggcttaatctaatttttctttatacaaatcttagcaataccttctcaaatacaagattttacaaaatcaactatgacggattaaatacgcaaaaagttatgtgaatacgatagagattataccaattgtattttaaaaagagttataattaaagtttgaacaaaaatttcatataagaattagtcttaaaatgtatatttcagatctaggggtgtcaaaatggttcaaaattcatgggtcaactcaactcaactcaactcaatccatgaaccctaatgagttgaaaattttgattcaaatgagttgatgggtcaaatgagttgatgagtcaattggtttgatgagtaaaatgagttgggttgtaatggttaatggtttcaatggtttacccaattaacccatcaagttttgtaaaattgaattaaaccaactaaaatctctaaaccaatgccaatttaagtttaaccaacacatctaaaccaatttaataaaattaatatttttccaaatttcttaaatatacaagcgatgaaattgagaaaaagtaaactcgtaattttttcaaaaaaaaacataaacccgtgattttcccgccaaaaacgtaaacccgttattttcccgtcaaaaacgtaaatccgagattttcccgccaataacgtaaatccataatttttccgctaaaaacgtaaacccgtaattttcccgcaaaaaatgtaaacccataattttcccgccaaaaacgtaaacccgtgattttcctgccaaaaacgaaaacccgtgatttttccgccaaaaacgtaaacccgtgattttcccgccaaaaacgtaaacccgtgattttcccgccaaaaacgtaaacccgtaattttcctgccaaaaacataaacccatgatttccccgccaaaaacattaatccgtaattttcccgccaaaaacgtaaacccgtaattttcctgccaaaaacataaacccatgatttcccgccaaaaacgtaaacccgatattttcccgcccaaaacgtaaactcgtaattttcccgccaaaaaacgtaaatccgtgattttcccgccaaaaacgtaaaccttagattttcccgccaaaaacgtaagcccgtaaatttcttgccaaaaacatcaacccgtaattttcccgccaaaaacgtaaacctttaattttcccgccaaaaacgtaaatccgtgattttcccgctgaaaacgtagacccgtaaaaagtggaatccgtaaataacctaagtttgataataatgaattactaatgataattatttattattgtattataataataatgaataaaattatttcttaaaatgggttaatccatttaacaactcaactcatcaaattaaataagttatgggttgacccaacccttttaacaaaatgggttgagttgagttgggttacccattttgacacccctataataagatctataattattaatttataatattaagactaatttttatagagatttcaaaaaagttattatcttattatcttatcaatttttgttaatttttatattgatctgacttagaaccgacaaaatttattaatttattgtatttattcatttatcaaatattaatttatagaatttttactgtaattgcattaataaaatttcaaagataaaaagaaaagtaaagtaaacttgtttcttgttatacaatcgaactcccatgttactatcaaacatatttgtcaggatccttcgcctttttagttatataaaaaaacggaatatttgtcaggaattttgaggaatcttcgtcatgtgataggcgacaaatttgtggaaaaaataatatataattatcgacaactagactgtcagtcaatgagatcgatgaccattacaggctgtcttagaaaaactattgaagtaaaataaattcaatattgtttagataagattgatgttatacaaagaatacatgaaatgtacttttgggaattaaaaaaaaaaacacgaaaggacgttacagaacctgcatacacacaaagagtccaaggacagtaggacacttcattcaatagggatatttttagttcgtgtgtctcggtttaatctgtctgagtagctatcaaaagcaagaaaagtacataaagtcatcaagacacttgagccctccataccaacccaaccaaaataatctctatccataatgttctctaacaatttggcattgatagagattatcttcataccccactgggagggctccatccatttgcaatcttttacaggaagtgtttgagctttggggaggtttttacttgccacacattggtgcctgttgagagtgcacaagatgcttcttgatcagtttataacctgatttagaggaataatttttagattttttccggcaaccaaactaaagcatgcatcctgagttgtcgtgtgtctcatacttaaatatcccagtgtatctcaggtcatggcaatcctcatacccatggttcaactcatctcgattatgacgaccttcaaacatgtggttagacatatatcaattataacgacctatcgtttagcacatcatggtcacaatgaccatgaacctttatcatgtcacttatcatattcataattcatgagtacaatctgaaatcagttattgttacataaatttttacacaaagcgtggaaaatcatctggttatttgtcatacaatttcaccttgtggattagtatcactaatttaaatactcattgtatagaaaaaaaaaaaaaagatgaagtgatttgagtttaattaggagtatagtagttgaaatgtccacatctacggcttaaccactaaaatataaaatttaaaaacaaaagaaagttgctgtcaaagaaaaaaaagaaaaacttatataattgctctcgactatagttagagcatcttcgttggttaaaatacttttgtataatcataaacttttgtattcctctttagagatacattaatagattctttaacaagaacccttatatatcacttttttttttcctactcttttctttgttgtaattttaataaaggtatcgaaaccattagtggagactacacgtttccctctcacctttctagagtcaagagtgtcaccccttacacgtttaccttcatctcaagagtcaaggggggagaactcacggttcaactactatccatccctcacagtaagattttagctttcttattctcgaatcaaaatctcgatttatatatatctgaaatttgaatccgaccttgtctctagctaaattcaggaaagcaagattcaagtggaactaagtcatggcagagaagaccgagatattttcatcaccttcctcacctccaccatcattttacatggtagataagaccgggaaactttcatcaccttccttaccttcctcacctccaccatcatattacatgggagaaaagaccgagaaatattcatcaccttcctcacctccaccatcattttacagaaaatatatcatatcttacatcaatgagcaggtagagttagactcaagaagtgagaaacgagtgcttctcttggaatcagctggtaaggaatcttgttgcatcttcagagtccctaaaagcttcgcagaaatgaatcctgaagcttataagcccaaagttgtttccattggtccttaccatcacgggagaaaacacctcgaaatgattcaacagcacaagcttcggtttctacaccttttcttacgcacggcaagcgtggatagagatgtcttgtttaacgctgtagtggattgggaagatgagataaggaaatcttattctgagggtcttgagggaagtccacatgaactagtgtatatgatgattcttgatgggtgcttcattctcatgttgttacttatcgtgtcaagaaagatagaattgtatgagagtgaggatccaattctcaccatcccatggattcttccgtctattcagagtgatctcctcctcttggaaaaccaggtccctttctttgttcttcaaactttatttgacaaatcagagataggtgtacctggtgatctaaacaggatggcttttagcttcttcaacctctcaatggataaaccagaaagatattgggtcaaacacagaaacttcaacgcaaaacatcttcttgacctcattcgtatgagcttcttacctatggatggatacgaagatttccaactcactaagggtaaatctagaaagaaatcatcctccggtcttacattgctattgtcggctacaagactttctctccaaggaatagatttcagtttaaggagtggtgcagattcgatgttagatataaggttaaagaagaacaggcttcaaataccagtgttaagattggatgggttcattatctcaatcttgctcaattgcgtcgcctttgaacaattttacgcaaagagtaccaaccacataacaagctatgtggttttcatgggatgccttctaaacggcaaggaagatgccacattcttaagtcgtcgccggatcatagagaactactttggcagcgagaaggaggtatcaaagttcttcaaaactatatgtaaagatgtagtgtttgacatacatgcaagttatttacggaatgtgtttgtggaaattaacgagaacacctcaaaatggtactcaatatgtcgaagttttttactgtcaccaagaaattttgtggcattgcgctttcgtccaatttatcgattctaaataccattcttctaccttagcaacagcaacagcaaaaccgcatgatggaacgtcctccaggcaaagcaaacatgctcgagcttatgtagaaacaatggaattaaagtcgtttttatcttctacagaaacatcattgttccctgttttttatcagttgtgtaacttgtgttattgctatctttttcgttttatgatgttatcctatatatgtatttaagtattttgttactcttgttaatttgcatgaaataaagcttttctactttcctttgatgaaataaatttgactttgctttgtcttctcgattatcttgcgctatgagaagtcttgaacttgtcatgcagctgccctgacttagggtgaacgggatataacttcatgctaattttcagtgaagtccaaaactttatcgaagtcgagtctctatttttcttatatcaaaattcatcattttcattttataaagagagagttgttgcatttgatttgaatataggacaaaaaaactcatttttttagtgaaatggatttgaacgataacctttttaatttaacttaattttaatcgataattattattaatatataatcataaaacatatacacaaaagaaaataaaagtaaaagtggtaaacaagccaactaggatgttgatgattactatgtaataaaatggtaaagtatgatacatgttgatatttactaaacaaaattattgattacatattgaattaatagatagataaaagaaaagattaggtgaagtgttaaaaaaataaaatcatagtacatagtctaaaacaactggcacattattaaaaaaactacgtacaaaccaatcaaaacaaaaagttaataatacacatcatgttcccacggtgacgttccaacagaaacacatgagcccaacgcataaacaaaacaaaaaaaaagacaaaccaatgaaaccaattttaactatttaaatttcaaaaagaaaagaaaaaacacttgagggtcaatgatgtaaggagaaaatgggttagcaattatccattggatctatgcttgcttgtacctcacaaaccgcaaaatctttcttgaagtcgtcttaggttgaccaactaaaaaaagcgagggatactttggtttcgtccatttttcacaatatggtgaatttaagaaagaagtttgagatgaaacaggcgaatcagccgggtcgcgtcccaaattatttcaggaataaatatcatggatatgatgacgatatgccgaatttgctacctacgttcatcaaattgttggatactgagaaggacgaagacggtgccggcttgaacgctgcagagcaaatcgatagggagttaaaaagccgaaaatgtgatattcttaagttccgcaacttgacgattctcgagcttcctcacttgaacgagtttctgttttctacggagctcaatcccccgatcagtgaccaggtgatatttctttcttttttttctgttccaaaattaaccaaagaaataggttggtcgttacttctggtttgtttttggaaataagaacacattttgtaagagttaggtttctgttcttcaggttcgtcatcgtgacatgaatgctccactatcgcattacttcattcacactagcctcaaatcctactttacgggaaataatgtctttgggagattatacagcattgagcccatcattgatgcacttaaacaaggtgtgagagtggttgaactagatcttttgccttttggtaaagacggcatatgcgttaggccaaaatggtatattctgttctgcctctttacttcatgaaaacttatacagcttgctttgagcttctggtttaattatgaacttgataggaactttgaaaagcctctagaattgcaagagtgtttggatgctatcaaacagcatgcctttacccccacgaggagttatcccgtgataattacgatcaaggacagcttgaaaccggatcttcaatccaaagttactcaggtttataatgttctttttctcctcgtttttctcatattattacgtattctaattcttttggtatgatatattgttgcatatgtagatgatagatcagacatttggtgatatggtataccacgaagacccccaacaaagcttggaggaatttccttcaccagcagaactacaaaataagatattaatatcacgaagaccaccaacaaaattgttatatgctaaagccgttgagaatggggttgagcttgagatacaagaggggtcaacagataagaattaccagagtgttgttggctttcatgcagtggaaccaagaggcatgctacaaaaagcattaacagacgacgtccaacaaccaggatggtacgaaagagatgttataaggtattgttgagttaaataagtttatactacataccaaaacccttactcaacatgttgagagtagttgcctctcaaatactaaaatataactgattaggaaattcttgacaataaacagcttcacccaaaataaattcttgcggacacgtccaaaaaaacgcaacttgttgagcaaccccccttataaacctcagagagcttggatgcacggtgcacaaatgattgcactaagcaggcaggtgtgactctaaacgtttctttctctctctctctctctctctctctttatctggtttctcttgctcataaccagtactggttgcacaagcatgtacgcattgtgtggagagcttacctattggaatcagtttcatgaatacattatgttgtactacaggacgacaaagaaaaactttggttgatgcaagggatgtttagagcaaatggagggtgcggttacgtcaagaagccgaatttccttttgaatgcaggttctagtggagttttctatccaacagagaatccagtggtggtgaagacattaaaggtttgtttgtcatcctacaacaattatactatggttctatttctcacttaggatgggtgatgacattatatcttgcaggtcaaaatctacatgggagatggatggattgtggacttcaagaagcggataggtcgactgtctaagccggacttatacgttagggtacaaaaatctaaatcaggagatgatactttaatttcttgggtatggaaatgagtttgattttggttctttaatcgcaaatgcacagatcagtattgccggtgtaccccatgatgagaagattatgaacacgacagtgaaaaacaacgaatggaaacctacttggggagaagaattcacatttcccttgacctatcctgaccttgctttgattagttttgaagtttatgactacgaagtatcaactccagattatttttgtggtcagacttgtctaccggtttctgaactaatagaaggaattcgtgctgttccgctctatgatgagcgaggtaaggcatgcagctcgacaatgctgctcacacgttttaagtggtcttagcgtacaagtttctttctcattaccaagtggcggctcttgatctagtggtgtttcttaaaacctttcaaagttacgctttctaggacccctagttcaagttccacctggaagggggaaagggtttaggcaagcttagattgtgatacggaaataaggtatttggtccagaaaaacttggcattggcattttactttggagacgaaaataaagttttctctttttcctgttatttgttgtcacttcaagtttctttcacttttatttttgaatttcttttactgaattactgtctttttatttcaaaaactatttttcattcttctgcaagttcttctcgagcttggttcaaaacatatacatttttttggggggcatactttcttaggttcagccgttcagggtaacaacttttgatggaactgaaacttagtgatgaagtaaattagtcattcttcattttgtggtcatgttaaaaatatatttgtaaaagtaaaaataaaagcggatctagttccgagtactccagcctccaggtatcctatttttcatagcagatcttatttggtctattggttttggatttttttcatagtggatctagttccaacattgacaaatgtggtgacaatgctaggccacatgtcactatttgcttggtcatcttctgaccgttaagttttcatcatctagtgactttctcgttttatgtcacattgttttccattttcctagattatacgtaaaactcgtgactttacctcggtcttatcattcatcagagtttaaaaatagtcaccggcgatctttaatcggagaaatgtagattaaataaactttaagctataagattttgcattgtcaatgcaaactagaatattgatataattaaattctttagaccaacaaaaaccaccaatgaagtaagagtaatgatccaataaaatgatgtcgtacctgaaagactcaaagcttgggataagaacaagaaagtgcaagaagatgagagagagaagcaagaggataagtaaagagtcaacgttggaaaaggcttagacaggaagacgactaagaagacatcgtctagctcatttcaatgaaattgaaaaggagaaccaaaaggaggctgatgacatagccatgtggaaaggtaaaaaataatgcgtacaaagcaacgttctctaccaagaatacgtggaaccacatcagagctctctctcccacagttccctggcgtctggttcaatcatggcaaacctaagtattcgttttgtatttggcttgcggtgcaagatagactatcaaccggggagcatatgttttatatggaacagaagagcctcaaggcactgtgtgttatgtacgaacactatggaaactcgggatcatttgttcttttcatgcaattatgtctcgataatatgggctgcggtagctaagaagttaatgaagtccagatacacgatggaatggtcacaaattttggctcacgtctccgataaatctttctaccgagtggatggtttcctaatccggtatgtagtccaagctacggtacacatagtttggagagagagaaattgacgacgtcacggagaaacaccgaattccccaacacaactgataggttggatagataagcaagtccgaaaccagctcaccaccaatcgacgtacgggagatcgacaatacgaaaaggggactggttcaaaaccagaaactcaccattttcaattctacttaagaacatttaaatccaaattttttctcagctattccctttaatacacgttgcacaagttgcaaaaaagttaacttagtttatctctttcacctgagtacatcaacgttaattaacggtatcccagtcaaatgggagatcccccagtctttgtatgcttctctcagtttctccatgtccagatgctccatatcgataatcgggatatccttatcttcgatccgatctagacccagttcaatggatgtttctagtcggttggttcgctcattaaatgaaaaggcgaaactctggtagatacggctctggactcgatgtttctgttctctctcttaattttgttaataaagggtaagagtattgtaacgaccgcgtcccgcgttcataaagaggccaggttgttttaggagaaaactagaccatggtcaagaaatggactaaaatacttagtcggaagaacgagaaagttcaacctgaaccagctaggtgagctggacaaactaggatgaactagctagctaagctaggtgagctaaaccagctggaagactagctaactcagctaggtgagctgaccaacagctcgactgagctcggtgagctgatcaagtactgacccagctggttggtccggtcatctgacactcgagttggttgactgtggtagctcacgggtgaagagatgtctcggccaaaaggtgtaaggtcgagcgggtaccaacgaacggttgcatcaccaaaggatacaaggaacggatgtgacctttcgaaagaatgcaaggaacggatgtgacctttcggaagggtgccaagaagggatgtgatgctttgagaagcatccattcgccccctatataagggaggacgcccaaggcctttggaatcatctcacaacattcaaaacaccacaaaacattcttaaaagagtcccaacacatcctgaagttgttggtcggaaagggggtgcggctcggcgagtataactcgaccgaactgatgcgcatactacctcccggtccaacggttcgatggagtgtagaggatggagagggtagaccgttcgtcttagagacgaatcggatctggtagaccgatcgtcggatcggatcggccagaccgatcgtcggacggatcggatcggccagaccgatcgtcggacggatcggatcggccagacggtcaattccctaacgtgtaccttaactaataagttagatcgttacataccttggccaatatgcggatttgactccttagcccatttgtcgccttattccatttgtttaacgattctaatccgatcgtgtattgatggaccaatctatatcgttacttagccatataaccaaccaaccccactgatctaagtacaacgatagagattggggatcgtacgattcccttgtttcacgatggccgaattaaactattggctcattggtccatccgttctccagacgtacgtccctccggctacatggtgaacgattgagcgctcggcttatcgaactatccatgtttccgatccggtcgtttaacactacgaccgcccacggtttactaaccgtttacccgtccggtccatggtggtcgataaagctttcggcttaatgatccatccatgcggtccgaacgatatccttatcacacccaagggtccgtggattcatccatcggatcatcgtaggctagcccatgaaatccttcctccgtcggcgttaggtttgctcacgggtccaacatccgttttgtccatcggttcccaccgtggactttcccgttggttatccgtcgagtcaccctttggtcttaccgatctccgatcggtttcaccatggctaaggagatagatacatgaaggcagccgcgatattgatcccatatggtgaatcacgttccttacccattcttggtgctttctccctttaccggtaagattgcatccatgggcgacccttgggtgtgtccggatgcacttatccttgtgcttcctcgaacacttttctcgatccatcccatccgacgatcagtctatctgacccttccgtctgacgatcggcctgtcccatccgatccgtccgacgattggtctgtgcgatccaatccgtctggccgatccgatccgatccgacgatcggtctaccagatctgattcgtctctaagacgaacggtctaccctctccatcctctacactccatcgaaccgttggaccgggaggtagtatgcgcatcagttcggtcgagttatactcgccgagccgcacccctttccgaccaacaacttcaggatgtgttgggactcttttaagaatgttttgtggtgttttgaatgttgtgagatgattccaaaggccttgggcgtcctcccttatatagggggcgaatggatgcttcccgaagcatcacatcccttcctggcatccttccgaaaggtcacatccgttccttgcatccttccgaaaggtcacatccgttctttgtatcctttggtgatgcaactgttcgttggtacccgctcgaccttacaccttttggccgagacacctcttcacccgtgagctaccacagtcaactagctcgagtgtcagatgaccggaccacccaactgggtcagtactcgatcagctcaccgagctcagtcgagctgttggtcagctcacctagctgagctagctagtcttccatctggtttagctcacctagcttagctagctagttcatcctagtttgtccagctcacctagctggttcagcttgaactttctcgttcttccgactaagtattttagtccatttcttgaccatggtctagttttttcctaaaacaacctggcctctttatgaacgcgggacgcggtcgttacaagtctacccccttaaactgaattcgtcctcgaattcggcgtgtgtaagatcttgcttactccctaactcgggacacggacgttacaagtatcttcattgcacaactctattttttcctttattttatagtaaaaataggttatttttctccattgtatgtctttaaaatagagttacttcaaaaatagagacaaaatctagaaattactctatatatagagtaaaaaagaaaactattctatattttttctattttagaagaaaatctattttacagacatgaaataaagcaaaatcaacaatattttctgtagcacagaaaaaaaaataaagttgaacattggagataatcgatgcatatatccaaccatcatattatatttatataccaaatgaaacgttactaagatagtcaatgcatgtatccaaccatcacatgcccaactcaagaccaacgtaggtccgcccctgcatgtgattatgttgcgtaatttatgcatagattatatgtatggcacacatgcatttgtttggacttaagtttgcagatcatcaataataatttatttttttctctagaggttgttcaatatacgaattagaaggcttcatcatgtctacatataaagagaaatggcgagacaaagtttcacccgaagctcggttaaaaaaaactctttgtactaaaactaacacatcgtaaaaacatttttgttattttagtgacttttcaagactttggattgtcatttatcttatgtgaggtctaatagccacctaaggtaaagctttccatcaaccaatttttttagataatcgccgaaaattctcgataaatagatatatactagtgatgactccactatgtgtgtatattcatggtttaaaaatgagaatatatatgtataaatcccaatttaaatctcactaactagatcataacccgtgctatacagcacgggcattaatattttgtataaattaaattgtatactttatttgaattacataagaaatagtataatataaaagtgatactataatatttttcaatgtttttactatttggatataatattgcattggattgactttgtttaaaaatgttatttttataataaatacaacatatgtagttttaagtaaatatgtaaaatttgtatacaaattgttttggtaagaaacatgtttcctttgtattagaggatctaatttttggcctaacttaaaattagtctgtgtatagtattttggttatatttgtgaacctaattgggccctatattagattatatttgtatagtattttggttatatttgtgaacctaattgagtcctacataagattatctttgatagggctcacgaaaaaacggacccgataaccaatccaatatccgaacaaaaaaaccgggttagggcgagttagaattttaggaaatttccttactgggtagagttttaatacccgtggatatccgattggtccaaaaattacccgttacgcaaaaagggtattcaaaaacccaaacattaatttaatatccaaaatattaattatctttaatcgtaatataatctaattatctaagattataattataaatctaaatatgtcaattaattaattttggacctaaatatccaaaacaactaaactattcaaaaattatttattatgtttgtcaaaatttagtaaaatatattcaaatataattaaatttattaaaacttaacaaatttaaaagttttttttgtttggagacccgctatctacatacaaaatacccgtttctatttttttaggaatttttagggcctaaaactttttatccaaactgatccaaacccaaatggacccgacccgaaccagaaccaaatatttagaattattctattgggtagtaaatcatatacccattaatcccaaacccgaacgggttctacccgaactcgaatgggttactcatataaatatgagaagtgaactataataattaataaaaattaatatgataatttagatatcaaatctaatttgttgattttaattggttacttttttggaaattaataatgtatttcgttttttaatttaatttaattaattaaattagtttttgactttttaatttttaaagagatgaattaatttactctttaaaattttaattttaatggcatacctatgtaattacttacaaaatataaggttacatttaaaatgtacttcccaaataatatagtaggatttatgttgtttagaagtcatttcattaaatgcttctctttgatattttatttcaccatcaaaaggttttaaacaaatacatatgtaatttacaatttatatttcaaaaacaaattattaagcccacgcattgcgtgagtttcctagtgacaataatacaaacaacaaaaatgaatgttttttaggaatatatcccatgaaaatacaaataaaacatatggaacaaatatataataaaacatctatactattaattgggaatcattgaaaactaaacatattacaaagaatgccattagaatttttgaattctaagaataaatgaatggtttcgtagaagggtaaaatgaacatttagtattacaaaacgcgcggatcctcggtatatagatcgggtctagactggatagcacgcggatgttacgaatcatttaattttggttgcgtaataacccaattgggcttattgggcttaaccaattagggcatttatgatgcatttgaatttaagcttgatatctgcactgattaaaacttattacagatttggttcagttacattaaaaaatatttccataacaaacaaatattctataacaatatgacaaaacggatatttatataccaacctaattccatattttccgttgattaaaacataacttctctccttatattccttatattcaattttcagttaatgtatttctataacaaacaaagctataaatttgaattagaaaaagcataattcaaaatttatcctacaccaaactaatcccatatattccgatgattatggaaaacttatctttttatatttcaaaaaaaaaaatcaattatattcatactggaacaaatcaagcatattccatattaatcctaattcaaaaatcttctctttggtgttaattttctaaaccctaaaacaatctagccgaccattttaactataaatatagatgcataattccattgaagatacacacaaaaattttcaccacgaaaaattgctattggtactccttataataaaatggctgcaaatcttggcaacaatggagatgattatggcgtttacatttgtatgtatagattcgattttcactagatcttttactctttacagtcttacaataatcattaacagatcctattattaatacgactttattcttttctatatagggtgctttgattcatgctaatattttgattcatgctaatattaagaaacatcaagtgaacaagctttaaagattcatcagatctgagagtgtagaattatggaaaattttacacttacatggggtaaaaataactaaaaaacacacaccaaccaacaaaaaaaggcacatcaacagctttcttcttggtcatagcatccatagatgaagaaaaggttttcatctcttactatatcttataaatccttcgttcttggtctttgattttggcgtctctcttcatcggagattagaagagaaaccacatcaagaaaataaataagagataatgtctgatgagcattctgtgaaagagaaacgaaaacgatgacttgatgagggtgaagttggagagagaataaaaagaaagttgcttcctttcagttttgtttttctaattcactcatttattcatttttctatgtgtcacaaagtattaaagtgttctattttatactttcgattggtatcatatttcattttttcatggtgcgtcgttatgtacaattttgtcaaacaaatatcaatgcaccgaaaaacaaagtatctacaattagcgtggacgatgtttaagtgtcatattaggactaagatcaaacgttacataatattactaaataatcttaaatgcatggtctaagtctaaactaaagctcataattcatttcagtgtgatttactatgttttgtggtttacctgtcaattctctccgatttgttttcattagtaaatttccaaatgaggcacatcgatataattaatccattgaaaatttggaatgtcaatcctttagtaatatactaaattgttttggcaagaaacttaaatttggagagtgcatatatgataccaaagattttgctgattttatgaatatatttttagccaaacatgggttttaaaaaaaatatttgcaataagacaagaattgttctaaacacaattagctgtccaaaaaagaatcagtaatatacttaatacaaaataaaatcgaatagagaaaatgtgttaaagaatcttgcaaattgggtctgtatgtatttcagcctaaacaaagtttatatctaattcagttattggccagtagtcagtagattaaaattttagaatgttttttatccattaccaaatataagtttgtaaacaataatgttgcattactaaaaaaaaatgttgcacatcttaaaatcaaatatctaagaataacaaaatttctattataggccttaactttacaactgtaaaatggtgtaaataaaacattaaatctattcaaattttataactaatcaaactgaattttttttgcaccattgtttatgttaaacacataatataacaattaattttctaatatctatactattatgatatatctcattcactacaaaccaaaaaaataaataaattaaatactactttagaaaaaactaaattgaatataaatttaatacaccatatttttaaaaatatgaaatcctgcacgtatgtgcgggtctaattaaagcgcgaatgacatttgtagcggataaaacagaacaagtagttcacgtgattttcccgaaggaagcccctatggagaagctgagtttccatctcactctgtatcgtgatagtaggaacgaatcgcataagcggcttgcgtcatggtaagaagaataacgaaaacaacagcaaaggatgacagagcagtccatggtgactcaaagtgcgtgtgcctaaagccagcccatactccattgtacgttttggaggtgtactcgttaactccctcaaacacattccgtaagtaacttctacgtgtgtcaaatacaacatctttacatatagttttgaaaaactgtgatacctcattctcgttgccaaagtagttctctatgatccgcttgtcgttgttcaagaaagtagcatcttcctgatcgtttagaagacatcccatgaaaaccacgtagcttgttatgtcgttggtactctctgtgtaaaactgttcaaaggcaacacagttgaggaagattgagctgatgaaaccatccaatcttaacagtggtatctgaagcttgttcttctttaattttatatctaatattgattcagcatcactccttaacctgaactttatcccttggaggcgaagtcttttggccgacagtatcaacggaaatgtagactctgacgatgatacttctccggatttacccttagagtgttgaaatttcgaggatggtgttgtttctgattcacccatagatctcatgctaggtatgaaggtcttacggttgaggtcaagaagatgtttagccccgcggtctctgtgtttcgcccaatatgtatctggtttatctattgagaggttgaagaagctaaacgccatcctgtttagatcaccaggtgaccctattcctgatttatcaaatatagttcgaagaacaaagaaagggacctgattttccaagaggagaagatcactctgaatagatgccaaaatccaggggatcgtgaagattggatccttattcatatccaaatctatctttcttgacacgataagtaacaacatgagaatgaagcacccatccaaaatcatcatagacaccagttctgatttttctatcctaagttcctcagaataagaagctcttatcttgtgttgcaaagcacctactgccgcatacaagacgttttcgtccattcctttctttgttgccctgtctacgaaaagctccagaaaccgaaacttgtgctgctgaatcatttggaggtgattttctccgtaatgataaggaccaatggaaacaactttgggcttataggctttaggattcacctctgcgaggctatcagggattctgaagatgcagcaggacgccttaccagctgattccaaaagaatcagtggtttccccgatgactgtaagttgcgtttgatatgagatacaacacttctttcactacgttgtcgtaatggagaaagaggaccttcgtcgataatactaatagctatatcggaaagtgatgacgttgatctcgtctcatcctccataattcaaccccacttggatcctgttttcctggattcagatcatctatatttgattatcaaatttcaaattcaattcaaattcaataaaagagtttggttggagaaccgttgatgaaatcttaccaagggcgggagtagttgtaccgtgcgttctgcgctcttatcttcattcctgctgtagtatctttaagtcttttgtttacgttttttttgcttttttctttttcagaagtcttttgtttttgttttattcttgactcttgcgaggaaggtaattataatttgtaagcgactagtcagtctcgtcggcccaccactggtccattcaagtggggatcaaatccattcacgccagagaagacgcatttttggtagaattgtcaaaatatgtaaaccaacacaatacactaatgttgctgtcaaagaagaaaacaactagattttaacccgcggtacaccgcggaaacaatttattttttaaagttaatatacataaaagtttgcaaattgtatctatctataaaatatttttattttgtagtttacaactgttattaagtaacatcctgccaaacccgtcccgcccacccgtcccgtaaaaaaatcatttattttattaatgttaatcttatttatgatatgtttatgaattattgtctaaatattttgtaattttgtagtaattaaacgttatcaaatatctctgcggtttgatgattataatcgaattgttatagtcatggagaaaatcaatatcaaaaatgataattttgaagtaattaaatgatagtaaatattttggaagttttattttaataactaatgtggagagatttagggaagattgttaaatgtcaaatatttatttcgaagatgttttttttaattatcaaaaacaaacattaaaattcagtggcagtcattgtaaataagtcccaactacaggatttatttcacaaaataactgcaaaaatgtatatatagatgtcaaaaaaaaaacaagggagatttgcaaaactacacttattctaataaccttttgtaaaagtgtctttttctgaaggccatttttaaaactacctcttctaatatgccaaatgactgtcttaccctctgaatgattaggtttcacgttggtttcctctccgattttcctcttcttcattttggcacaaacttcttcgttttcctctttgattttcctctccgatttcactcaaaatcgccggcgaatttcctctccgatttcactcaaaatcaccgacgaattccctctccgatttcactcaaaatcgccaacgaatttcctctccgatttcactcaaaatcgccgacgaattttttttctgagaaaccccaaaatcgccgacaaatttcctctccgataaacctgttcttcgctgaaggattcagatcatttctctacgacgcaaacaatccccagagatatcgatagatccgacggtaaccgtttttataatcgattttataatcgattttatagtcgattttatagtcaattttatagtagatctgacgctgtttcataacatgttttgcagatggattcagagagtgaaatccttacattgcctgaacaaatctacagagaaggtgaggaatctattgcactgggaaccgttcaacaatactcggattggaatttagttagtaaagtagaggaagctttaggcgagtgtttatttcagaagattagaagttcgtttcttggtcctctagttgaattgggaccaaaaatgaaggctaagaagggaatcagattttctggaaaaatctttcactatctcatgcagcagagagtgaaaacaaaaggatcaactctttggtttagagttgattctcaacctatccgtttctccttgagagagttctatctcacaacaggtaataaagttttacaatcgtttttaaagcttaattaactgtcgtagaatgatttacaaggcatttgcataactgtttgcgtagtttacaatcgtttttaaaacataagtaagtgtcatagataatttacaagggattttaaaagcttttaaaaggggtttacttcattaacaatcgtttaagaagcataagttagtggcagataatgatttacaagggattttaaaaagggtatgcatggtttacaaccgtttttaggcataagtaactagcatagaataatttacaagggattttaaaagcttaaagaagtgttaaacacgtttacaagggattttaaaagcataagtaagtgtcttaaaacgatttacaagggattttagaagtgtttgcatagtttacaatcgattttaaaaacataagtaagtggcatagaatatttacaagggattttaaaaccttttctaagggttaaacatgattagcaatcgttttttaagcataagtaagttgaatagaatgatttacaagagattttaaaagcttttagaagggttaaacatgatttacaatcgtttttaaagcataagtaagtgccatataatgatttacaagggattttaaaagtgtctgcatggtttacaatcgtttttaaaaccataagttaatggcattgaatgatttataagggattttaaaagcttttaaaagcttttaaaagtgttaaacatgatttacaatcgtttttaaagtatttactataaaacctgtaataatagtctctacactgtcttttgttcatacaggaattcaatgtgaacctgttcatagggaacttcgacgaaaggggaaagatcctgtaaaagaaccatacttttgggctaataaagaatcctatactcttggtgatctcgaagatcgattgtttttaaaacctaaggaaggtgaacctgctgttgaagatgaagaaaagttgtgtcttgctgcagtagtgttgactgaaggaattcttttgacaccatatggaaaagagaagatacctttgccaagattgcagcatgcttctgattttgagatgtacacagcccaaccgtggggtaaagaagcattcagtgttctatcaaattcaattctgagaatggacgagaaaacttgggcaaaagagaaatatgatttgagaggatttggactagcgctaacaatatgggtgttgagcgcagttccagcatttggtgcagcatatggagttaaagataaggaattccaatctgaatatccattgatattgaagtggaaaagcactactactccagagtttttcaagatcgtaaaccttgtaaatgatgtttctgaggtaagcttttgtctatttacagaattctttaaatggttttgagatttgaagttctgctttctcaagatttgtaatgttattgtaacttcgcagattgaggtgaatacaattattggaaacccagaagacttcaagtctttagttcctgatttccacacagacgacgtagaattccaacaggttttggaacttgttaagatgggctacagattgaagaaaactgaatggaatacaagatgcgttgatgtttgtgttgcccttgaagaagtaggtcaaaacaaaatcaataacaaaatatctgatagcgagaagcttgacaggattttgacaatccttgaagatcttaacaagagagtcgagctgattgagaggattttggacattagaatggaggaaaagaataatcagagatctgaggaagatgaagaaagaaaacaagaagatgaaggagtagaaagacaaccagaggtaattgtaaatgtttctttaaaagctatttgaaaggaaatgttttacaatgtattttaaaggttaaatacgtagtaaacctttacaatgtactcttttttttcgcaggctgaagaagaaggaggactagaaagaaaagcagaggtaattgaaaatctttacaagctattttatagtctactaattatgttttaccatcacgttgggtgttttgattgacttattgtttttattttgttacagaatgacaatgaatcatttgaagattcaatccgagagccaaacacacagtatgggagctatccgggtgatgatgaaaacatccaacgtgatgttggtgatgaattagttgaagaatcatcaaaagtacagtaatttatatctctaaaagtcttacaaaaatgattagtatccttttttataattttacattctgttatcttttcaaggatatgtctcctactccacgatcctctacactaaatttcaatattttgtctgaagaaagtctggatgttcaaaaggataagaagagagttagcagaggaagaaatgaggttagcatttaaaaaaatttgtattatctaaccaagtgtttataatatttttttcaaatctttaaaagtttatctttcatgcaacttcagaacaagagagttaaaccaagtgttcatgctgaggataattttaaaacaagaaaacaggttagtatttgcaacagtactgtttttaaaaattgtcaattgtcttgttatgatatttacaagggattttaaaaatacttttaattggtgttttttactattctagatgccgagaaagaggcagaaacaagttgatagtgctgatgttgatattccaacaaggaaagaggttagtatctaatttattatgattttgaaaattttgtttacaaggtattttaaacatctattttttttattatttttgataggcacaaagtaagaaaaggaaaattattggcaatgatggtgataacgctgataatgatggcgacaatgatgattttcagcccgctccgcaaagaaagagtaagcggggtacggttccttccattcatacccaagcacctttcacagctgagaagaagaagcatccaattttgcatccatttgcgaaagttgatgccacaagacttgagaaattggctgaatggaagaagtcaaggaaaaacaagtgagttttgttagtaagatagtgagttttttttaataatggaagaagcatcattgttgactgttttgttgttgtaggccactatcaatcgcgggaaataatgtagatacaaagtggtttacaaccctagagacgccagggaaagcaatcacagcaacggtatgtctaaaaatccttgtaaaattggtaacccatgaattacatatagtttttaaagcatcattaagttatttacaaaagtgattttaaaaagggttacgtggtttataaacaattttaaaagattagaaagtggtaaagaatgatttacaaggtattttaaaaaggatttacatgacttgcaatcgtttttaacggattagaaagtggtaagaattgatttacaaggaattttaaaagctattaaaaagggtttaattgattaacaatcgttttagaagcagaacttagtggcatagaatgatttataagggattttaaaagcttttaaaagtatttaacttgatttacaatcgttaaaaagcataagtatgtggcgtagaatgatttacaaggtattttaaaaagggtttacattttttacaatcgtttttaaaggggttttctaatatgataatttttatttttgttgtgtttagcatgttgatgcagctttggagttgatgaaaacgaggaaggaaagcaatccagaattattcaaaaacaaatcagttgtatttgttggatcgtctttcttaaatgtgattgatgagtcatacatggagtttttggataacaaagagggatttcagtttcagtctgaagaaatcagtaagctgataatagaggaagaaaccaagtgcatattggctcatttctgtatcaaaggaaaatgctgggttgccttgctcatccacttggaacagaagacagtttgtatatgggaatgtgcagcttcttatttaacagaagaagtcaagaaaaaatatgttgctgcctactctatagctatgccatacattgttcggaacatcctcaaaaaagaagacatggatgtctctccatttagcatcaaagtcctgaccacttttcctcaggtaacttctttaaatatatcatagtcttagaaatgaatattccgtaagtcctgacttctataacttctttgcttaagtaattcttttggtttttggttgtaggctcctagaaatgaagagtctggtatctatatgctgaagtttatggaatgctactcaatgtataccagccattcaaaccttgaagggaacataattcaaaacgttaggaataaattggctgctgacatcttcaccgaattagggtcagtcactttgtaaaagtagtagacttctaatcaaaaagtagtggagtataagatagatttatcagcttttgtttcttatttcataaaactttgtcatttgaatattttatgaacatctgtatggaacaagatttatgaagtttatttagttcaactccagttttacaaaattactgtataatggttgtttgggttaacaggtgctttgatttgaatggaaaaagactttaaacatgcttttaaacagggtttttaaacgatttacaagctgctttataaggaatttgatagtgttgaaaaagctgcaattgcggttattatgaaaaaaaattacaatcgtttttaaaatgatttacaatcgtttttaaaaaagatttacaatcgtttttaaaagagatttacaaacgatttataagctgttttaaaagcgttttaaaagtgttgaaaaagctgcagtaactgttattatgaaaagctttacaaccgtttttaaaatgatttacaaacgtttttaaatgagaatttcaaccgttgaaaaagttacagtaatgttaaatactgtatctgttactaattgggcctaggcctgttatttagaaaaacaaactgttttagtttaaaaaaaactaaaagcccaaaaaacactaaagccctaaaattcagtataacctaaaaacaaattaaacagggattggctgctgacatcttcaccgaattagggtcagtcactttgaaaagatttacaaccgtttttaaaatgatttacaaccgtttttaaattgatttacaaccgtttttaaaatgatttacaaccgtttttaaaagagaatatcaaccgttaaaaaagttacagtaatgttaaacactgtatctgttactaatttggcctaggcctattatttagaaaaaagaaactgttttagtaaaaaaacactaaaagcccaaaaaacactaaagcccaaaaattcactataacccaaaaacaaaaaaggaagggaaccgtgaaaagacaacaaaaaagtaacaaaaaaaaaaaaaaaagaatacaaactgtcgtcttcgtcttcttcctttcaacaatctgaaaaaaatctgattatccagcaaaaaggaagcaattgaaggtaactaatttacgaaactgaagtttaacatttgggtttgttcgatttttgccgaatctcttttttgttctagcatttctaggtttttcggttgaaaacgaaacaagtaaaataaattgatatttgggattttgaaggagtgttgaaaattgttatataaatttgacagatttatgttttaaagtttgatatttgggtttcaaaaaccttcaaagaagatttcaaatgccgattaacttctctgttgtagcaatttcaaagttttttcgttttgaaactttaacagtaaatagattgatgtttgggtttgtattttaatttatagatcctcacttaatttatgggttaccagttgattggagttggtttggaaaagggttttttgtttctattttcagcggttgtgttctttgaaaaggattaaaattttgtctttggaatggtttcaaaacggtctttaaaaaggattatggggtaatgactgtgttttacaagggtttttaaagtcttaaaacgacttgtaatgactttaaaaaatggttttacaagggtttttaaagttttttaaacgacttgtaatgactatgtttatgtttcgaaaacaacaaatgcataatagatttacaaaaatggtttttaaaaccattaaaaaaaactgtgttaatttaatgactgtgttaatgtattaaatcaggttttgagaaatatgagtacaaagaaacttttcttccctaaaagactgttccaaccaggcagcgaagtagataatattacaagggtatcaaagcattcatccttcaaaattgtctcgactgtcaggaaagctttagagccgatagagttcaacacattaatgggcacattcttgggtcctatagtggaattcgctgaaatggacttggcattttcaagccatatcgttcatcatttactccagagaagaatactaaccaacaatgacaaattgtggtttgtatttgctgatcaacctatgcgattctccctgagagagtttatcataacaacaggacttccaatggatgatgcatcaggaagcagtccaaatgtgaagagaaagaagaaagaaaagtggtggataaaagataatcagactttgaagggaaagcagaaaaaagatgtgtggattaacaaggaaatgacttttttagatcttacatatgttttggaaaagcgttccaaaaaaatgcagccagaggagagactgagattggcgggttcgttactagtggaaggcatattgctagctcgaaatccgactaccatgctgtcaattgagaatctgaagagacctactgatttcgaaaagttctgtaagtatccatgggcgcagattgtgtactcatatttggtaactgaagagaagagaatcggtaatgactatttgttaaggaaacaatatggtctatttggatttgttcaatcaattcagatatgggcattatcatcgattcagaagttgggagaaaagtttggcactagagatgaatcatctagtggaaatattccattaattctctaatggagatcaacatcgtctccaagtgcaaaagctataacaatgatagcagatggtgacaaggtacattttcttagttgtggctttttttatgttttaaacactgtttataaataaagagtatgttttacaatagtttttacaatcaagttttaaagatttacaaagggttaaaagcaatttaaactatttacaacgaaattttaaaaggttaattaagaattgtgcattatttttacacagtttggaattttatttatttttacaggttgaagtgacaccaatagttggtgttcataatcatgaatacgagcacttggtttcacagaagaatcctgaagacaaggatctgttggatgtttttgatcttgtgatcaaaggatatagaatgagcaagaaggattggtgtcagggatggattcaagtggaacaaggacatcaaggaagaatttatcatgtcttgaaacctgcaattgaaacagttgtgcatcaaagcagaaaaagaaaatcaatgtcctttggtgagaaggtaaaactggtatatgaaaattgtgaggttcttaagaagaaagttggaaggctggagggctatttaggcatccaaagagttcctgccagttatactagagaagaacaaaaagaagaggacgaaaaaaaggagcaggaagaagaaaagcaagaggaagaaggaaaagaagaggaattagaaaaggtatgtgtttttacaagggattttaaaagcttatagatcgtgttttaaagatttttagccgtttttaaaagataggcagtgttagatatgtatttacaagggattttaaagacttcttaatggggttttaaaagattgaaattcgtttttaaaggataggcagtgttcgataagattttacaacggattttaaaagctttttaaaagtgatttacatgagtaacttgtagttataaaacttgtaattttatatacaggttgaatacagaggcgacgaagggacagaaaaacaagaaatccccaaacaaggcgatgaagaaatggaaggggaagaagaaaagcaagaggaagaaggaaaagaagagtaattagaaaaggtatgtgtttttacaagggattttaaaagcttataaatcgtgttttaaagatttttagccgttttaaaaagataagcagtgttagatgtgtttttacaagggattttaaagacttcttaatggggttttaaaagattgaaattcgtttttaaaggataggcagtgttcgataagattttacaacggattttaaaagctttttaaaagtgatttacatggtaacttgtagttataaaacttgtaattttatatacaggttgaatacagaggcgacgaaaggacagaaaaacaagaaatccccaaacaaggcgatgaagaaatggaaggggaagaagaaaagcaaaaggaagaaggaaaagaagaggaagaagaaaaggtatgtgtttttacaagggattttaaaagcttataaatcgtgttttaaagatttttagccgttttaaaaagataagcagtgttagatgtgtttttacaagggattttaaagacttcctaatggggttttaaaagattgaaattcgtttttaaaggataggcagtgttcgataagattttacaacggattttaaaagctttttaaaagtgatttacatgagtaacttgtagttataaaacttgtaattttatatacaggttgaatacagaggcgacgaagggacagaaaaacaagaaatccccaaacaaggcgatgaagaaatggaaggggaagaagaaaagcaagaggaagaaggaaaagaagaggaagaagaaaaggtatgtgtttttacaagggattttaaaagcttataaatcgtgttttaaagatttttagccgttttaaaaagataagcagtgttagatatgtatttataaggggttttaaagacttcttaatggggttttaaaagattgaaattcgtttttaaagggtaggcagtgttcgataagattttacaacggattttaaaagcttttttaaagtgatttacatgactaataactgtgtcctggcttgtatttgggaacttgtaattatttatacaggttgaatacagagatcatcattctacttgcaatgttgaagaaacagaaaaacaagagaatcccaaacaaggcgatgaagaaatggaaagagaagaaggaaaagaagaaaacgtagaagaacatgatgaacatgatgagactgaagatcaaaaagcatatgtaattttgtcagatgatgaagataatgggactgcacccacagagaaagaatcacaacctcaaaaagaagaaacaacagaggtctgcattccttaattgtttaaaaagacatgataaaattgtcaaaaaataaaaatttgttttgatgttttggtttacaggttccaaaagaagaaaacgtagaagaacatgatgaacatgatgagactgaagatcaagaagcatatgtaattttgttagatgatgaagataatgggactgcacccacagagaaagaatcacaacctcaaaaagaagaaataacagaggtctgcattccttaattgtttaaaaagacatgataaaattgtcaaaaaataaaaatttgttttgatgtttttgtttacaggttccaagagagaccaagaaagatgatgaagatgttaatcaaacaccactctctacgcaagaagaagaaatcacccagggacagagcagtcgtaagttctttttacattcacagatgatttgccttgataaacaacttctaaatatttttgtttttgtttttgtatcagttcaaactcctttgacgccggtcatgttgagtaaggaagtaatggaagaaattgacctaaaagttaaaaaatgggcgaaaaacaaattaataagagatctactatcgtcacttgaagaagtaagttaaattacatcattgttttgctgcaaaagattttaattttaatcattttgaaatttttacatttcagattctttggcccgacagtaaatggcaaaaagtcaaaatttgggatatgtggaacgagaagaaatacaaattagcattaaagaaagcaacgttactcattcatcctaacaaactgcctcgagctcatccagaagtgaaatacctagctgaacaaatctgcaagataataatggttagtgttaaactcttcttttgtataacgatatatctttaaaaacttgaatattattgttatgcaaaaaataacttacaggttgaattttatttgcaggtagagaaggacagagctactaaggcaaaaatggatttagttctttagactgacttatttcaaacatgtttattttacttttgttatttggaatctatgattgtacttgtattttaattatgactgtcaaatctaatcaaaatgctttactattgtcaactgtttatggttttataagaattgtcatgatttacaagtaattttaaaggcagaaacagcttacatggtttgctatcggtttttaaggataataaagtggtaaaccatgatttacaagggattttaaaagcttttaaaaggggtttacttgattaacattcgtttaagaataataagttaatgtcagaaaatgatttataagggattttaaaagcttgtaaaagtgtttaacttgatttacaatcgtttaaagtatatgtaagtggcataacgaaagatttacaaggtattttaaaaggatttaaacagacgttttaaacaggattttacaagagattttaaaagataaaatattggaataaccttcaaaattacttgtaaaagtttgatagtaattttaacaaacgagagtaatgacacgacacaatgaagaaaatattaaaaacccaacaatattcaattctttggagataaagatatatctaaattgcagcaacacaagttgatttgttgtgacccgactgaccacacctactgcatttgtgtaattttggttttggctgagaccgtccatgctcccaaacagaaggtatcctctttttcttccgtttgccagtaggtacacgagtagaaggtgggagacaaataacttcactaatagtttctggaatctcccaatattccatatcaccatttgggtgaatgctctctgaatatgcttgacgccacctgtaaattacagcgatgtaaactgagattaaaaccacataaacacagataaaaccataaaaagagatattaaaacattttaaaacgcctgtaaagttgtgaagaatagagataaaacctgtaagtagaatgaaactcatcaacaaacatgttttcgttcagattgatatgtttagcagaagcaattccatgtgcgcaaggaaatttatcaatatcaaacatacaacatgtgcaagtccttttgtccagattaaccaaatgcgttttggtatctccttttacctcaaactcttcttgattaacttgacaaacctcaagccatcgtgttgaagtatcatatgacgctttcattttcttccctacatttatagtaacagcagacggatgttgactactctcttcacgtcgttcattaaaccatcttgtcataatagatctaattgactcaaataggcaaacaaccggatactcgcggttctgtttcaacaaggcattaacagattcagctagattagatgtcatgatgttgtaccgatttgaaggagaataagctcgagaccatttcctaacatctacctcgcaaagatattgtgctaactttttatcactattagtgatttcccagaacaaagaatcaaattctgtcttcgtgtaaattctagaagccgcatagtaaactggaataagtgaagaacctctgaaatgggtttccaagtttttttgcaaatgaaaagtgcaaagtccatgatgagcaagtggataattccctgaaagtctgcttgcaatagaagcagctcggtcagacacaaaaactaaatcattctcatcagggattatattcagcaaacacttcaaaaaccagtcccatgacgcgtcattttcagagtcaactattgcaaaagcaataggatacaaattaaaattcccatcctgagctgaggcaccaagcaaagtccctttaaactttgatgtcagatgggcaccatcaatagatatgacttttctcatcaacttataacctctaattgatgcaccaaaagccagaaacgcatacttaaacttattagcagaatcttttttgaaaaaagtgatagaacctggattcgtcacttgtaccctgtggaaccacctcggtaaaacctcaaaactatcatcaggtaaacccctcgcaagttctgctgcatgtttttgaactctccaagccttcgaataattgattccaactccatgatcttttctaaatatttctatcagctgtttaggtctgaggggaagctttcctccttcaaaatggttacttatcaatcttcctaatgtccttgcagatgcttgacgatgactaacattccttaatgaagagtcacaactgtgatgactaacatacttccgaataacataactctcggatccaccagccctagttgcacgtagtctccaactacagttttcatcaatacaatgaagaacatacctcgtgagatctgatttcaccgtatgaaacttaaagctgtgcttcactgcaaacttccgcaacgtgaataccatttcatctttgtctttgaaaatttttccaataaacaaagaatcagcatcacttagaccagttgaaaacgcagaactagaatactgttgatcaagaatactagatgtttcagatacacacgcctcaataatcctagaggttaacctcggctgccaaaataaaaagcttacctcaaacatcaatctatcttaaataatgattttacaaggatttttaaaaggggtttaaaaacgttaataatgattttacaagattttttaaaaggattattacctgagtagtagatgcagaatgagaagcaaaaggatttgaagtcgtctcagcctgtaataaactcactcactgacttaataatgattttacaaggatttttaaaaggggtttaaaaacgttaataatgattttacaaggatttttaaaacgattagtacctgagcattagggacagaatgagaaacaaaaggatttgaagtagtctcagcctgtaataagcacaatcactgacttaataatgattttacaaggattttttaaattataacacaagaaggttattgaaaaacctgctcaactgtcacagaaatttgctctacaatcaaacataactgaagcaatcctccactctgtgagaatttgtgcataaaagttgcaagctgtctatcgttcctaatataaagaggatgagattgtatggttgtagacgtggagactaacttgtaactaagcttcaaagaattggttgaactatctatttgaaaatcctctacaagaatatcaaccaacgcgtgataggtaatgtgctcatcaatgagcactaaagaagctcccaaatcaatgtctaattcaaattcccaagtcatattgtttgtcaacttccacaagccacaaacagaatacaattctagcattataacctgataagataaataacaacaaaatcaacacccacaaaaacactgtcactacaaagagaagcaaggtttacaaatcgttttaaagcgtaagtaagtagaatagaataatttacaaggattttaaaagctttgaaaagtggttaacatggtttacaaatcgttttaaagcgtaagtaagtagcatagaataatttacaagagattttaaatgctttgaaaagtggttaacatggtttacaaatcgttttaaagcatatgcaaaagaggtaaacactaaatcagaaccaaaatctattacgaaatagtataacgaattcacataagcaaatctatcacgaaacagtataacgaattcaaaaggattttagaacagtataacgaatgtacaaggattttagaaacaaattcaatcatcaaatctcaaacaaaattcaaattcgaagctgaagcaaatgtcaaactgtcgattgaatcaggattcaaataacgagttcacataatcaacaacaaaaatcgaataaaccaattcgaaaacgaagatttaagctaacattataaaatcaaacctgggaaacgcaagagattcgacggcgacacacagctctacttacgacggcgaagatgggttttcacggcgagtaaactcattatttccgacggcatgggattcaacggcattcacaatttccgatggaggaagaagagagagaatgaagaaatgaattaggtctgtggatagctcattaagggtaatttggggagaaaagtattagaaagggtagaaatgaaaatggggaaaaaaagggtagagttgcaaaagggcattgaaaaaagggcattagagtgaattattcaaaaaacaatacactattctcactatcttaatggaaaaatatcgaaaaaactctaaactttcaaattttggatgaaaaacttttaattaacttctcaataattaaaaattaaacgtaactaaataataatagatttaattgcccgttaaaaaccaaaatgacgtcgttttaaagctaaaaattatacgtaaaaaaaagttatccaccatgtactcgaatcaaaaacatgggaaatccttaacaggcttttgaaccatgtagtcacttaaatctgttatcattttgttaacaaaaattgaatgttatttcttaaacgatctgattaacaaaacttaaattttttattgaaaagtcaattaaaacttcataattaaaataacatttttaaagtttaaattttttcgtctgacatttagtttttttttggacatgtttccctatcttgattcaatacctgaaaacgcaaatcttttaataaattaaaaataaaactatatttaaacgataaacatgaactacattatcttttcctaactttattccgtgtcaactatgtcgccatctgaatcttgaattacttgcactatatgaacaaccttttgacacgtgggcttaaggagagaagaaataaaagtttgaaacttgagagtagttccaaatatttttcatttgacaaaagttttaaaaaaaaatgaataattgctaagaatgatctttcaatacgggaaaaatgtcaaaacaaatcacgaactttcaaatttgggacgatttaattttgaatttcaaaaaaaacaaataaatcgtaattttcttgttgactttcgaaataaataacaaagtttttgttgacttgtcatttgagtcatgtcgttaagtaggttaacaaaaaaaatttacggcgttaatgtctcctttatctcctctgttagaacaaaaaaacgttgtttattgcagttcgttttgtctgttgacacaaatttaaaccctaaatccccaaatcgattttattatctgcgattttgaagtcaatgtgggtctgtgattttgagataataaaatcgatttggagatttagggtttatatttgtttcaagagacaaaacaacgttgttttgtctcttcaataaacgacgttgttttgttctaacagatcaaataaacattaacaccgtaaaaaaattctcttaacctatttaacgatatgactcaaatggcaagtcaacaaaaactttgtcatttatttcgaaagttaacaaaaacttcacaatttatttgtcgaagtttaagattaaatcgtcccaaatttgaaagttcgtaattttttgacatttttctcttttcaatactatctttttcaattatgttattttctctttctcatttttatttaccctctcttttattttttaatgaccatttacccatattttgaaaatattttaggttaacaaaataaaatattgatttgtcccgtctaaaatatttccgtcaaaaatttccaacaaaatttatttttgagaaaaaatactctcgatatatttttttagcgggaactagatttacaaagatttttgaatgatttacaagagttttaaaaccctattaaaactcttgtaaattttgtcataaccttttgtaaatattcacaagagtttttcaatggttcaaaaagagttacaaatgtattcaaatttttacaaatttttttaagagtaaaaaaatggtttaaagattttataagagttttaaaaagatttacaaaagttcctaaaatccttgtaaatcctttaaaaactcttgtaaatattttaaaattattgtaaaagattttaatatgatttacaattaaagagattttaaaatatttacatatgtatttaaagattttataaaaatttaaaaaaaaattaaaataatttataaagattttaagaagttttaaaatgatttataaagccttttaaacactttacaaagcttttaaaaaattttataaggttttttaagagtttttaaaaatttctttacaattttacaaagatttttaaatatattttttttgctggaaaatattttattacgggaaaaaggttttggtgggaaaaacttttttgaccgggaaaaaaataattttgttgtctgtcattttaaggaaggatactgttctctgtcttttactttggggttcaacttaaaaaactatttttcattcgtctgatgcaagcccatatcgagattgtttcaaaacatagagattcttttttgggccatacttctttaggttcagccgttttcagggtaacaacttctgatgaaactgaaaccaagtaaattacccattcttcattttgtgggcttaatagacatatatttgtaaagtgaggatccaatttcgaaaattttaggtatcctattttccacagcgtgatagcgacaatgctaggccacatgtcattatttccttggtccatcttctgaccattaatacaaattaacaaaattacaaaacattaaattcaaaaatctcagcaaatatagaggatttacgttttagtgtatccgattatggttcgacagagagcatagaaacaaaagtttcctccacttgttgtttcaacaaaacaaaatcctcccctttcatatgttagttacgaggcgatgggaatcgcatccggcgaactcgccggacctcatcttacagttttttgggaatgaattccacggctacggtgacgatatgcctgagacattgcggaggttgacggagttgctgggttatgagaaggaagaagacggcgccggaatgaatgcagccaagaaaatcgcggcggaattgaatcgccgaaaagatgatataccggctttcagacgcttgcggtgtctcgagcttgatcagttgaacgagtttcttttttctacgaagctcaatcccccgatcggtgaccaggtgaatctcttttagttttgaccggaattgacttaaaaagtccttaggttcttctagttgattctgctatatctcgagtcttggctattcatttcaaccctatagcaaattcaattttggcttctctacgtgatgtggtttcctgcttgtaattgttagaaactgaagcctcttgttacaaagaacacaacaagcgtttcacttgttgttgtgtttaaacagaggaatttgattattagaatcagaatcgagaagaacaaagaagagtaacaggaaactgacttttattgaatggggaacttgttcattacatcacgatacaaaaagtttaaatagaaaacacagcgacagaacaagtgaagagtcgtgtctctttctctctaagataaacgacacaacctaatttaaaagtcactactctaacaaacaccttttaatacaacataattataacatatagaccaaactcaattataaactaacagtaataattataacagaagtcgtgtttctttaggttcatcatgacatgcatgctccgctgtcgcattacttcattcacaccagcctcaattcctacttcaccgggaatgtctttgggaaatacagcattttgcccatcattgaagcacttgaacagggtgtgagggtggttgaactagatctgtggccggatggtagaggcagcatctgcgttaggcctagctggtatgaagccctgtttgtgtccgattcttgttttgcttttcctctgaaaactattaattgtttcattatgaatttcataggaactttgagaagcctctgaaattgcaagagtgtttggattctattaaagaacatgcctttaccaaatgtacatatcccttgataattacgttcaaggacggcttgaaaccggaacttcaatccaaagctactcaggtttagaatcttctatcatccttgagtattctaaattttctgatcacagataaatgtgatggtattgacataggtatggacatgttgtatatgtagatgatacaacagacatttaatcatatggtatatcaccatgatcctcatagtttggaggtttttccttcgccacaacaactgcgaaataagatactaatatcaagaagacccccaaaagagttgttatatgctaatgatgatgatggaaaggttggcgtacggaatggggttgagataagacaacacccggcagatccaaattaccagagtttagtttccttccatgtagtggagccaagaggcatgctacaaaacgtattaacaggcaaggctaacaaaatccaacgaccaggatggtacgaaacagatattataaggtacgtgttgcgaaataagtgttattttatatattttccacagggtgagatcacaagtattgaaaagctaagtgattaagaaatacttgacaatcaacagcttcacccaaaagagattcttgcggacacgtccacaacggaaattgttgatctatgccccctataaaccccaaagagcgtggatgcacggtgctcaattgattgcactaagcaggaaggtatgcctcttaacttttatttctctctgttttttttctggtttctcttgctcatgtagtagttccacaagcgtgtacacactatgtggaatcaaccatgtatacccttagtttttttttgggcttacctatcggactctatgtcatgagtacaacatgttttaccacataactacaggaggagaaagaaaaactttggttgatgcaagggatgtttagagcaaatggagggtgcggttatgtcaagaagccggatttccttttgaatgctggtcctagtggagttttctatccaacagtgaatccggtggttgtgaagatattgaaggtttttcatactacaccaagcttcgattttctcacttaagatgggtgataacattatagtttgcaggtcaaaatctacatgggagatggatggattgtggacttcaagaagcgcataggtcgactgtctaagccggacttatacgttagggtacaaaaatctaatcaggagaagatatatataactttattgggtctggaaatgtgtttgattttagttctttcgttgcatatgaacgcagattagtattgccggtgtaccccatgatgagaacattatgaaaacaacggtgaaaaacaacgaatggacacctacatggggagaagaattcacattccctttgacctatcctgaccttgctttgattagttttgaagtttatgactacgaagtatcgactgcagatgcattttgtggtcagacttgtctaccggtttctgaactaatagaaggaattc

SEQ ID NO: 84 - DNA, 101154 bp, Arabidopsis thaliana
tctcaatttcggaagcttgttgtgatacttccgtctgggtttccatttctagggtttatggggtttagtttctaaattagggtaaaatttggggaagaagaagacaacaaagatgcatataaaggagatatgcttggaaggtttcaaatcatacgcaacgaggacagtagttccgggttttgacccgcatttcaacgcgattacgggtctaaacggatccggaaaatccaacatcctcgattccatctgcttcgttctaggtatcactaatcttcaacaagttcgagctgctaatctacaggaactcgtttacaagcaaggacaagctggaatcactagagccactgtttcagttaccttcgacaattccgagagaaatcgaagtcctttaggtcatgaagatcattcagagattacagtaactagacaagtaagtcttatttaaggttttagtgaaaaaaggtttcgtttttaagttttgttaagagtgaattttgtttgtttgtgtgtgtttgaagattgtagttggtggaaagaacaagtatttgatcaatgggaagcttgcacaaccaaatcaagttcagaatcttttccattcggtgcagcttaatgtgaacaatcctcattttctgattatgcaagggcgtattaccaaagttttaaacatgaaacctatggagattttatctatgcttgaagaagctgctggtacgagaatgtatgagaataagaaagaggctgcgttaaagacgttggagaaaaagcaaactaaggttgatgagattaataagcttcttgagaaagatatattgccagctttggagaagttgaggagagaaaagtcgcagtatatgcagtgggctaatggtaatgcggaattagatcggttaaagaggttttgtgtcgcttttgagtatgtgcaagcggagaagattagagataattcgatacatgttgttgaagaaatgaagataaaaatgactggtattgatgagcagacagataagacacagggtgaaatatcggaactggagaaacagattaaagctttgactcaagcaagggaagctagtatgggaggagaagtaaaagctttgtctgacaaagttgattcattgtctaatgaagtgacacgtgaattatccaagcttactaatatggaggacacccttcaaggcgaagaaaagaatgctgaaaaggttacctgacagttattaccttgggttgaaattgttacagattctcagctatttctgacattttttggtgttgctagatggttcataatatagaagatttgaagaaatctgtagaagaaagagcttctgctctcaacaagtgtgacgaaggagcagcagaactaaaacaaaaattccaggaattttcaaccacattggaagagtgtgaaagagaacaccaggtagttttaataagtagaagctttatttactgaacctatcttgtatgttaattgggtttacatcccttgataattagggtatactagctggtaagagtagtggagatgaagagaaatgtctcgaagatcaactacgtgatgcaaagatttctgttggaacagctgaaacggagttgaagcagctgaataccaaaattagtcactgtgaaaaggaactaaaagagaaaaagtctcagttaatgtcaaaacaagacgaagctgttgcagtggaaaatgaacttgatgctagaaaaaatgatgtagaaagtgtaaaaagggcatttgattctcttccatataaagagggtcagatggaagcattggagaaggttagtatgctttccctatgattttttttctttcttcttctgttacataatgaatacatctgtgactcaaattttcttaggatcgagaatcagaacttgaaattgggcacaggctgaaagataaagtgcacgaactttcggctcaattagcaaatgttcagtttacataccgcgatcctgtgaaaaactttgatcgatcaaaggtgaaaggtgtggttgcaaaactgataaaagtgaatgataggtcctcaatgacagctttggaggtaagtaagttattatattgttgttatattattatactttgtcagattgtttgagttctctaaggtgactattttttcaggttactgctggtgggaagttatttaatgttattgtagacacagaagatactggaaaacagctccttcaaaagggtgatcttcggagaagagttacaattattcctcttaacaaaattcagtctcacctagttccacctagagtgcagcaagccactgttaaattagtatgtggatcttttttgttctactgtcaaattcaactctttctttgttccttgctgattttctgctaatttctccaggttggaaagggtaatgcggaattggcactttctttagttggttatagtgaagaattaaaggtgggttggttgcctgctcaaagtaccaagaatctgatacatttgcaattttgcatcatctattagtttatcaaatttctgataaccttatattatgcaatgcagacaattaaatcctctcactcatgagctgtgtaactgctgattttgtgttttagaacatttagttatggacagactgataccatgaatccaactattcaatttcatttgacattctctaactttttgcagaatgccatggaatatgtttttggttccacttttgtttgcaaaactactgatgcggctaaggaagtaagtatttcctagacattagagtaccctgtgttttttgaggtgtgtagagctgtattctaagctggttatataacaaccttacttgacatgtgttttcagctgggcctttgttatattgtcatcacctcaatcttctctcaaaacttggaccggcgatttccctctttatattaatggaatatgactctagcaaaatttaattcctatagttctcatatatgttcatcgttctcaaataaatttttttttttgctcaaaatttgattggtttgcaattgtcagacataatttattttccgtactatcttcttccttatattgagactactctgttttctttagatatttcattcgttgatttgtgtctcaaatggttgttcggcaggtagcatttaatagggaaattcggactcctagtgttacacttgaaggtgatgtatttcagccaagtggtcttcttactggtggaagtcgcaagtatgtcattctttctattagaccagtagatcttcatggcgttcatcttcttgatttcatatagatatggttcagcaaggcctataacctgaccaaaaacattatatattttgtattcctctgttgcaggggtggaggtgatctgctaagacaacttcatgatctggccgaggctgaaacaaaatttcgagcacatcagaaaagtttgtctgaaattgaagcaaacgtatatatttcttcaatttttgatatgctattgctttccttttagaaaaagacactttggcctttgacaactgaattaggcgccatagaatttctaccgaaccatttgaagtaaaaccatatacattttcttcaggttagaattagatctgggtcattgggaactcgaggctcatgtctgttcattggtgatctaaaagaaaatataatcttagctgctgaaactgacactttgaaccttatttagatgtctcatcatcttagatagtcaatcagtttggttgtttctggttcaaatgaaacatggtttagttagtgccattgcagcatattgatataccatgtttatttttctaggatttattgataactcaattatgtttgtgaaggctcccacataatgttgttgtcgactctgggttcctactgcaagttatatggttttgcataaaccctacatgttcttcaaattgcagatcaaggagcttcagcctcttcaaacgaagttcacagacatgaaagcacagttggagctgaaaatgtatgacatgtccttatttctaaaaagggctgaacagaacgagcaccacaaggttttatattttttcttgtcttcgtatctccatttgtctacatccttgtagcttaaatttccgaattatattttttcccttcctattggtgctaaaagacatatttatagtatcactcccttttaccaattgtatatatagcttggtgacgcagtgaagaaacttgaagaagaggttgaagaaatgagatcccaaatcaaagagaaggaaggtctttacaaaagttgtgctgatactgtctccacgctggagaaatccatcaaagatcatgataagaacagagagggaagactcaaggacttggaaaagaatattaaaactctaaaagctcgtattcaggcatcctcaaaagatctaaaggtatcccagatctttcagtcaaagattctttttctttgtcctggacccctggtttaccaactttttgccttttacatttctaaaatggcttcatagcttttggtctatgtttcttcttgctcatagggtcatgaaaacgtaagggagaggcttgtgatggagcaagaagcagtgacgcaggaacagtcatatttaaagagccagctaacttcattgaggacgcaaattagcactctggcttcagatgtgggcaatcaacgagccaaggtactgcaattatttctatctgtgtcttttaactataaagaatatacgagtaacatgtggatgtgacccttctgcaggtggatgccatacagaaggatcatgatcagtctctctctgagctcaagttgatacatgcaaagatgaaggaatgtgatacacagattagtggttctattgcagagcaggaaaagtgtctgcagaagattagtgacatgaagcttgacagaaagaagttagaaaatgaggtctgccctcttcactttgtttgtctggaaatacatgtgttatttcttgcagcgttctccctatctaatgacagatgtcttgggttcacttaattactttgactttaatattgaagtaggactgggtgttggatgatagaggtggatataagtattaggacttcctggtaattcggcttataaaaaaattgaagatgttgtatactcatgggagaacattttactctgagtaggtgacaaggatggagatggagcacaagaattgttcagtgaaggtagacaaacttgttgagaagcatacatggattacatctgagaagcggctttttggaaacggagggacagactatgattttgaatcccgcgatcctcacaaagcaagagaagaacttgaaagactccagacagatcaatcaaggtatgtttctaaggatagtcatagatttaattttgcaacttatataatattcactctcatgcaatgcaatatcaatggaatgtgctttatttttcttttttgtttcttctctttaattaaatgagaaatctctcctctcgtttcctggctattcattctcttataaagtctagagaaaagagtgaacaagaaggtcacggctatgtttgagaaagctgaagatgaatataatgctcttatgaccaagaaaaatataatcgaggttagttttggagggtctgtgcaacatagtttaaaaagcttaaaacacatttacgaactatgtttttttttttttcattttcttagactgacaaatcaaaaatcaagaaagttattgaggagcttgatgagaagaaaaaagaaacactgaaagttacatgggttaaagttaaccagtgagttgcttatttagtttctttacttaaccatgtgattcacttctctttacgatatttaaagttggatccttatcgttagggattttggttccatcttttcaactctactacctggcaccatgtcaaaattagaacctccagagggaggtactttccttgatggtcttgaggtccgtgttgcttttggagatgtctggaaacagtctttatctgaactaagtggagggcaaagatctcttcttgcactatctttaatcctggcgttgctactctttaagccagctcctatttatatcttagatgaggtacatctcgattttccatttccatgaatcattgctcttcctttgcattttcaatacgtaacgactaaattcgtgttgacagtgatcttgaaatgttcacaatcacatgatcttgttgagtttgatgacataagagaagtcatgactttatttttatcaggttgatgcagctcttgatctaagccacacacagaacataggaagaatgataaaatctcatttcccacattcacaggtcataattttacggatttctctgattgtgtagtcaccatgattcaaaaagctttagttatctatttatatctcaaacattactgctgtctgatatgatttctcttacagttcattgtggtttcactgaaagaaggaatgttcagcaacgccgatgttctcttccgaacaaaattcgtggatggtgtttcaacggtccagaggacagtaacaaaacagagctaataacctgcttatatccttaacaacactaatgatgtatatactcttctttcctcaatcaggttggcttatatgtgtgttctacgtatcttttaagatctgtagccaattatttgttggtacctattgtctatgtctagagaccgaagcttaacttaaacttttgttttttttgttgcaaatgtattaagagattgtgaatctaagttatggtgtgcttatatataactgttgccacatgaataatagatattaaagagtacaacaatgttgattaacttagttcctctgtacattgaagattccaaatttgttcatggagctacaacggttcaacaataattcaagctcaaaaaccaagaactctaagatgaaacacactcacagacagacatgaaagtgatggaagatagataggtatgagatcataagtctgtcttcactctttagttgaaggtttggacaatagtgttgtgccatgggtcagacaagtgctgcaacagattctcaaatggtccttttccagtcacattgtgttgaaccacaaaccctaagaatgccaacatcgccaacctccctgcaacaacaacaaaaatgtcttttaagtcttttaactacaactagcagtttcttgcataacaagaatagcggattagtctaagcttaccgtttgctagctctttctccttggcctcttgcgtaggagcaaagttaagcgggttaaagattccaccagggtaaccaacttcacccttaggtaagctgtattgcttaaagatagggtcttggttcacacttcctgggttcttgatgtcttgccaccgtctgatctcaacgtaatgaaacaatatgaactcgatcacgaacaatgtcgacgacgatgcaaaatactgctctttcccagcatcgtaccactcaggaacatttatgattcctaccaacagttttgacaatgtgttaagttcttgaaagaagttataaattgttttaaggtcatgttaatggtaactcaccgatcttggtgaaaacttccggcaaaagcatcccagcgacaccgagcatagcccatcgtccgttgaccagctctgcctggacgaaccatttcaagttctctggatcctctgctagacccaacgggtcaaacccattgtcaccggcaagactgcaatatgtataagagtgagtgagtgaccattattaactaaaccggtatcaaccaagtccggtctaacctaaccaatccaaactgattagtcacggttgtgttcaaacaaattcctatacacttaaactaaaccggtatcggactgtcctaagctaaccaaatcgattaccatgttggttccggttgtgttaaaccgaaattgaatgtagtttgcaaaacattacctgccggtgagataatcaggcgatgccaaaccgggcaaccattctcctttcttagcttcaaccttgaacgacgacgttttggccgatgaaccgatcgatgtaaacgacaagtcgcggttcaacctaccggaagaaccggtgaggaatcttggctttgaagtacaaggtcggaaaatcgaggccgaggcatgagtagtgacagtagccattatccctagctagacttagaagatccgacccgagaacccggcacttgaagaagaatggattggaatcaagagagattgaaagatgagttcagagatggttgtgaagaaataagacttggaggggattttgtaagtttattcgtttcttgaaacgagttttgtggctgtggtttgatgactgagtatctaccgttggattagatgacgtggttgatttgacggaggagattggtttgagaggagatacaggcttatcggtttatcttcgaagcgtatcttaagaggattttaatgttgtttgagattggtcggaataagatagtgtcgggtccattgttgttacacgtgtcaattaaatggatttaaaaatattagagtggagtgaggattctcgtcaaccaatcaaatggaactgaattggcatatgggaaaccaaaaatctaaagtctgattttcctaatcatcaagataggggagtgtatgtaacttgtaaaacataaaaccaatttggatttatctaaaaaactatcttcactttgggcttgtcaaggttgagaatctcgggctcgtttgaagagtgagatattgggttgttttaggcccaagaagaaaagaagaaagagagtgttgaagaacttaaatccatctttttctttaatctctctttttcaagatcatgttcatctttcaaaatcttacagagttacagtgacatttgagattaccttttaaactgttaactcaaatcttataatggattagaagatactgaagatccttataagatattttgggaatattcttcatgcattttgtaggaaattacaaaatttagtgtgctaacagatgatctagccagaccccagaaaacaagatacataagccatcgattcggcctcaaaatttgaaagccattttaaaagaaaaaactgttacaaatatttttgagtttgtagaatcctactatttacattgtagtctgttatataatcccacatttgattaacactaaaattttggagcaaatgatgagattgactattatcttgacctttttaaaaaaaaaacaaattaatctcttctctttttattattgaaaaagtgtattaggaaactagctagatgtagcagtctcaagctctatataaacattatgtatgatcacttttattattataagtgtgaaagtaaatacaaattctatccattaaaaactcttatcaaagtctactagagagaacttgtgaattcaaaaaactatttttaactgtagttttttgaaaattaagtttatttgttcgattatggtccatacttttttcccttcaatattatagataaagacgatatccaaacctaactggaaatcaccatgcaaaattcatcacaaatttaagtttacgttgtcatatattatcactttcttggaaattcagagaagcatgaatatatcaacgtaaataagtttgtcagaggaaaataaagttcattagaggacgacccactaaagaagaagaaatatattagacaagtcgtataattagccaacaacataactattattattattccaatctacttcacgaaaagctcttctctataagcttcacaaactcataaaaatcaatttttccatctctattctcatcataaaccttaaccatcttcctacactccatctttgtacactcatcgtatcctaacaaactcaacacatgttttaactcattttcatctataaacccatcctgattctcatcaaataacctaaacgcctctttaactatctccttacccatcatctcattcttctcaagcaagtactcttctccttcttcaatcaaacattcgtataaagcttccgagtcatcgattatcgccttgacttcttccacggacgttttgatatctgctcgatttgggacaacaactttctttatgattgggagctcggtattttgcttattgtttcttattgaggtgaagagaatgtaggcattagagaagaagagatggaaacgaaagggaaaagaagaagagaagtcttgaattatcatcatgagattgagaatgaataagaagatgacaatggtgaggagagagattgggctaagaagagacgaatcctccatattgatctaaatttatgtgtgtggaataccataaacaaaatttctatgaagcttttatttgtcttctttggtttcaaaggttggataataagtgtgttgagttggtcctattttataattcctagttaagtatacgaagaccaaaacatatcttactcacaaagtctgcggaaagagtctccatgtaaattgttgagaaacttaccaaaggaaagaaaaatgctactttaaaactcaccgcaattcaattgaaagtattatattcatacttttatacctaccgagaaaacctaagaaactaccatcgactcaagctttcattaatgatgatcatactaataaaaacttaatgcttgttattaataattaatctgtattttcatttcaaaattaatatatgttcttgaaaatgtttggcttttcaagtaataggtggagtatatatatatatatatatatatatatatatatatatatatatatatatctcaaaatcaaattgaaatttttggactgaaccaaatggagacatggaagttaatcttgtcatataagaaaaaaacaaatgtttatatatattttgatagttgaataataaatgtaatcaacttctcatcatatccaagaacacaagacaatagagttgaaaattgagtgagagcatctttcattgtcttggattccaattcatggaaatttccatgcaatttccttgtaacgttttcctttaaatttattatcttgttgctttcaccgacccaagtaccctttggaatatttgatatgtagaaatattgagactcttcgtggtagttcagtttcaaacccatgatcagtttttgattcaaataaaaaacatttattattatagttgaatgatttgaaaacctcggaatctaaagttcacgtggtaattttcttaatcgtttttttatggagtataataggcttaaaaaattattaactaaataataatgtaataggcgctagactaattcaatttggttactattgaatcaaaatataaatagaaggctagcaaattaaattgaattaaatataaataagtttgaaaatattgaaatctacatctagccatctaaaacatagatgagaagtttcagttgcgataggttttagtacattaaattaaattcgaactaaccttataatttgttctattatatagttttgactggttacgaatatcgaaatggtttaaacaagaacatttggaagaaaaaaaaacatgagttgtaaaatatattaatcccaagagcaatgacaaagttttgtacttttcatgtctacttcttatctttgtagatagaaaattacgaatatcgaaataaccatcttgaatatacacgtatgagtaacgagcccatatatttatgttcgtatgtttatgggcctaatgagattaagagaatggattggcctacgacgactctcatctcccgaagaatctgtaatcttttgattttcttcgtcaaattaaaccacaaaaacctctccatcgattcggataatccacaacactctgcgatgaaacccgacccgaccagacgcagaaacagagccttatcttcttcttctccatcaaagacccgacccgaactatcttccgggtctcccaaccggaataccggtgaagcccgtggtggaaaggtgaaaacttcggccactttactcgaccgggaggagatgggtctttttcccgggtcgggttacggtgacccgaatccagaacctaggagctttccttatagtgtgaagcagcaatgttgggaaaaagcagagaagattaaaggaagagatcctgagcgttggaggagagatcatttagggaacattgtgtttaggaagcttgttggttgtcctggatgcttgtgtcatgattatgatcacattgttccttactccaaggtttgtcctttacaattctcacttcacgaataatgatactctgttttctggccaatgaattctagttatgtaagtttaggattgggctcaaagcctcaaacgtcgtgaaatgtataaggaaagttttgcttttaggttatttcaatatagtttcattgtgagattgtgctatttacttactccaaggtcttcctttatgttcttgtcgagtactactctcacttcatgagactctgtttttccaatgagttcttgttattaagggtttaggattgagctgaactttatgtattttgggctcttttactgtgaaacgtgttaggggattttggtgtagcaacttgatgcacagaaaattttgctcctaggccattttaatacagtttcttgaagacgttttgatcactctgaaataaatctttgaatttgtgttatacatattcttgatttgggatacgagagataagggactgaatttttctcttgtgctctcatgttgatgacagaaccaacgtctaaagttaaaatgctggaagatataacttgagaactaaacagtttttaagtattgctggtttgtatttaagaattgaatctgccaagtttctttatcgaactagattgtagaacttgcttcattatctttcaccaagtaagttgaacaatgagaggaaatggtattcttattttgcagcatggtctaatatgagctattattgtttgttttgtaatttctctttcgtcgctatcaataggatatgtgtccattagaacacgcatttgatgaaccccataaagatttcttggatctaaaagtttgctgtattcacatcgaagataggattttctgatagagttttacattcatcctttctatgtatagttaaaggcttaaaggattgctcagtaccttgttagaactattactgataagttataaccaacaattgaaaagcttatgaaatttctcgaaagggaaaaatagtgtctaaaatatctcggaagggaactattgcttcatgttttctgctttcagttgaactgtgatctgattgtgacactaatttccgaaattgagatttatttcactttgtattgataatgaatctatcttcttcttttttaaacgcataatgaaactggattcatagtagttatagagtctgatatgcaggaggatatggtcatctacatgtaacattagtcacttagtactcatgctttctactagtatctgagcaattttgttttccgatctttatagggcggcaagagcactctggaaaactgtcaggttttgcaggtatgcagtcactcgtatgaaaatttaaactaacttataacaaactactatttaaggtttccatgttttaaaccaacttacagtttattcatatctacgacaagtcttcaatatctatgtttatagtcactattctctcataatttgcctcatgaccggctttaaagctttagtggaggcttctctcagacgatcggatttccacagaacactctcttgcatattctcctttgcgtttacttataaacctctccatccaaaacttcaaaccaaacatactcttttaggcctgttgcttctttctattacttggaatcgtttactttgtttcgtttctacatttcaggcaaaggtaaaccgatcaaagggtaataaaaccgatatttctcgatccgagcttatccaaaggagttcttactgtcgagtcgctggtaaatctgctctctcttctctatgaaacaaactataactaggtttttatcctaaactgttctttacgaaaaatttgtaggccgagatatggatctgattgagctaacagcttacgggaatgtacagcgtgcacctacgtctagcggatgcagaattcagtgatctgttgaagatctattgatggaattgaaaatgatgagtttctcaatatttacttggtcaagaatctgtaaacttgtagttcttctccgagttacttgtgtactcattagtcattatctttcctatattgtggacatgtaagtaagttgtaagttgtaacattagtcatttagtgctcatgcttcttctatattctatcaagttctattcttgttattacattcttttaaataaaaaaataatgccttctactactagtaattttgtaaaaaaaaagaaagttaaatacgactttgatcatccatgatcaaatatataaatagaaatgtgaaaagtagcttttgtttcttttatctttaacggaagtttgcttttagctttttcttctaactagaagcttacttttcgttttctttccaattttcattaatttataaaataaatacgactttctttctcaatttctccaaatttgtttcttgttattttttcggttcggattagagtgtattcttcttccgatttgataaaagacaattctgagcaacaaataaattaaaggagaataacttgttagctagaacggtgagtacatattagttatttacaaattacatgaaacattttaaatgaaaaaaaaagaagacaaaagtctaaaaaagacatatctttttgttgcctttattttgataatcttttgggaggcgtgtcaggtttcctaaaagaacctaaagttggttacacgtgtcaagatcatagaagatgccttcctttgtgggaaagtcctttttatttattttcttgtggaaaatctactcaccaaagttgtatttggcactcattctctgactggatttctctttttttttctttggcaaaatccataaatgttcagttaaatttgaacagatattgccaccgttccaccacgaaattaccagattttctagtattaccatttacatgttgactaaaaaactgagttcttaccagaaaaataaaaagaaacaagctgaactctactaaaactacaactacaaaggagagtagaatcaagtggacgtaccgacgtagactagtttaaagttacagtcaatggaacgcatggattgaattgaaaagtgcaatggccttcttatttcaagtggatacatgaagggatgagatttttcataaagcttttagtggagggttgactccaacttccatatcttgaagtggtttactttgatctcaaaagtcaacactaaatcaaaagttaatttcccaatgaaaccagtttcttagtgagtagtgactatatacatcaatggctctctcaatacatctttcttgtaattttctccatgagtgcattatcactttatccttctcccatcctctcaaattcatattctcctcttttgtttcctaataatatattgtttaccggatttggatttgaatttggataattgacacagtcacagagtgacaacgctaacaaaactatattatcttctaatggattacatctaatcaaaatgatagcaattcacaattataaaattatatatcatagtaatgaaatttacgatcgctgattgcagtaaaaggttaaaagtatagaattactcaattatatagtcataccaacaaaatgcttttagttactatgatatgatatttagtcatagtaaggttttctagcgaacgtatttaattatggggccaaccaatagaatagagtctttagatttagaagataaattaattaaatttaaaggcgaaagaagatcagaagattagttaggcctaatttttagttaattgtttctctttgatttgaaatgcttccatttttaaatacagcatgcagaaacatgaaaaaagaagtttcatttcacattgcttcgtatgtacttatggttttaaacatcttaacgacgttcttgtctcctatttggaaccatttgtgatcctctaataaacaaaaagaaggtatgcctaatatcttcgtgtcttgaacaattatagtggtgcgtttgtggttgaatcgcgtttggcattagtcaatgttaaattgggggccaaacttgttttttttttcaaattttcgtaaaggcatttgggtgaaaataaaaaatatcaattcgtaatttacttttacaaattttaataagaaaatgaatgttaatgtaaggtagggaaaaaccatggaaaaaggaacaaaattgctttgccacaaaatgaaaaaggcagaaaagaacagtattatataaaaaggaaataaagcaacttgacatacttttaattgtaagaatggtgataataatattatttctatggtataaaatagaagaaaaataatatgtgtggctaatagttgtttgagcactctcaaatatctaagttgctttcgaagacacagatcaaataataaagtaaaaacgggaaaaaaacatatagtgacccatctttttcagcatcaatattaaaaaaaggatacaaataaaagaactttttcaaccttttaaattctgattgtctgtacgtggaatggaaccatccaatttttcttcatactgtattttttcatccaataacattttctttgatgcataaactatattgaataagtttgtaatatgtttaaatttcatatattctatttttattttcaagtaacaatccatttgttcttttattagacgataaaaacggttaatattcaataaactaacatggttttgttaaaccgtttctatcgtctaatatttttgttttatgttttctaattttatccagattttatggataaaaatttataaaaattaaaaaatattaatttgggaataagtagatgagcaagcatgttaaattatcttataatgattatttcgaaaaattttcgacaaatatattaatcccttaaattaaaattggatggtcccatttcacaaaaatataaagaaaatgttattggattcgatatttacacagtatgcttaagagattttgaagtgtattgctatttcaaactataatatattgaaaatatcaaatgagtttttataaacaaattattaaataaaccaaactataaataacagaacaattttaataactaagcatatatatatatatatatatatgttaaaaactttggaaatagctaaaaacacttggaaatttattattattccctttgatcccgatataaattggtactgaacaagacaaagtaattagattacaaaaaatttgttcttcacaagacaaagaagttgcaaaagaagagtcagaagagtgtcggttgaaatgccaacgcaacaacggtccacaccaactttttaccattaatgttatcttccaacatttcctgacaaatgaagaaagaaagtaaaaaaggtaaatcaaatagtgtacagagaaccaaaacatgtaaaggaataaaggcaatcactagaaagaagaaaagagtttgattctcaaaaactcatcattctccagtatcatctatacatacaatcaatcatacatatatacatatacatatgtaactctaaatctgttcatggaaattgtgtgatcttgatagagcagcagggttagcagaaagaacaggggagttctcagctttgtcgttgttatacatctttgtcttatgatcaaaccctttgaacataccaccggctttgcacatcgcctcgttcttgattcccaatgttgtccatatcgagctctttgctgcttcgttaggatcatctattctcaacgttttcgggaccagaacgcacccggccttctgttttcgctctgtctcgttgtcctttttcgatgatccttcatctctcggatgctttccgagagtcggagagtttgtatttgaacacttttggcttataggcgatgaggattgatgcggtggtagcattgggatggtccagtaagggtaaaacggcattggataccctggaggcgggtaaaaacctggtggaggcatcgctggattccacgtgtaaggccatggaacacctgggatgcaagcataaccattcatgttattgttgttgttgttgttcatttgtgcttcaacaacactgccgctttgtgctcttgattcatccactgagtgattgttagaggtggtcacagaggatccgcttgagcaatcatctccattctctacccgagctacaagccgttgatccgctaacccgtgaaacctgttcctagcaccgtttgagaccttttgatcttcttgtagcttcatcacaggtgtcatgggagcagcaacgtgctgctgctgagcttcgagaccaaaactcaagacccttgtgtttgcctgtaagcccgggtcaagcctcgcagcctcaagagcctcggaaatagtgatgtgacggtaatgagaagatgagcttttgttcttacgacgtcctgcccccacaggaacattcctcatagtccctccagcagtccaatatctctgacaagccttgcagaaatgacgaggctggtttatgttgtagttgttgtaataacagaacttggtctccatgcttttgcatctcggacacggtagaatcttagtcggtttctttagggttttaccatcaggtgtcgtctgctgattatcctcaggcgtgtcactactctctatctgatcagttgatgtcgcttcctctttgtccaaggtttcgggtttcgaattgttaaaactgttgtcgttacagttgttgttgttcttatctgataactctggagttacctgagatacaagaaacactaaattaagaacacttgcaatgaataaaagaagtttctctttatgaaatcttaatcaaacaattattcttcatcagaagttcagaaccaataatctctaacaactaaatgaactagtaatatcttaatggtaacacaagactggaactatgttataatttcgttcatgtaactcaataacacaaattgtagatccaaaacagacaaaacagagactgaagaagtaactagttaagttaattactagtacaaaactaatctaatcatatttatttttaggacaattccaattttcaggccaaaattactttttatcaatcagtaccttctctggtgatttgtcatctccgccgctccagtcatcttcttcgtcatcctccaccgtaactgccgattcaaaaaccgacggaaaagggattttcataccgaaaagcttaatagctggatctctagtctccatcatcatttttttggagcctctgtttcttcttctctctatgtctctgtgatttttttttttgttgttaaagaagagagatttgggagagtgtgaattggtgaaatttagggatttagaagatcagtttaaaagagaaggaggaaacacgtcagcatcacaattcaattctcagccacaagtttatgtggcctctgatattttccttttcgctcattaataccgggtcgggttgtcgggttttattaattaatcattaatatttcctacctttttatgtgtattattcgcatctaatcctttttttttgttcctttattttctgtcgcacatatttattcgatcattcaaaactatatatatatatatatatataatattaatcataaacttaaaagtatcagttttttttagtttcctatcagaaaagaagttaatttttattgtgaaaatttgtttatttgttttttataattggcgtttaaaaatgaagcaacatattatattggttattaatgtactgattttttttgctttataaatcatctctacatatttttctcttcattaaaaactgtaatagaggataattgttggatgtaccatggattcaaagaattttgtaaatcatcgagtgcaaactataataatagtgctcaaatttgatagattctaggattttcgttcaactttacttatagttgtaaaatttggcactgattgtaaaacaaatttcactgtaagcatcatgacacttcaaaattacttaatacttttttttacatcattacatggtatttgtattcattttaaatgttaactataatctttggcaatctctcggtcattcgtctaccaatttttaggtaaaaaatttcatactaaaagtttttattgtcatataacttttatgcaaaataacatcacaatcgatatgaaaaaaaaaaacacaatctatgtaataattaggatttgactatgtagatgttttcctaatttataacattaccgttttgtataatttatttctttagattagattctatacaactaaacattttgctataccataggacagtttgattttctatagaatagatattagacctcgttggaattggatatcagttttttctaactggataaagcaaccccaaatcaaatttagtaatgatactagtcgatccgaaaaagttgttgagtatggtgataagggtgagttcgtaatagctgttgtgtagattataaaacttggccaatactatgtcttcaaaaaacttgatctcttggatgactacaaaactgcatatctgaaagtagtttatgcacattcaatggagtggaggtttaggcaaccctccattccagatattgctgtgaactagatgatgttttcatccttctttagtaagaagagaataatctctttgactattttcttagtttgttgtctcttattttagtgttcaaacatttttttggtttggcccaatagtaactaaaactctttcatattgatatagtaataatgccatggtctctctttcttaatagtctgatatctatttcgtttgattttcttttttgctttcatttggtgattttgttcctttattcttaccattaaacttgtgttttatggttttgttctaaagaatttatggacgtaaagaaaaaaaaaagataaagagatttaagatcagaataagagcaaaaaaaaaaaaaagcaaaggaggttggattttaatgtcatgtcaatagataattggctgtgaacaaaaaggtttttaggtctctgccacattgtacaaataccaacatgaggatttttggaggatctatatcaaagtctgtcttttgccacgtcggattctgacacacctgctcatggatttcaataaaaagattgatgtctttttcttcctagatctaatcacaacccttcacgtgttccactgagatcgcatcttaatagttttattattttctctcgcttattgattttctttaaatggtaacaatatgtggaactaacgaattttagcatttttagctaatagcctaatacttatgtaacatatgtttctgtcgttttttagagggaaaaaaaatagacattacttcttaaatattagcattacatatttctcatttttttcaattccttaggtaaagtttttttaaaaaattaactataaaatgaatttttgaaactaactctcatcttcgaaagagatgttacataacctagcgtgctatttaaaacacaaattaagtatgttttcacaatacctttaaacttaaatatatttatctaataagatatttaaaaacttttcattttcgttaacaaaattttaaatgaaaatagaaaatatatatttgaaatacaaatcttatttgttaatattttggcttacagtggcaaaacagtagtaccatttaatgctattgtttcttgtgatatttaatattccaattttttttatttttttctaaaagtatagaattaatattggaaaatagtatcgttaagagcatatatagtgtctttatcagaaaactaataagtgaaatatatttgctcagttaattattctcagtttgttttttttgtttgagtgcagtacaacatttgtacttctcctagctctgaaatagtttttttttttaattttgttttaaaagattgtttaaataaatactagataaataatatatgtgaagataagtcatctttgtgtttaaatcttgtctttacacagcacgactggcgagatgtggatgatgcgtcgtgaaaaccctaattttctgtacttggttactttaaccctcgttgcttcgaagagaaacaaaaaatatcaagtaaaataaattattccaaatgttcgatctccaattgagcctatttagtactccaccacatatctttctgaaagcccattttaaaggtccagatttaagcccattttaagcctcaagccttccctttttgacatctaagctggtcctaattttctatgtatatatttctttaacggataaactaaatttggactggttcgaatcgaacccgaaaccgaataagaaccattcgtccacttaagtcgatctaatattctaacttctaagtgttgttctccgaggaggtgctttcctcaaaactgaaaagtaaaatatatccctttctagtggtttcttaaaatgtatttcctttgctaatgtcaattaagaaaaggatacaaaatgataactaatatacttatattatattggtgcacacatagagaaggtgtgatgtgatccaaaggccactattgaatttttattaagtttcttgttgacttaaaatacaaaagggaaactttccaagaacacaaatctttggtgatatattttgacattttgccgaaaaagcagtgcatgcatatggccataaagctagcttcattaagtggatcgcaattaaaaaaaaagtatccacgttgatggaacaactataactcctctctcccacattttttttataaattcataaatttgaaaaactaacaatgccctcgatcttcatcccttctggatgaagagatttcaaaatttatgatcgaggacatttgtttccatcgagtcatcggtcgagggcagtaaaaaaaatcatttacttttaaaagatttgaaatatatgaattatctctaagtacttacttttgagttttgattttataagagatgtaaaagaatacaaaaagttgtatctaaataaaaatgaatgccgtatatgttaagaataagcggtatgatgtattagccactatagaagccaaattcgtgaagtgatcataaaacatcattatgagttagtgccatgactttgacaagcatgtatcatatcatatctgcacttccatatactctaactttatttaaatggactatttataaacattgatatgtttactttgtcgacatgtctaaacaattgaaaatggtttaaatatttttcaatactgtctatgcttagctatcctccattatagtgattcgccaataaagaacacatttgtaatacctaaaatatttttttggcaaggaacgcattttgaggtcttccaatcatctgtaacacccaaaatttcagtatatgatatttacttcttagcaaaaaaacaaaaacaaaaatataagtgtatcttcgaatttatttattaaagtaagaaagattttacatacatacaaattgtttctctttattggttgtattactgtaagatatatttttctgttaaatatttgatttcatgaaatccagaatccatatcaccagatggtggatgaatttcaatctatagtgtaccatgttatcaaaaaagaaaaagaaaaaaacagtatatgttccacaaattaggcattttataattgccatagttgatattcctaacattagtgaacaaatatgattagtcaattgaaaattgaacaaagcaaattaaacgtgaattctaaagcactagacacaaagcttcgtttgagtcgacccatttgttagtgtaatgactaactataaaatagacacgcgtaattaagtgatcatgcccattggctcccacaattccaccactttaaacagcatccataatctacaagtttttcttattgatcatttacatatgcaaatgattcatacttcaaggaagagaacattctactaaagcaatctccactgactttcaacattgactataatcttatcttttcttttaaaacaatatatagtatgtttaatgtacaaacactaaaaaccctacggataaattaggattttgcttatgtatgatggagtatacacacattttttcatattgtaattataattagtatcatatattatatcgaacaataaacgtggaaaagtgaaaccgcgtcgattacttggtgcttcgtatatgttcttttaaagtttagacattttggtgggctgatacaaaatactatagcagtccaaatcagattaaaaaaacattccatgtttaatttagtgatgaaagccccaccacgacaatattttaaaatgcgcaaataggaagaaaagaactataaaggaaaccaccacaaagacaaaactcaaaacaagttggaggaaaaagagagacaaaactcacaacaacatcaaggttttaactaaatttaattttgtcataactattcatatatagtcaaatggctaacaaagctctcattcatctcctcgtcatcttcttcttggctctatcacacatcttcttcttcccttcccatgcttcgagtaaaatcttcatctctcttaaaatcgtattttatgtatttacatcatatgttttaacttatatcatctatattttgtacgtatacaggacttgggagtttgatggagaagccaaaaattgttcgacctcaacaagatacactaatggttagttatttagctatttatctgtgttcttgagaggttaaaattaggttattaaagattttaatttggttttgttttacataatcaatgctattaggatgtgaagaaggaggtcgaagaaaggatggtgatggagttaaacgactatccaggttcgggtgcaaacaatcgccatttgccacgacaacgaggctgcgtcgttgattgctgatcgatatataaaatgacgaaaaacgaattaatatgattatagctagtatcgataaattgatgtataagtaagatacgtctaattatttttcagaatatgaattgagttagtttaacattggagtctatagacgattagactatatacttgtctactctacggagaaaagcatagttttatttatgtagttcagttggtaaatcaatagatgctattgttaataaaccatatatatggatgatatgtacaagcctttaatttcaatttggtgataggacataattggtttactgccaactaatagacattagactgacgtaaagtttttcaaaataaagataagtcactactctccttttcacttatatttaccaaaaattgagttagttaacttcttattcaaatttatattttgctgatatatcttatatactcgtcatgttttacgccacggatcaatataaaataaagatttaaaactaaaaactgatgtggaaaaagagtggtttaataaagtaaaacaacaacataattgaagttttatgcaacaccctaagtgtggactagataggaacatagaggacaggcaaaaaaagaagaggtaattaacatacctaccttggagtacatgccactatgccagttgggtttgatttttaccctcgaaatattagtatgttaccgttcatctccgagtaggtgttgtgattttatagacgagcaaaaaacaaaagtggttcatgagttttgtcgggctctctccaaagagacaagattgggaaagaatactctatcttctcattcttgttacattgattttgttttattttgcataggcgatgcagtaaaactattaaatatatactcaaggtttcaattatcataactggtgtgattgttagagggttaaatttaagatttatataagatgtgattacataactcttgtattaaaagtgtttactgtatttgtatcactcacatgtaatcattcaaaaaaatactaagatgaagatatggtaaaacatttcaacatagaaaaagacacaatcgataacaaaatagaacagtacacttgacctaaaccaatgcggtaaacacacacacacttatatacatattgttaataattttgaagttatgctatacaacttattattttgtatatcaatacatattcaaatagcttaatatttaaagcgctatgatgtcaatttcaaatactgaaattattttcaaaactttgtcacttatattatcacttataaccattctatatatcttcccaccgcgaaatttataaccacacttttacaaactaaatttcatacattttccaaatagtattgtaataaacaaaatagtttaaaaataatgtaatttacaaaacaataaatttttaatataaaacatattgatcagcaaaaatgctggttgatgcataaaaaagactcaactacagaagaaatattcagcacacgatatcacaagaagaactcgatgagacaaaaagagcccgtggcatcgatattaaggtaaaacgcatcgtttggttgtcgtacggacactactaaaagacgcttctcacctcttggcggatcctacgagacaaccaaacacagatctgcttccttcttcacctttttttttttttttttgtaattttggtttccctttttttttattaaataagatttattcctccatcgttacctaatccccttcttcgtcttcttcagcttcactgagtcttacgaacatagcaaaatccaaatcaaattcctgaagaaacctctttcgctctcgtcttcgttttcagatcaacaaggttagattctcaacttctcgtttcttttttcttcttcatagatttaggatttcacctgagtctcgtttgaaaaacctatgaaattcgatctggttttttacgtctctcgtcgattagggtttctaatttgtttcatcgtttccgttttcgatttctgaatatgaatcctttaggtatctaataaagttttatatatgttatgtgaaaacagaaatggcaacagcaacatcagcttctctgttttcaactgtttcttcatcttactccaaagctagctccataccacattcaagactccaatctgtgaaattcaactcagtccctagcttcaccggtctcaaatcaacctctctcatctccggatctgattcctcttccttagccaagactctacgcggttccgtaacgaaagcacaaacatctgacaagaagccttacggattcaaaatcaacgcttcatacaaagtagctgttcttggtgctgctggtggtataggtcagcctttatcacttctcatcaagatgtctccgttagtctctacgcttcatctttacgatatcgccaatgttaaaggagttgctgctgatctaagtcattgtaacactccttctcaagttcgtgatttcactggtccttctgagttagctgattgtttgaaagatgttaacgttgttgtcatccctgctggtgtgccgaggaaacccggtatgactcgtgacgatcttttcaacatcaatgccaatattgtcaagactcttgttgaagctgttgctgagaattgccctaatgctttcattcatattattagtaacccggttaactctacggtacctattgctgctgaagtgttgaagaagaaaggtgtttatgatcctaagaagctgtttggtgtcactactttggatgttgtgagggctaacacttttgtttctcagaagaagaatcttaagcttattgatgttgatgttccggttattggtggacatgctggaatcaccattttgcctctcctctcgaagacaaaaccgtctgttaactttactgatgaagagatccaagagctcactgttaggattcagaacgctggtactgaggttgttgatgctaaggcaggtgcaggttcagctactttgtcaatggcttatgctgctgctagatttgtagagtcatctcttcgtgctcttgatggagacggagatgtctacgagtgctcgtttgtggagtcgactctgactgatcttcctttctttgcatcacgggttaagatagggaagaacggtcttgaagctgtgattgagtcagaccttcagggattgactgagtatgagcagaaagcactagaagctcttaaggtagaattgaaagctagcattgacaagggtgtcgcatttgcaaacaaaccagctgctgcagcagctaactagatcgcaagctgataacatttttcttctgatcatttcgagttttgttttatttttcatatttgttgcatcggcgagacattttcgtgttgtagaataaagaatgtatttgcttcagtttgaagattttggaacatggcattgaagcagaatttataaatcatcaccaaaaaatcattacaagagcaaaatgatgacaacgaaaaaggtctatgatcttttgtttgtgttttttcttgtcaaccttcttagcactcgccaaacatttcttgttgcatgcataatatcaccattattatatttgtaaatatatgttttgaaatgtaatttagttcttgatgacattggttgcaataattatttaaactgttaagttttttttgacaaaagtcatagcgattcacaaccgtctaacaacggaagatcgtatgtcgaactagaacgtcgggactaacacggcctgtatcttttgcggtgatttaatggaggcaagacaccgtctatacttctcttgtggatatgcaactgaggtatagggaaatttagcacaagaatttctcaagaatcatctcaccactagttggaacaaccttctccaactactcccgaacagcacctttgaaaagaacacatttgttcttgctctattgcgttttccaagcttcgttccactgcatatggagagagcggaatgctcgttcccatggagacactcccacatcgcaagttcgcaaacatatctcctccatcagtgaccttcatgggcgcaaatatgaaggatctcttcaattattcatggtttgcgtaaagaagtacatatacatcatttttctctaatccttcaaaaactcaaatagatgaaacacctattgtaaaaacagttttttatttttattttttcaacaaattttacattcaattaaaaaaaagaagttaattatgagcaaaagcaataaaataaaaaaaatcatttctaatttattatatatgacaactttaaaaaatgaataaggttaacataactaataaaaataaaataaacaataaaaaagagggaaaaaaatcagttatgtttattacatagacatttaaaggtactaagcaaaattaaggtaggcacaattatttttaagtgaagtcacatgaatatttactatttctattataaggaaataaattagaatatactataattgctctccaactttcttaaatctttaaaaatgaggtgttaggttaattaggttgtgagtcagttcctccaacaacgttcgatggtatagattactagctcttgagaatttgtatactatggtataatttaatgtgctcttgagaatttgtatactatggtataatttaatgtaggcagattttttattttattttttattgaggtcacatgaatacttactatttatattataatggaaaattttggtatatactataattgctctccaaatttcttaaatctttggaaaggaggtgttgggttaattaggttgtgagacagttcctccaacagccttcgatggtatagattattaactcttgatcgtctgtacagataaaatgattttcaattgttttgcattgttgttttcctgtctttcttcatgttataggatttgtcaatggtttgtcagctttgaaaatattgcatgtatataacaagagaataaaggattttaaaactacatagaatattggtaactaatgatgatttataatggaaaaaatgtaaactatttgacatacatgaaaattagagagtgaaacgagagcaatacaaatagggcaggccaataaattattggaccttgtgctatgctccaaatttctttacctaaaactctaaatatttaaaaactagaccctattttgcaattatttgaaaatttggactctaaaatatattaaaaaaaactgaataaagaagtgggacccggtgcactagcacactcagcacctcccaagagccgggcctggatacaaatacaataatttattatttaatggtagcaaaaccttacatgcaaagtaaacatatatatatccattatatatatccaactaattttgtagggagatcctaaaaaatgtggtttttaaattcgtttggctggctttatttcctttatattctagaaaattgatgttgaagcgttaattactcatttgcacacaaaaaaagagagttaattacttgtttttgaggattttcaaataatcaatatttgaaaacttatactaacaattaaatatttttagccattggtttagattttttttctttatctttataggaatgtcaatagcatataaaataaaagtttgaggtttaacgaaaagagtttaacctaaagattctatccatgcataactagaaagctctttaacggttatgtacatacatcagatacaaactttgtgacattattgcaatcaacataagttatgagcttgtttcaaactcgtaatgattagaagaaaaatgttatcagcttgaatcatcaccaaaagtcattacaagagcaagagccgcctttaaaatgatgaaatctggaacggtctctaacgatcacgatacgatcataaacatcagatacaaactttgcaaaattatgacaatcaacacaagttctgagattcttggtcactctaatggttgttcctggtggagtcaccagaatcccaaaggctatagctagcttctcgctatggtatcttaacgcgtatcccttttcttcttctgactcaagattgtgcagttccgatgtaatttccgccacataccccgcaatcttcagctgctgattgatttccgccagcattttatagatttcttccttccgcggatgcgaaacatcgtctactataaactcatgaacggttccttgtagctcgatcgcgctgcatccaggtttagtatggattcttttctccttcattaaagaacgcaattcagtcactttctcccatttcccaaccgtggagtatgtgttgagtaacagaacgtaatctccagcttcttcggctttgagttcgatgagatgagagatcacacgttccccaagttccacatctccatggactctacaagccccgagaagcgtacgccaaatggttgagtccggtttcatctccattgacttaatgagactgtaagctttatcaagtagacgagcacgtcccaagaggtcaacaacgcagccatagtgatgtaaatttggctttatcttaaattcaccactcctcattctatcgaaaaacatcattccttcagcgaccagcccggaatggctacaggcagacaataaaccagtgagtgtctgttcctctggagagattccaaacttcaacatttcgttgaaagcttcaatggcttcttttccaaacccattcatagctaaacccgagatcagagccgtccacgagactacgtttctttcacgcattccataaaatacttggtaagccttatccatagacccgcaacgtgagtacattgaaaccagagtgttactcaaattcaaagcaccactgagtccattttcatcgataaagtcatgaacttgtttaccaaaatccaacgcccccaagttagcacaagcttgtaaagctaacaaacatgttacaccatctggttttacacaaccatcgacatcgttcttcatcttatcaaacaaaactaaaacatctctcgtacgtttattccgcagataacacgaaaacagcacattccaagaaacagtatctctcttgggaatttcgtcgaacactttacatgcatcagtactgttttcgcaagtggagtaaagatccatcagagtcgtcataagaagactatccgagagaaacccatcactgaaaatcttgccgtgaatctgcaaaccaccgagtaagtcacctgatttgatacaacacttgagagcaaaagaagacgagagcggattagcaggaagagagctgtttcgtcgaagagatcgaaacaagcgaaacccttcgcatggagtttggctgagagagaaagctctgatcatggtgttgcagtgagagagagttgggttcaatctctgggagaaaactcggcatgagtaattgatgtctcgaggaatcagagagagagcgagacgagagaggaaatggtggaaaacgtcagagtttctgattaaggaagtgcggagtaagagggcgtgaatctgccggagatggagttttccggtggaagatacgatcagagaaagaagatgatcgtcgccgctgctgctgcttatggacttcaacatagtcttctggtgaaaagaaagtatactaagctttgatttaaaaggttttactaattttatttcgttttaagtattaaaacttgaagttttgatatatgcaagcacatgatgtaaaacagttttatttttggttttgaataaatattacattcaattcaaaaaaacattatgagcaaaaaattcaaaagattatttctaattgattatatgtcacaactttaggaaagtaaatgaggtttacataaataatacaaatagaataaaaaagagttgaaacatattcaatcatctgtattaccttttattcaaaaaatcgctagatgctaatattttattaattatatgtatttttgtataaaatcaaataaattagaaataagaacaaataaatagaaaagaaaaattatatatttatatttaatataagtaaaaagagtttagaaaattaactattaaataaatatagttcaataaaaaaataaattatattaagaatataaatttaagacaatgagattatatgtcacaactttaggaaagtaaatgagattttatagggactaaaaactaaataatatttattttagagatttttgcctcataaactttacaaaaaaatatatagatggaaaaaagacttccaaaaaacttatttcccattcacagcgttacattttgatttgttgtcttttttctatgcccattttgttattttctatttggttttcagttcctaaaagacggaagttatattatttttatttatttttagtatcattccgcaagtaattaaatctatacatgttttagattttaatataaattctgattgaaaaacatactaattttctctgaacgaaagttcattaaacaatgttggtgaaaaagaaagttgataaaaacaatgcattgtttgatgttaccatactaacagtacaacggcggcgccaaagtcttttccaatatactagtttcttttgacatcaagtgattttattaatagatggtaccataagaggttacaacccaaatttgtatcaactaccaactaaacctatttaaagagtaatgccgctttactctcaaacatatagaaataaaagtaaaaacttagcccaaagtttggtgaaagaagctcaacttaaagagcttaggaaagatcctacaaatgatattctatcataaaaggataaatccccgatgtactatttgaatcgactaaactacttttaaaaccagttaagaaactagaaactaaccctagaagaacctcagtcaagcttccttgttcattactgtaggataggcccatagtttaatctctttttaggtaggatcgacagaaataaaaaacagatgggcaaccatgcatggtaattctcgaccctgtctccgagggacagttgaatgaacgactcatgaatactgtcggcacggacgagccaataattcgaacgagtttagtctattttgaattttctagctaccttataaataaaaagctaaatgacatgtaacttcatttaaaagaaaacttatagaagaagacaaacaaacaaagaaaatatatataataaaaagaaagataaaggttgccaccacgtaacaaccacttccactactactctttcgtcgtaatgaagaaagctgaccgtgccggagtttcatcttcaccggatcaccaaattagtcttctttatatagccgatgaaaataccacgtgactccaacgaccaaaataccaaagtccattagtataaagaaaaacatttatttacaaaaaaaaaacgatggatatctcaaaaataaaatgaccaaactacccaaccattatccctatatgtataacacacagcctcttctttttcacccacaaacaacataacatggcttccaccaaaatttccttagtctttttcctttgcctcgtaggtccttgtataggcgctggaaccacaagcgctgccgaatcagtcagtagcattgtgacacaaggtttctttaacaacattatcaaccaagccggtaatggctgcacgagaaaaagattcaacacccgcgactctttcattgacgctgctaataattttccaaactttgcaagttccgttacaagacgtgaaattgcaagcatgtttgctcatgtcactcacgagaccggacgtaagatttttttttccttttctctatgtttttatatattattaaaaacttattagttttgtttgtacatctactctagtcatgagtaaattattctcaaaacttttctctattttaaagtaaaaaatagagatttacattggagattgtctaagggttgaggtgtttcattattatttgagattatcaaatggtgattataatagttttattagagcacgttaagattaaacctgtaaaactgaacatttgacttaagctgattaaaaatcataacctttttttccatgtgatctctatgtcgtatagacttctgctacatagaagaaataaagaaaaggtcacgtggtaggtgcgacgagaacgtagagcagagaccatgtccatcacagagtaaaggtcactccggtcgtggtcatcagagtctcggtctcgaccttctacgccagcctgagcttgtgggtagcaacccaactgtagctttcaggaagggtttgtcgttttggattaatagcgtaaggccggtgctgaaccaaggatttggagccactataagagccatcaatgggatggaatgtaacggtgggaattcaggtgcggtcaaggcaaggattgggtactatagagactattgtagacagcttggtgtggatcctggtcataaccttagttgctaaaacgttttacaaacgcatacacgtgacgtgtcacgtgataatgcggaataagaagttacatttcaaacagggcaaggattcagaatcgcaagtacatgaattaacattctgtaactgttaattgtatcaagttgtgttaatatataagagctaggagaattggtctttcttatgtctagctagtaaccatctatgtttgtagctaggagctacttgttgtttctagttgtttgtctatctaagccaatcatacaaaatctatgcttattcacaaacatggagatcgatgttgcaaaattcatcatttcgattttcacaaacaattaaaatcacgctaccatggctcgcatgcactccatccgccgttggcatctccctccgagcagatcttgttgtcgttctcgtttcccttcaatagaggacttgattcctcatggtcttcgcggctatcttctcccgctatagattaaatacattctcatggtaggctaatgtatttgattgttggtcttccttatgtttattagtaacgttttgacgcctcctctaatcgtcttctcgggcatggggatgaccctttttggccaaatctagtagcactcgtctcaataaaaaaattgcacaaacaatcaaatacattagcctacccgagattctttcagatgcttagaaaccgatttgaatagtcatgttctaaccaaaacaaaaacatattatctttgacaaatcctaaaagtataaatggttcattcccacggtatttcaactcctctaaaccagtattagaaccatatgaatcaaatcgtataatcaagtatccacgaaacatcataatactaagctacatatataccttgatttatcagagttactattgtcattttgcaagtttcagatttgtctttgagaaaattgtcttactttgttgatattgagattatataaaccggataagcgaccttgattttacatgattttgctgttttaaaaaaaaacctaaccggtttcatttaattccgcatgttattaaaaaagagggaaaagtcaaagagtcaaacttattaggaacgtctagaattttccaacttggtccattttgcctactctattggaaaaaggaaacaaatatgtatattattatatgtcacataaattcttttccaacgaaacttcaataatttaccatatggaccaattttaattaattcctgtatcagatttaggtgaaacaatcttaataaacatttaaactcaaaaccaaaaaactgtaacacatttttccgtcaaaattgacgagaagaacaagcggctttctctactagccgttaaacagacgttatcttaccaaactccaaagctctggttcgtacaaacccgaacctcatccaatgcttatacacgtatgtatgtatacatttcttttagatattttataaaaacacgctcccaaaaatatttaatagagttgaattatgtttatctgattattattcagaccgaacacgaagaaacaaaaattcaacaaaaacaaagacaaagtttcgttttagcttaaaggttccagatttcgaaaaagctctctttttttttctccttcgtgttacacaaccatttctaggtaatgttttgatttcgaaagagctctctttataatgattttcatttgtgattctggaaatcaaatcgttctattgaaattggggattttttttcgattagggtttgtttggttcctgttaaattatcaaacgttcctgcatttaattgatttttggtcttctaatattttggagcttcttcttgttgttacagatatcattttggtgattaagttatttaagaaatggctgatcatttgagtttatgtaccgatcgtctcataacatctgagagcttggactcagagaaagattcagattcttcaggagaaagttcttaccggcctcaaggcacagacttggcttcttcatctgtgaatgaaactgaggttcctagagagtactacgcggttgcggatgaggaagaacctcttctccaatctgttgagtgtcgtatttgccaagaggaagatagtactaagaaccttgaagctccttgtgcttgtaatggtagtttaaaggtaaacacgttggatctcattgttctttgttttttattggttagagaaaattttcttattgagttttgatttatgcagtatgctcaccgcaagtgtgttcagcgttggtgtaatgagaaaggcgacataacctgtgaaatatgtcaccaggttaatcatcactctgctgctaaatgttgtatcttatctaactgctattgacactaaagagaataccaattacaactaaaatgctctctttttttttaacagccttatcaacatggatacactgcacctccgcctcctcctcctgatgaaactataattcacatcgggtaaatttgcttaaacatagagagttatgacttgttgaattgttgtacaagtggattatctgtaaccagttataacaaaattaataataccttgtgaagaacttatcaagttaacaaagtagtgagtgacctgtgttgtgtgcagtgacgattgggagaacggagttccgttggacttgaccgacccgcgcattctggcaatggcggctgcagaacgtcatttcttggaagcagactatgatgaatattctgagaataactcaagcggagctgccttttgtcgctctgctgctctcatcgtaagctctcagttgagaagatgttttcttaccatgatttaatactaaatgcctgcactctaacttctgtaatggcagctaatggcacttttactgttacgagatgcgctaaatctcacaacgaacccagacgacgaggacgatccaactgccttcttctctgtatgttcatctttacttactttcactacttctttataccgtcactgactacacttgtttgtttcaatagctattccttcttcgtgctgctggttttctcctcccatgttacatcatggcatgggccatcggtatactacaacgtcgaagacaaagacaggtgtgtacacggaaaaaactctctgtatcaaactctgttatattgtaagatactcaatctaacagatgagacaatgtactgcttttgtttgtaatcaggaagcagcggctctagctgccgcagaagttactttcatgatacacggtggtgggcctcaacgcagaggactgcactttgctgtagcaccgcagccgccgatatccaatgtcccaacaccagtttgatccttaccggcaatgattctccgttaaggctattagataaaaccttgaacttggttataagaactctacctacttatgcttcttcaaatgttattatcttcctcttatgtttgtgttatctgaatctgttaaatgtctacttcggctctcaaatgttttacaaagagctctcacggtatactatgtacagtcttattattatcatatgattatataagtattatatttttatttaccttttataaatttatttggtcaaccaaacataaataaatgtccaatgcaatattggagggtcaattacaagtcttgtcgtttttttcttcacaatgactctttatgaactccataaccgttaaaaccaattgactttgataattggtataacaatgatcagctccttccacaatctgtagctcgtggttcggtattatctttgcaaactcctttgcatcttccactggtactgtctcgtcacccgatccatggaccgtcaagaccctaccattacatcaatccgggcttgtttataatgtatctcaaacaaacgatatgagttggtgaacttattgaatctcacctgcattctttgtcaatcttgaggcaagcttcatgcatatctgtgtttaaccggtccatcaaactctcctcggtaacacggtaaccagaatctcctgtaacaaaccagtacattgatagtaacactaaagttctgataacggtgcatgaaaagcgaagagcgataacaataccatctttaacatcgatgtatccttgttgcttaattctttccaaaaaatcttcaccaagacgttctcctatgcctttcttcagatcataacgtcccgagagattgatcacattggggatatcgtgatacttggaggcatagaggaggaccacatcacctcctatgcaatgtcaaagtataagttgagtttcttgcaatgtaagattcaccccttttgaaaatccgttgctcgaagcagaaagatcggtactacttacctttactgtgaccgagaattatagtaacaacacggttcaagttagagaagtattggataacagaatgtagatcatcagcttcgtaattgtagttaccataatagaaactgccttcactctctctgaaagaatgaaagcaccacaaccccagagtcaaaacaaagaccaacttattcaagataatgcaagaaagaaaaacatacccattcccggagaaatcaaaacggaaagcactaatcccttctctctctatagcaacagccacatttttcataatttcgaagttctggatacattcataggccaaagacaaaacaaagttaatgcatgcaataactcctaccaacatctgcaaccctactatgtcatgaggactccactttctttgtgtacaaaataaatattcccaaacaacgaagaagcagagctactaatgggaaaacattataatcactataaaaaaagtgaactaaaattatgcacaaatctttggtaagatgttggattgagaaatggacattcaagtaagtgagaaaaaagcagaaccgaaactaaccttgtttgatcgaaagccatgacacaagactacaatttctgtagaaccagtttcatgaagcagacccaccaggttctcattgtggctgttcagaatcacaatcttctgttgtgtacttccctgcgatgaatccattctcaacttttttactttgtttgttgcaggaaatttgggtctccttaatggtaaggcgtgcgttgagaaagataatgtgggacaaccacatgatctctcattgatcatattttggaatttatatatatatatatatgatttctatttaattttctttgtcactcattattttttctctcttttttctagtgtttaaaaaaacttagtttttaccaatcaaacctaccatctagtaaatgtaaatgaataattggtcaatttctacatcatctcctgactcctgttacatgtttataaataaaatagttcatttgctagttgctacaaaagtgccaaaatatttcatcctgtagccaccgcttgatgtctgaagaaaagtcataaagattcgtaaaatgtctttgtttttttgttcctttttagataatgggatcccataaaacgtgtctttgttgacgacttgacttaaattttcgaaaagtggcagtttaatatccctattttttatttcaagttgcattatcactacaggcattttaatttgcaattgcttcgcctcttatatgttcattttcctgcaaaacatgagaagcatcaaaagctttttaaccaccatttgtttttttggaaagcatgagactgtttcttttacttgctttcaatgctctcatgctacttgaaacacatggttttaccgatgaaactgataggcaagctttgcttcagttcaagtctcaagtttctgaagacaaaagagttgtcttgtcctcatggaaccactcattcccactctgcaattggaagggcgttacatgtggccgtaaaaacaaaagagttactcatctggaactcggaagattgcaactaggcggagtgatatcaccatccattggtaatctatcgtttcttgtatcacttgatctctatgaaaacttttttggtggtactattcctcaagaggtgggacagttgtctagactcgaatacttggatatgggcataaattatcttaggggaccgattccattaggtctatacaattgctctagattgttgaaccttcgtttagattcaaatcgtcttgggggaagtgttccttcagagctaggatcattgacgaaccttgttcagttaaatctttatggaaacaatatgagaggaaagctccctacatcactaggaaacttgacgttactagaacaacttgcattgtcgcataacaatctggaaggagaaattccgagtgatgtagctcaactgactcaaatatggagtcttcaattagtagccaacaatttctccggtgtttttcctcccgctctctacaacttgtcctcacttaagcttctaggtatcggttataatcatttctcgggtcgccttagacctgacttaggtattctactaccaaatcttctatcgtttaatatgggagggaattatttcacagggtccattccaacaactctttccaatatctctactcttgaaagattgggtatgaatgagaacaatctgacaggaagtattcctacattcggaaatgttccaaatttaaaattgttatttcttcataccaattctttaggaagtgattcttctagagatcttgaattcctcacttctttgacaaactgcacccaactagagaccttagggattggcagaaataggcttgggggtgacttgcctatatctattgcgaacctatccgcaaaactcgtaactctagaccttggaggaaccctcatttccggaagcattccttatgacattggaaatctcataaacctacaaaagcttattttagatcaaaatatgttgagtggaccactcccaacctctcttggaaagcttttgaatttgaggtatttaagtctattttcaaatagattatcaggaggtataccagcttttataggcaacatgactatgttagaaacacttgatttgtccaacaatggttttgaaggtattgttcctacaagtcttggcaactgtagtcacctactagaattgtggattggggataataagttgaatgggactatacctctggaaattatgaaaattcagcagcttcttcgcctagacatgtcaggaaattctttgatcggctctctcccgcaggatatcggagcgctacaaaatcttggtacactatcacttggggataataaattatcagggaaacttccacaaactttgggaaactgtcttacaatggaaagtctttttttggaaggaaatttgttttatggagatattccagatttaaaagggttggtgggtgttaaagaagttgatttgtctaacaatgatctctctggaagtatacctgaatactttgcaagcttttccaagttggagtatctcaatctatcttttaacaatcttgagggaaaggtgccagtgaaaggaatatttgagaatgctactacagtttccatagttgggaacaatgatttatgtggaggtattatggggtttcaactaaagccatgcctttcgcaagcaccatctgtggtgaagaagcattcatctcgtttaaagaaagttgtgattggagttagcgtaggcataactttgcttttgttgttgttcatggcttcagttactttgatttggttgagaaagagaaagaagaacaaagaaaccaataatccaactccttctactttggaagtcttgcatgagaagataagttatggagatcttcgtaatgcgacgaatggcttctcttcgagcaatatggtcgggtctggcagttttggtaccgtatataaggcattgctcctgacggagaaaaaggttgttgcagtgaaagttttaaacatgcagagacgtggagcgatgaagagctttatggcagaatgtgaatccttgaaggacataagacatcgtaatcttgtgaaactattgacagcttgttcgagtattgattttcaaggaaatgaatttagagctctcatctatgagttcatgcctaatggaagtttagatatgtggctgcacccagaggaagtggaagagattcataggccctcaagaactttgacccttcttgaaaggcttaacattgccatagacgtggcttctgttttggattatctccatgttcattgtcatgaacctatagctcattgcgatcttaagccaagcaacgtccttctagacgatgatctaaccgcccatgttagtgactttggtctagctcgtcttctcctcaaattcgacgaggagtccttcttcaaccaactaagctcagccggtgttagaggaaccatcggctatgccgcaccaggtatactatcacacatctgtagcattatatgaagaaaattagtatctatcctttctttttatcattacagtcttcttaacattgtttctatgaaatatggtgcagagtatggagtgggaggacagccatctataaatggtgatgtatatagttttgggattctccttttagaaatgttcactggaaaaagaccaaccaatgagctatttggaggaaactttaccctgaacagctacactaagtcggcattgccggaaagaatattggacattgtagacgaatcaattcttcacattggtctcagagtcggtttccctgttgttgagtgcttgacaatggtttttgaggtgggccttaggtgttgtgaagaatctccgatgaaccggttggcaacgagtatagtcgtcaaggagttgatctcaatcagagagaggttctttaaagccagtagaacgacttggcgttgaagtgtttggttttgtctacaaactttgcaacccaataaaaaggcttataatatcttatttcataaattggggttttgtctaagaatgcttgtagaatattgctaatgaaatgcttgtgttaattaataaaaatgtatgaatgttgtggtaccaattttatatggagacaacgtagctttatagttgcaaatccacattgttcccaattttatttggattctctttgttttggtaatgtaaagttctgaacatggagcaatagatcgatgttcaacgataagtaagtaagccttgtcgtcttggtaattgcgtttactaaaagtcccacaagtgggatatggagaaaatacatctaatgccggtcagatcatgaaatgagatcgacgtcaacatttctagcataaaattgacttttgttggcacagtgatcacgacattacgatacgttttagcttacaaaaaatcgttaaccggattatagggtatgttacccataacaaaacaaaattgtgagcaactattcgtaacactggtggatattacaagaataatcttcgtttactgtacttttaatttttctctttgaaattttactattttgttgcaactagatgttaatttaggtatgcaaaccctatttaattaatgggtatgtgtaagagaaattgatccatttaatttcattaagaaaaaaagttaaatggggttaaataggttagcccaactaaacatatttattaaatgtagttttacaactaaacatatggggtatccaattaaacctatttatttttcttttatattatttattcttattgaaaatggtaatatgtttatacattaaaattaaattaataaattattctatttaacttcactttttggtttaaatatttgtttttaaactgcaaagctccattttccactaaaaccgtaaaccaatgttttcccgtcaaaatcgtaataccacgttttcccgtcaaaaccacaaaaagtgttttccgcaaaaattgaaaatcatgttttcccgccaaaaccgtaaaccgacgtttttctaccaaaaccgtaaaaccacgttttcccgccaaaaccgtaaaactacgtttcctaccaaaatcaccaaaaatgtttttctgcaaaaatcacaaaaagtgttttcaaccaaaactgaaaatcatgttttcccgccaaaatcgtatgccgacgtttttccgccataccgtaaaaccacgttttctccccaaaatcacaaaaaatgttttcctgccaaaattacaaaaagtgttttccgacaaaattgaaaatcgtattttcccgccaaaaccgtaaaccgatgttttctcaccaaaaactgtaaaccaatattttctcgcaaaaaccttaaacccgtattttctagctaaatttttctttgccaaaagaatattcacccataaaaatctgtaaaataattattgattatattatatagatatagatctaaatgggtttaaatagattaatgataatttaaatagaaaagataaatgaaatataaaattaaaaagagttaaatgatttagagtaaataggatagattttaaatgggatgggttaacccctattaacatttgcgactaaactattttggctttgcaataataacaaatgaaacctgtcgtcagttggtggatttcttaaacccaaggtgcgtgaaaataaatatacaagtgacataagttgtaaacagtaatgactagtgtcatcttttaacaaagttgatttgttgacttagacggcaataatacgtgtcgtattctgtgtggttgtgagccaatttattatcaccacaatacgtaatgaaaggatttgcaattgcttcgtccccttttaaatcagtttcctgcaaagttgataagcacaaaaacattcaaaatataaaaataaactttgagaaggatgaaactatttcttttactttctttcagtgctcatttgttactgggagcagatgggtttaccgatgaaactgataggcaagcattgttggagttcaagtctcaagtttctgaaggcaaaagagatgtcttatcctcatggaataactcattccctctatgcaactggaagtgggttacatgtggtcgtaaacacaagagagttactcatttgaacctcgggggattacagttgggcgggatagtatcaccatctatcggtaatgtatcgtttctcatatcacttgatctgtctgataacgcttttgggggtatcatccctcgagaggtgggaaacttgtttagacttgaacacttgtatatggccttcaattctctagagggagggattccagccactctatctaactgctctagattgttgaaccttgatttatattcaaatcctcttagacaaggtgttccttctgaactagggtcattgacgaaactcgttattttagatcttggtcgaaacaacctgaaaggcaagctccctagatctctaggaaacttgacctctttaaaatcgcttggcttcacagataacaatatagaaggagaagttccagatgaattagctagactgagtcaaatggtgggtcttgggttatcaatgaacaaattctttggcgtttttcctcccgccatctacaatttgtccgcacttgaggacttattcctctttggtagtggcttctcgggtagcctaaagcctgattttggtaatctgctaccaaacattcgtgagttaaatctgggagaaaatgatctagtgggagccattccaacaacactttccaatatttcaactctacaaaagtttggaatcaacaaaaacatgatgacaggaggtatatatccgaactttggaaaagtaccgagtttgcaatacctagatcttagtgagaatcctctaggaagttacacttttggagatcttgaatttattgattctttgactaattgcacccatttgcaactcttaagtgttggttacactaggcttgggggtgccttgcctacatccattgccaatatgtccacagaactcatcagtttaaaccttataggaaaccacttttttggaagcattcctcaagatattgggaatctcataggcctacaaagacttcagttgggaaaaaatatgttgaccggaccactcccaacttctttgggaaagcttctaagattggggttattaagtctatattcaaataggatgtcaggagagattccatcttttataggcaacctaactcaattagaaatactatatttgtccaacaatagttttgagggaattgttcctccgagtctcgggaagtgtagtcacatgcttgatttacgcattgggtataacaagttgaatgggactataccgaaggaaattatgcaaatcccaacccttgttaacctaagcatggaaggtaactctttgagcggctctctaccaaatgatattggaagtctacaaaatcttgtaaaactatcacttgagaacaataagttttcaggacatctcccacaaaccttgggaaattgtctcgcgatggaacaactttttctacaaggaaattcttttgatggagcaattccaaatataagagggttgatgggtgtaagaagagttgatttgtcaaacaatgatctatcgggaagtatacctgaatattttgcaaacttctccaagttggaatatctcaatctatctattaacaattttacgggaaaggtgccttccaaaggaaattttcagaactctacaatagtttttgtatttggaaacaaaaacctatgtggaggcatcaaggatctgaaactaaagccatgcctcgcccaagaaccaccagtggagacaaagcattcctctcatttaaagaaagttgcaattttagtaagcataggcatagctttgctattgctgttggtcatagcttcgatggttctgtgttggttcagaaaaagaaggaagaaccagcagacaaataacctggttccttctaagttggagattttccatgagaagataagctatggagatctacgaaatgcgacaaatggcttctcttcaagcaatatggttgggtcaggtagttttggtactgtgttcaaggcattgctcccgacggagagcaagattgttgcagtgaaagttctaaacatgcagagacgtggagctatgaagagctttatggcagaatgtgaatccttgaaagacacaaggcatcgtaatcttgtgaaattactgacagcttgcgctagtactgatttccaaggaaacgaattcagagcgcttatctatgagtacttgccgaatggaagcgtggatatgtggctgcacccagaggaagtcgaagagatacgtaggcccccacgaaccttgacacttcttgaaaggcttaatattgtcatagacgtggcttctgttttggactatcttcatgttcactgtcatgagcctatagctcattgcgatctcaagccaagcaacgtccttctagaagatgatttgaccgcccatgttagtgattttggtctggctcggcttctactcaaattcgacaaggagtcattccttaaccaactaagctcagccggagttagaggaaccatcggctatgccgcaccaggtaaaaatatcacacatctgtaatgttctatgaagaaacttggtatatattttatcgttacaatcttgttctgtgaattatggtgcagaatatggaatgggaggacaaccatcaatacatggtgatgtgtatagctttggggttctccttttagaaatgttcaccgggaaacgaccaactgatgagttatttgggggaaatttaacactacatagctacaccaagttagcgttgccagaaaaagtattcgaaattgcagacaaagcgattcttcacattggtcttagagttggtttccgtactgctgagtgcttgacactggttttggaggtgggacttaggtgctgtgaagaatatcctacgaaccggttggcaacgagtgaagtcgcaaaagagttgatctcaatcagagaaaggttctttaaaaccagaagaacacctagacgttgaagtttttatggttttgcctacaaactttgcagtccactcaaaaggcctatataacattgtcttttacaatttgtgttttcttcttctctattaaacatacttatgctatacgtgtttctaagctctattaaaacatactaagatggcttgcagaatattgttaatgaatgcttgtgttttttgcagacaatatatgtatgttgtgtaaccagttttatcatatatatcagtgttcccaactttatttggattttctcagtttttcgtagcttaaaaatgaattacaaactttcatgatttaaaaggcaaacgtaactcaattctagttgttcttcacaatgactgtctttatgaactccataactgttgaaactaattgactttggtgctcagtataaccatgattagctccttccacaatctccagcttgtggtttggtatgatcttcgcaaactccttcgcatcttccacaggtattacctcgtcctccgatccatgaaccgtcaagaccctgtcattacaatcaaacacaagtcaatcttgtgaactcaatatgagttagagaactcagcgagtctcacctgcactctttgtcaatcttgaggcaagcttcatgaatatcagtgcttaacctgtccattaagctcttctcagtaacacgataccccgattttcctgcaaaagaccaacacattgatagaaacactagagtcctaatcaaagacatcgcaggaaaaccaaaaagagataacaataccatctccaacatcgatgaatccttgttgcttaattctttccaaaaaatcttctccaagacgctctcttataccctttttaagatcataacgtcccgagagattgattacattgcggacatcatgatacttggaggcgtagaggaggacaacatcacctcccttactgtgaccgaggattataggaaccacacggttcttgttagagaagtattggacaacagaatgtaaatcatcagcttcatggttatagttaccataatagaaactgccttcactctctctgcaacaatgaaagcaccacaacaccaaaatcaacacaaaatccagcttattcagatcaatgagaataaaagcaactagcaagagaaactaacccattcccggagaaatcaaaacgaaaagcgctgatcccttctttctgtatagcagcagccacattattcattatttggttactctgcatagtttcacaggccaaagacaaagttaattcatatgtaaccaagtctcagatcttagtcaccacaagagcagagaaaacagagaactacaaataaataaaaaggttgcagatttacgttggtgagtcactgattacaattcaagattcatattttgattaagggtaaatcaagatcaacagaaacagcaatcacacactaaccttgtttgatcgaaagccatggcacaagactacgatgtctgtagaaccagtttcatgaagcagaccaaccagcttctcgttgtgtctgtttggaatcacaatcctctgttcttggattcccttagacggatccattctcaaattctttgctttgttacaagagatttggttgttcttgatgggaaagcgaacgttgaagaaggatgatgtgggaaaaggggacgttttgtaataaggagaatcttgagggacaaaattgaagttgtgcaaaagagttctcattgtttcatatcacatgaactgttgactgaagatgatgagagtttagtttattattttttagtgagaaaaggaaaatgacttgaaattttaattttttttaaaaactctttatttgtaagaattttcttaaataatatttggactactatataaggctaataatgaaaaattttatttttttctcaaaagtgtaacattttatttaaaatttatgttgtaaaaagtacaacagtgaaaacttccacttacaaggcttgacagactaaaagtttaaccaacaattcagtttataagctgtgacccaacttaaatagcccaatccagaaagctaattctttgaggaagtttaactctttgtcgacaaaatacgaaaagttgtgttttgagctttataaataataattcatcatttcattatcggcttggatttaaatcatcaatttaatttatagaggtgaaatcaaaataaaggaaatcactgtgatttaactttagttttgattgaaactattatgtaatatacttctcaaatctctctgtgtatcttccttcaggtgaaaaacgaaagagatattggacgtagaaaatatcaaaagtgtgcacatcctaaggtaaacgaattccataaaaacctattaacttgttttgatcttggattgctaaagtcttgagcttctattgctctgttttttagccattaggccttgtctcattttcccttttgatcacatattcgtgtttcttcttctttactatactttcttgtagacttgtagtgcgattcagtttcagttccataagaggaaaaaaaatcagtggaaaacaaacaaaaataataatactagtagacatttgatcattgcttaaagtaagtaacatatgtttatcagcagcttaacaaaactagtagtagaggcatgtacatggtttttgtggttaatttaggtttttagggttacagttttttcaggttttggaaaaatagggtccaataaaattggtttcatgaaaaatattggtttggttcggattcggttttaaatcaaatgtataacaaaaaataatttaacttgtttcaaatcatattatgtttaaaatattttcactatttttaattgaaatatttgtttggtttattctgttcaatctcacaaaacgttcgtcaactatcaaaacaaactttttaaaccattgaaaaatagatcagaacagtcaaataaattccataaattccattttcagccaattaatttactaagcccgaaatttattagagactcaagcaaaaaaaaagtcaacgagttgggtgtgagacagtgtgacattaaaatatgtgtgatgtctctaaggtaaagcatctctacttggatcatgctcgttgtgctcaacacaggcataagtcaaacaaacactcacattttcttctgcattaaattcactacttttttcttctttttttgcctctcctgttaattagcagctttattttattagttttacataattctatgaatcactagattttgcctcctataatcggatacaaaactagattttgctctttaattttcttttagtaacaactcattttttgtttgtttaatgaaatatctcaccagtaaaagaacctatatctttattatagaacttcattatttagtacattaaacagtttaaagtaatcttaatctatataatgaatgaggagaaaagtttgttctacctactgattgaagtttatggaaacataaaatctgaaacctaaccatatcaatactaattaagtgacatgaatttgtataaccaaatgagtcacacgattaaaaagacgttacattaataaagatgatgtacacttttgagtttctactacatagaagatatcatctccacgtcgacaaagatttaaggaaaaaataaagagttactactaaaaagatagagaaaaatgtgttaaaacttaagagttactactaaagactaaaatccctaattactgcaatatgatcataataaggattgaaaacaaaactaaagagtacttaattatacaaattgtttataactaagcctcgtggttcctcaagcaaatcgtcaaactttaatgctttctagaacaacacttcctgaccctctagtgacatgttattgatgatcatatcgtggctttgctcatcaaagagccatttctcgaacaaagaaagagagccttgtgtaattagaccattaatgtcatggtctattagtttaggcttctcttcagcttcatctatggagttgaagctgaacaaagaatggtcaatcccttctccgtctccttcggttgtgctagggctcgaagctgccgtggtgatagccatctcggtggctgcaaccggcaagggcaccgaggtctttggtgtgtctttcataaaattctgaagcaaacgagcaatgttctcagcacttgaagcatagaccccagatgggtatggattagtgtttctcgtggtggtggtggtggtggtggtagaggacgaagaagatgatggaccataaccaagatcgggaatagaaaaattagttgggttttgtggtttgtcaatagacaaggcatcacaaagagcttgtttagccatgttgatatctgtctgaagccttctctcccattgacctttactggagttgctgctttgatgtgaggtagtgtttttgtttgatatggagaagtctttattatcaaggccattgttgatagtactatcacaagaatcattcatcttcttgagctttttcttcaaatgagtgttccaatagttctttatatcattgtctgtcctttctggaagatatgatgctatagctgcccaccttcataattatttggtccccaagttatttaaagttcaaaaccttatctttatgcatacccaaaaaaataaaagaatttgtatacttttatagatcatgtgcatgtgaatatgtatgtatttacctgtttcccaaaagagcttgaagatggagaatcatcttctcttcatgctcggtgaaatttccacgcttgatcccaggtcgaagataattagtccacctcaatctacagcttttgctacatctcctcaaacctaaatcaccacaacaacaacaagataatttcattaaaagagtaattaatttgtgatatatggacaaaaaagctggtgccataaatcggatattattacaatttttccttttcattaaatgatcataccaaccaagtggaagccagaacaaaacaatcacaaacccaagaaaaaaacaaaaaacattaaagggtacttctgaagagtataggggttaacaattgaaattaaaatattactattgttcattaaaaaaacataatattaagatagaagaagatacctgtgtgagtaggcacagatctccagtttccaggaccatgttcttggatgtaagaaaccaagatgatatcttcctctggtgtccatggtcctttcttcactccaatcttgtcacagcatggtggtcttcccatctctatcttctctatgtaaatatcactttgtgattaggggaagaatggaacggtttgtggtatgagcagagagaaggactttgatgatgatcagatatatatattggtgaagaacggtttgtggttttttgtggcttgagagcttaggaaattgtagggttaaagagtacttaagacaaagaggtacaagtggtggttggttttgtctgaagatgtggagagagagcttgtgtatatttatacagccaaagagagagagagagagagagagagagagagagagagagagagagagagagagagagagagagagagagagagagagaggtttaagctgaagagtgaattagtagcaataataatagagttaaaagtaacaataatgaagagtggggttttgctatcaaagagtcaacatggacagccaaatgcatttactctcttgctctccaaagtcagcctcctctctctctctctccaccattactccatgctttctctctctaaaattagcctactattttctctttgtaattagtcatttcatattatcgcaaataaacccttaattttgtctccacacgagaacatatgtgcatgtatcattttattaggtgttcatcaatttgattgggtttagacttcaaagactttgattgcatttatgcatgggtccacaatgagagtgaaatgagtatataacttctatttatgtaattaaaccttctaattatacatttggaaaagcatacatgaattaaacaataaaaggattttcataatatgaatttgtaaatttggattttccacttgcatgcatatatgtggcatgattttacaatgtccttcctgcgttattgagaaccaaccggaatttaaactaattatctgtctctctaaaaatattgatattttgtgagttatgttgtgatcaaattggtatacatatcatatgaaaactattacatgatctcaaaatatataaaactagtaaccacttaataagtcgacttagcatatatcaaaattgagtgaacttaactaaaatcaaaccaaatattttggtttcaatcccgtcaaattctcatgaacaatcaaatatagacatcaacaaaacacagaataagtagcaaaatttattatttaaaagaagaaaaaaaagaagttaaatttgaattgatgcgaatttagtcgaacatgtaaaaatgttaattagtggtgtcaggtgtgacttgtgagcttttgtaggtaattgaattgaacggttgataaaagataatcgaaacacatatccccacattcccaataaggaaaatgtccacacatatagatcttttggtgatgttggacttgttggtatatttagatcgataaactttttttttgtaaaacaataatgattgtaatctcatacactaagaattggtttaaaaatcagtttaaggatttcaaaaactttacaagaaacgagaggaatgttgcaaagcgcgtcgtcgttgtgtattgagcttttaaattggataggaaataatattatacgtatctaaataattaacataaatattatataatacaatatgaaaaaatcgtctgaagatactacgtacaatagatacaaattcaacggaccgtagagacttcattgaacaaaataggttgaaaccccatacgccacgtctttttgtattacgtaacccatgtcccgaggatgatggtattaataattttgactaaaatcgtcacatagacacctctaactagttatatttatttgttgttaaagtataactagttatattgtaatactgaatatcagaaattgaattgtatatttcgaaattattttacgttgttggtatcgtttataatattgattagaattcaacagaaaacttcttgtctggttcttaaggttaagattatgcttttaattttaccgaggctgagtatcatgctatgcgtcgatttctttttatataagaattaaggtatttgaagataagaaaatattttcaacattttaggtctacatttcaattattgtagacctaagtacattttttataaaataatgatattcttagcaaaaagaaaaaaaaaattgtattaatatagtatatatgcttcgatataagcaattgagtgcactcattcatcaagtgaattggcaactaaaagttattagtatgcgagttttaaaccaacgtttcgtttagttacaagattagggaagcaattttactctcagccaatatatgtccatgttcacccaaaatctttgtaggggttggttaacccaaaaaactccttagtaatattccgatgagtaatattgattgctttgcattttttagagggtaaagaaaggcatagaaactaagtcagaacttttgggtaacaacgtgaataaaccaagaagagagaatccttagctaaaaacaaaattgtatacatctttttacaattaatttccttttggcgtcagtatacaattaactaaactgtgcttatatagactcaaaccaaattttggacaagtatagaaaattcaaattttcttagcttcatatttgttttggaataaattcatttgtaaaccttaagatgacatttaaacaaaaaaaaattaaatatataaaatcacatttttgtgaaataaatagagtacagtaatagtacacgtaagttcaaaaatatttaccgtagttttaacttttaacagtaattaccttaatggctaatgcctaatgtacacaaattttcaagatgcaagaaaaggaaaaaaaaaagtcacccatagctttgataaattatagcagtaaatactatttactgtcatctatcacaaatactattttgactaaattgtcgagtggtgtaatatatataatatctctgaatctttaaggtctagctagctagggtttcgactttcgtttgtttctctggatcaagatcttgaaagttctccgatgtttcctaatagtttctagaacagatatatttacgagagtataagtcaacgactatggtcttcttttggatctcgacgtgctttggctcgtatcttaatttatacactatccaattaaatattagctaggtttaaacctaggcttaatattttaccctcaaacggttaagttggaatgaaagacacgtgtcaaattgtgcagaaaataatacaacatgcagtaaaataataatcggatgtaagattacttggaccatcattaaatgatgtgcatgatagaatgataaagaagtatatataacacataggccataggtctcgtagtaatccaagctgatgtaattgtcacggaacaacctaaggtttcttgataaatcttctgcggtaatttgggtagagttttgacaattttcaaattagagatgaagtcctgaccaaaatgatatcgatatatgtaacttattcaaacacaaatttctagcaatattgtttgaaaaaggattgtttaagtccccacggaaaacgtatgggtatcagtccaaaaatttaagtcaactgagactaaaaagatttagcaaaaaacaatttgtaaatagaaccaagggccaacttttaaacgaacggtgcgaagctacacaaaacacatatagaaatggttaaaacgttgtaattgcctatgtttttttgtcacaatataattccatatagacatatagttagatagaggccatgtgatgtgaattagcgatcaaaaacttatacattcgatttagaaaagatatgtaattttattttgttttgttaacagcaacgtatatgagtttgaatttcatcgaccgtactaacgtaaacaattaagctacaaatcatggtcataaacaacatgtataacaccagatacatgcaacaccagattgcaccatattgctctccttttggtttaagaaacgatatgtctatattaattacaaggaacctttgatttcggccggttacatctcaaaacccatgatcacgggtaatcatcatataatagtccatgttgtcaaaatcgattaagaaaatcttttcaattttaaggaaacttttagatatatgttatgttcaaatccaagttgctctctttattgttttgaaataggtctaagtcaaaatcattaaaagcaagatatttaggatatttaagcttgatctccttagaggcctaagctaaattaatttacatgctatatgcaagaaatatcatagttaactagaactagatattttaaattccagattgtaactagtaaaacccctataaattgtaggtttaacattgtgattggagacttagcatatactttcttccggaatatagtgagctgtttcttctagccacttgctaatgaaactttatttttgactttacacgttaagaaaataacttacagaaaagaaagaaagaaacaaattgatattctaaattcatcgtccatttaattttgaatagttgttgacttattcaattcgttggcattgacgcgttatgtctacattttcacttacgtctatcaacaaagcattgaaatgggtcgtccatatatgaaagtatgccttgttaaaacaaaaagtacttatgctttgtttacaaaaaaaaaaaaaaaaaagtgatgcttcgttgtatgaaaattgtaactatattttgtaaatgaatcatctttgcttagttgagatgcaagtgccagataatgtatacgcctatacgatctataatcataataatttaatatctttaataacaccgaaccaatatatataaacttcatacgttaaaaaataagttgaaagaatcgcaattgttttttcttcagaccattttataaaataactatattttctaattgatcgacacacatatttcagcagctaaatttgttatgaaatcaacatgtcagagaatctgttacaaatttaaggttaatagtcctgaaaaaaatatttagattgtaacagataatgaatcattgaaaactactattgaaaataaaaaataaaataattgaaacaaataaaataaattcaactcaaatagttaattaggattgattagataatagtcgaatgacatattcagtaatatcttacaaattaaatattagtaacaataatcaaatttgattaaacgaaataaatagaattgtagaaataaaacagtacatatatatatagagaattatatatgaaaatattattttgatttgtattttggtatagtgacttataaatttatttaggcaaaataaagtagataaaatttcagtttaaagtacatgtcaaatgtaccaataagatagcagaattttttttttggaattaaatgtttgtcataaggtattaaaataataaattcaaataaatttaaagaaactaaatcactattaaggaggacaaatgtcacccaaagagagtgccaaatgtcgcaatggtaggaaaagttagaaaaaaaccttgtcttattatataagatgtccacaatacctaattatttccaaaatcgtaactaaggattcaaattgagcctagacacacaaaacgaaccatcaagtacatggtaattttttttattagtaaatgataaataaattatgtttaaccgtaattatagtactagggtggagaattatatgagatccaaaatccaacctaaaatataactttttctttttttaacacatgaaatctaacttactatgctcttgataactggtcatgaacatataatttttctagattcatgtataagtttccaagagtagttttctaaaatatttgttatcatctttacattttaatcttttgatctgtaaaattatacctagtacatttgatatacaatacaattttgcaatcagctcctttctttcttttgatgagatcagtcagctcctttctagtagctctttaattgctaggacactacgtaatacatcggtgtagatgcatggaggcgtgtatggccaggatgcaaccacctaaactctgtccggatatggaaagcgacgatctcggacaagacattggcaccgaatatcatcaaaagcaaagcaagaccacactttgctttcttttgttgggtatgtttgtgggagcccactccaaaaagcaatattttatcgtatagctcgtacatggtccccatttgaattatcacgtgtcgctatgtgatcacttggacgattctatacttacgctctcttccatcgtgtccgttgaaacgtgtcgacgggaaaaagaaaaaaagattaattacaacaacaagatctcgatctttcaatattaagttttggaatttttgcaaatgcatgggctatatgttgttactattacttttcatatagtgatttatgtattaaatgccatttttttgctgtgaaatcgctaattattggtcattttattcatactatataggaccatggtgacataatccgatccaagagcttgaggtctgtaagtcaattttcatttggatttgttcacattgtgtttaatgatatctttaagatgttggtatcattaagaaattaaattatagtttattcctttgatttatatatattaaaaacatcaattcaaagaattaaattgtagttttttaccggtatattattgtagctaattcgggatagtaaactcatttatcataattatgttagttaaagctaaatatcaatttccatgtatacggtttgttatgtactctaaaatttacaaaaaaaatatagcttctataaattagttttgtttttcatatgagatcagtgagttactcaaagtcttaaacccatcgagataaaactagtctaaccaatacaaactttatgatgacaattttgagagtttaattgaattgtcatcatcctaaataaatgttgatcatctcatagatcatgtatttataatataatctgacgataacccacaacaaattgttcagtaagttcttcgaatccagtcaacaaaattatttgattataagacatgaaaattaaattatgatcaatatcatttaatacttttccttccactgatttgacacaaaatatatactttttcttccactgatagttttctaatttctatccactgagagacttaaatttgtgactttggaagaaaaaaaaatctacttatgggttttatacgagttgaactattgaaataatgattgatgttgggttatatacttgtcattttctttttttaatatacttatcatcttatttaagagaattctaataggtaaaaaaataatagtttcgagaattgtgttgggatgttgaaaatgaggattgtcggacacaggcagtgcgaggtgggggtaagaaatgttccactaatcaaatcatattgggaccatggactatggaccatgtaccatggcttatacaatacaaacttatttatttcgttgcccacttcataaaagctatgtcaacattataattttcgaaaaaaaagagaggatgatacttgtagaaaatgagtttaagttgctaacgtaattaagtttttttttggtaaagtatcttattatttatttataaacgtaaaaataaactacactcggacactctgcgtaaccataaagctaaataagtttttgaatcaaataacttaaagtaaaatgtcaaaaccttgcacttcaagaaattatcttttgtcgtctacaactcacatgtatgtataatatcgaatcgattcgaaccatagcacatcaacgatattactataaacttctaagttagaagctctagttgtgtatatcaaatattaaaaatgtgtgaaaatatgaatcatctgattgtaggaatgttaattgggctataatgattaatgaggtctaaaatgatataaatgtttatgtcaagtgatattaggtcaactaatttaggcgttccaaattagtaagaggaacccggtaaacgtaaaattgaaagaagaaacccgggtttaacatgtatttgggtttaagttcaaatatagcgagacatttaggcccgtttcacaatattgggccgagcccatgaataaatacaaaatagtatttttgattggagaggatcggccctttcttgtcgtcgtttcgaagagactaaaggcgacggagagaatcggagaagaagatgggaacggcggtgggacagtggctagaggaagcgcttgttgacctctgccgcaaaccagagaccggtttgaatttcgatcgtgatgtcatctccggtttagtctcctattgcgatcttgctcagcctgtcgatgccaaggaatatctcgacgtaaatccttccctctttagtcgccaattctcacttaatgcttgtgttattcggattcgatgatttagttttttcatataaaattggttagtgattttgggcaattggataagagattagtgtgttaggtttgaattgatttcaattgagtagtagtgaggtagaattaagctctctgaaccattgaagaagtgatagttttggtaatttagttttaatgagatagggttttagtacgaaatcagagatgaatagttgtctccattgtttaacttgatgaacctaaatgatctcatctgatttaggtcaaatgattagtataactcttgatcatgttttgaggttgggcaagggattattagtacatatatgatactgctttaggtttgaggacatataatttgattaagcgaccattcgtctgattgattttagtaatgcctttaagcagaatattattggaaaagaaggcaaaagcatcattgcagaatatctacagcgaagaggatacaaagatccatctagccatgtagcagccagttcaggtccagaactgcaaatgtatgttaagccaaaagtggataatggtgcttctagtggaaccaagaaaccgtttaaaacaccaaaagagggaacatcttctaatcagcaagctggaactgggaaattaacagctcccgcccagcaagttaatcctaagaagaaaaaaggtggaaaggtgatttctcttgccgaagcagctaaaggatcaatagtgtttcagcaaggaaaaccgtgtgcatgccaagctcgtagacaccacttagtgagcaactgcttgtcgtgtgggaaaatagtgtgcgaacaagaaggagaagggccttgcagtttttgcggagcacttgtgctgaaagaaggaagtacatatgctgggctagaggtagggtatactccagtatctgatgctgatgtggcagctgaagcatatgcgaaaaggcttgtagagtatgatagaaattcggccgcacgtacaacggttattgatgaccaaagcgattactatgaatctgagagcagtacttggctctctgcggaggtatatagaatctccattgctaaactacatttggtttttgtttcgccattgacttaatatattggattctgttctcaggaaaaagagctagtgaggaagaagcgagaggagattgaagaagctgaacgagtaaaaaagagcaaagtggttatgacatttgatttaatcggccgtaaggtaactctcaagactcccctgttctcagcatgtttgaaactagaactagaagataagttataggtttcctttgaagtatcgagtcattttccctgtctcaagtctctctgcaatgttactatctatattcttcaaggtttacctacctttcttctccagtagggcatgcttgaattgctagatcaatatcgatttacttgtcctcggattattcttcatagagatactattcattcgaagtagtgatgattcatgatttgacacattacaggttctgttaaatgaagatgatatctcagaactagaatcagggaacaggattctgggaccacctgagactaaaaacgtgaacagaataaaaccgaacccgactgcaagactcgttccaatcttcttagacccaggaccaaccgagaagaagccaaacagcaccaccaccaagaaagacaacaagaaaaaccgaaacggtttgtgtctagagatcacaggaagggtgcaacatgacagaagtgaactcaaatacttacaagccgatccaaaatcggacggtaaatcttggccatcaggaaacgatggacttcatgtagaagatggtggtgaatgttccttagattacgactaaatatttttcagtaaccaaacccggttcaatgttttcggtttaccgaacctgatactatttgttcagtttaaaagtcaacaacttttctcttgttgagtccacgtcggatggttttttgatacgccgtcggtcaagaatcacgtgtttggaactttgggtctctcatgtgattacgtggcgttatgtaattgggtaatgttaaattctctcggttttattaagataagattattcgtctccacgtgttacgtgttcccagctatcaaatcgttttcttagagcactatgtattttttattttttatttcatttcaaattcttcgtcataatgaaaatagaatagaatatgttcgaattttagtttattagttgtgaatatttgtaaaaccaagctacaaacaaatttggagtatatgaacaagcatttttgtggctatagtatatagagaggtttagtgcctagacaatatttttataaccgagattatgtttttattgaactaccaaaaagtaaaactttgcaaaatttgagtcctgtttgattgaatccacccaccgatggtgaaataaaataataatatcgacactgtattaatatgataagcatgattaggacaataaataatcattttcccctataataagtaatgaatagtataagatcgataaaaaagcaacattgatatgatgcgacacaagtccctttgttatccacacctttctccccaaaaaatcccttttaattttctatatctatgtaaaaagaacatttatgacgtcagccacccatgacttcttataatggaaaagattccatctgccccctaccagaaattcagaaaactagctcatttatgcacattcgcacacacatgtactgatatacattacatataaagatttgttttcatttgtgtaacgtagaatatcaaatttagtttgattattgctataaaattggtatcaaatctggtaaccaagctgcaatattgtattaaagtgacaaaaaaataatcagatgtgctattcattctcgaagagtctactccaaaaataggaaacataaaattaggtagaattgatttatctttgtggtttagtcacaacttttaaaaatatgagttaaaaaaatattcatattgttaaaatattcattattaatatagcttaaatatgtttagcatttttaaaaacttttaaaacaaatgaaaacaacttttttttgtaaactcattaagaagtttcagaccaaaactcatacatcttcctaagtataggtcatcttctaatacttttacccgtagtagctgccattcgaacatgtgaacttttagattttttcagggtacatttcgacttgaactatcaacctatagttaatgtaatgtaatgtaacttacactataattaacttatatgaaccatgttgtgatgagcgggtagctcccgcttgaggtgtggagtcttttcccgattctagacaaatgattgattctttttagttatgtattttgatagaaaatattgcattttggttggcccgtagatgtatccaacctagtatccaatgatccaaaaaattatatttcgagtttgtcatagaatttctctggttataactaaataattaaatatatatagataaattttatacagatatgctgatgctgaaaattaaaagaggaaagaaaaagaaaaaaacagaaaaagagagaaattaaaggtgtaatatttggacaaaagatgccaacagagcatctggcaaaaatgttagatggtaagatgtctatttcaatagccacatttatgttcaaacgataccgcaaacgccatgtggtctcttaaaacgcaacactttgtatcaatacaaaccaaaccaccagctgtaccaatcgctgtatatgcatgttgcgactgcgtttcaactttcgaccaaactcccttatcaatttctactgcttaagtgactaatcactgttgcattaactttcgaccaaactcccttatcaatttagcctatatgttttgttaactccgattaattagtcccacactttatagattgtttcctattcaatatttctttgtattcgaatatgattttgggtatgtaactatgatcttttagttacaatagtaagttagtaacaaattttgttataacaagacgatatgttattctacatattaattggcttctttggcttagcatttcacttacctttattttttgttttataaatgtatatttttttttataattatattttaattttacaaaaataaaactggattagtattatacattaaattcacttgtaataccagatatacaataaatttcacttatatatatgagctggtgagtaatacattcatgtgtctacttttttggtgaatattttttgaataggggaaaaaatttataaggttagagacaagtgggtccaaaaaaatgaagaaagttgtaatttatctgtaaaagcttgctggttacaacctgcaacctcacactttaagccttttagtaaaacttttctaataataaatatctaaatccttcactgcttgatttttcatttctaagctatttttactaacgaatttcctcctgcttaaatattttatatttctgacatttataattaaaagtgcctatattttggccaacatatatatcgactataatacttggttatagctaaatttgtatgtgagtaactaaaaatattcctagcgcagaaagttacgtgaattgaaacatattagatctaatattaaaattttgaaattgtatttatatattcaaaaaatatatttatcttaaattaattactcaggtaagatttttattatctctatgaagctacaaactcaagatgctgatgatatattatttcaattatgaataaataaatacaaacgtaaaaacaactattgtattaacctaaaacaccgatgtaatgtttgccgatggcattatgatgctagaagttagaagtgggaatagttatgataaatttagacaaaaaaatctatgatttggatgttcatgttagatgttctttcgaaagttttgtgctcaagagttttggagcttgatgtattatagcaactgtgagactatatcttctatgaaatatcttttatagaagaagcaagagagagtgtttacagattttactagcttccgagggtatcgggttattcgacccaaggttggtggaattccaagtatgcgagatctaatgttgatgtttatatctttatcagtagattaactgcataattatgattcatatataacatgttaagtttaacgcttgatcttgagaatacttttatactgattcatttaaaagttgtgattgaacttcgttcatcgatctaggtttgagaaaaagtagtgtttagacttatttaatgaatcagtattttacagtcatatgactagaatatatatagtgtggggtaatatctctatgtttggataacccattatagtttatctatgactcgtcaaaagatgtacgtttcagatattttttgtaaataagaggtttcatatatttcagaatgtattgtttatataagaattcctttattcatcgatgtgggaaaatccgcacgaagaaaattatctctaaattacgtgtcagttcatgtgttgtattctacttcattcatttctgaaatatgaaaatgatatagatattatttgtgtgatatatatctacaacttatttttcaaaaatatattatcaatcttttaacttttatataaaagacctttctctctttaaaatatatatatatacatatatatatatatatataagagacttgtggaaaatattgtcattttaaagtaataaaatattttgtataaaaagatgtgtagtttggctgtaatcattatttttatttttttttgaaagaatcattaattttctttttctacaacatatatcgatatattctaatttctcgaatatgaaaaaggtaagtatcctaaattatcatttaaacatgtgagtgtgagatactaaattactggttcgttgttttcgacgtaaacaactgtcaactgttatttgaaaggaagatgaactataacatcgttctatcttacaaggaaatcaaataaaacaagaagacccccaaaaaaaaaaaaaaaccgtggggtacaacacttaaaagaagtaaatcatgggacatgacggcatgaaactatgttcaaagttcaaacctggtaatggggtaaagatggaatgatattcactaccaaaaatgccactagctgatagctataacaaatcgacgtagcaaagtttagaaagttaaaattatagaatcacttttgatattacaatttttttataggaatgaaatatatgaaaagacaaagaaacaaactattgagtacatattatctttacatcttcttactcttttttcatcttgtttatttgttatcttcaaaaacgttagaaaatatttatcattaatttccttgttacgtacatatatacatgaaatatcatcagattacttgttagtgttatttctatctcatgagtttattatccgtcgtgctagactaatacttacactgattatatattttaacgtcagattattttaataattgtgcctaaaatttacaagtttcttaatacttatcaaattgaaaaatgatcagtatgtgttgtttagttttatgtggacaaatttatatatctgtaaacaaaatgaataatgaacaaaataagcttgcgacaagaaaaaagctaaaacacatgagatagatgttaggaacttagaagatgacccacctctcatatcatacatttagttaatgaaacatgcccagcctgttttgtacaataagctaagatatgttacatcaaagataccaatcaagttctctgtattaaagtgaattgtttcacgaaattgaaacatatttatttcaaatgcaaatcctccatttgtatttttttcatgtatatcgttcctacttgtctatccaattaaaagaaacacgtaactatactttgatttgaaaactaattttaaattatattttaggttaaaataacatattctctaattatatgaatcatcctattgatatattccaaattttgaatacatatatagtactatatattatcagagacggatcgtagtacgaaaagtttcttttaagtttagatattacataagaacattaactgtaaaagaaagtattagtaattgtttatatgattctgtcaagtaactacgatataaatttatttcagttcagcagatgtgttttactattaactatacaaaatggtgacactcggtagtcggtatctaaacatttttgctggtacgtatccaaattctagttacttgaaatatcgatgagatcaatcatcaatataaatattacaacaatatactatctattctaacacaaagtgtgtatatactatattactatctagctaagggcgggtaggtccggtatcgatcaccctattaaaatcaaatttcaagagtatatatatatatagtaaacctgcctgtaaaatgatacttaaaatgttagattcaatcttccaacaataatttattcattacaatgcaagtacgtatgtgactattgggggtgttaattatttcttacataaaggaataattataatttacaggactcatggtaagtaatatttataatttagaccgaccacttgtgtttctgtcattttacatttatgaatatgaacaatccatttgattccgtcctaggtgggagtagactgcaatctacaataattaatttatagtacaaaaccaattgattagtgaattggtttaagttattaaactaaaagaagtaattattcaaggttgagccctagctatagtgccagatatttttaattaaatcctaattaagcatttaattaagaccccaatagacgaaacgaaagcaagtaccatcatcatatataatcatgcatatttatcaaagttttatattttataacaagagagggaatcccaaagctatcatcatcatccacatttactctaccatactttcgattctttatgctctttttataatcttaattgttgttgaaacttttgcttctttattttaaatatacgtttatggtgcttatttaaacaacaaatatgtaatacgtcgaaacagtttgtaatatgtgtacgtaatattaaactatatcatttcttcgaataataacacatatcacatatcatatgttatttacaaaaattcttcatcaaatacattcattaacatatatatatatatttatatatatgacatctatgatcatatatttttatttttatcaaaatagtcatagtttccatatgtattattaatagagtttagtttacaatatttcaaagccttaataagtagttcttttactttgaaaaaacaaaaatagacatttataatagaaaaacagagaggttggttaaaatgctaaaagtctcattttattcatacttttagttttttcttttttttttgaaaaaccctatttatttgataacatacataaatcaacttttgggcagtggtgttacataccatagttcttcactttttttgtatagagatttgctatctgattaaataaaaacgaataatgcttgggtttaaaattgtgaataacaatgataatgtttctagtttccggcaaaagtagcaggggaagaatgattacgtgaatgatgtaggacccaaaacgttttgaaataaattactaaatttttgaccaaattgagttgtttaatttggagaggagtgttggccccatcactctctcgtcgacctctccattgtctttatggaatgaatgataaaagaggacacctcacgtggactctgctgccacaacgactctctccaaccatatccccttcacatatatgacatatttttcttacatttactatatattaaagactccacattgtacattttttcatctcatttattaacgcaacgttcagatttttccatttttaactagtcgtgaaaagtattttcgttgtacggtgaatattgtagcccttttttacggtgggtgttttttttttcatttgattgatgagtaaatctacatcgagaaaagaatataatgaaagatataccgaaatcttttgattatggacagatttattttgtttaaacctttttttttttttactgttttaaaaagttgactaaatgcttatctgagaaaataattaacgtgaaaaataatttgatataattcggattaagttaactataacagactgattttgattgagcagaaattaacgttgaaatattcacattggctaattacatcaattcatttttgcgttgattaaatgacactttcttttcttcaactattaaatgatattcccattgttgacatttctctaagtatatgattttaagtaattttcataaagaagcaatgaacagtattttcatttgaaaaaaaaaagatatgtaatgagatttttcttttaattttttaatgttatgtaaagctcacccatataattctcactcatgatctttgtttctttaagcttttcttctccattgtctctctctttcttatcctctctttctcaatcaattccttcagacttatacactttattttttttcccctcttgtcgaaaacatcacatataaataaaaaaccaaaaaccctaatttataaaatatatataaaatagttatagctccccacttatatatgcaaaagccaacatcaagtatcttaaatgtcataatggacggtggagacagcgtcggaggaggaggaggagatgatcaccaccgtcacctccaccatcaccaccgccctactttcccttttcaactactcggaaaacacgaccccgacgacaaccatcaacaacaaccttccccttcctcctcctcctctctattttctctccatcaacaccaacaattatctcaatcgcaacctcaatcgcaatcgcaaaagtcacaaccgcagacaacgcaaaaagagttattacaaacgcaagaggaatctgcggtggtggcagctaaaaagccaccgttgaaacgagcgtcgacgaaagaccgacacacgaaagtagacggaagagggaggagaataaggatgccggcgttatgtgcagctagggtttttcagctaacgcgagagctaggtcataaatccgacggtgagacaatagagtggcttcttcaacaagctgaaccatctgtaatcgccgccaccggaaccggaacaatcccggcgaatttcacttctttaaacatctctctccgttcttcaggctcttccatgtctcttccttctcatttccgctccgccgcttccacttttagccctaataacatattttctccggcgatgcttcaacaacaacaacaacaacaacgtggtggtggtgttgggtttcatcatccccatctacagggacgtgcacctacgtcgtctttgtttcctggtattgataacttcacaccaacgacgtcgtttttgaactttcataatccaacaaagcaagaaggagatcaagattctgaagagttaaactcggagaagaaaagaagaatccaaacgacgtcggatttgcatcaacaacaacaacaacaccaacatgatcaaatcggaggatatacacttcaatctagcaacagtggatctacagccaccgcagccgccgcgcaacaaataccgggaaatttctggatggttgcggcggctgcggctgcaggtggtggtggtggtaataacaaccaaacaggtggtcttatgacagcttctattggtactggtggcggcggtggagagcctgtttggacgtttccttccattaacacggcagcggcagcgttatatagaagtggcgtttcgggcgttccaagcggcgcggtttctagcggtttacattttatgaatttcgcagcgccaatggcatttcttactggacaacaacagctagcaacaactagtaatcatgagattaatgaagatagtaataataatgaaggaggaagaagtgacggtggtggtgatcatcataatacacagagacatcatcatcatcaacaacaacatcatcataatattctctccggcttgaaccagtacggacggcaagtttccggcgactctcaagctagtggatcacttggaggtggtgatgaggaggatcagcaagattagacacacacaaaaacattttaacggtgggattttctgccgacggcggtagcggtgacggcgttcggcggctgtgtaaaacttttgttttcaccgttaattttttttattttctgtagtaattttttttgctaagtaaaaaaaaaaaaaaaaacacgtgagattttctttttaattttgatttttttacttgattttaaatttgatttttcttgtgagtgagtgattaaatagtacacgagattttttatgtcaggttttttggattttgaggagaatatgacacttttttttatcattattgtttttaattgttttttttcttcttctgatagtgtcactgtcgtctcgattctcaatcatcttcgttttctttatccattaagaaattaattatacataaagaaaaattctaaaaagtattcgtcaaacaatgttggttcctatagtaataatagtaacatatacatcaaagtataatcttactgtttttttagtaacattacgtttttttaagtgttaatacaaaaaaaattgagaaactattttatcaaggaatgagatgggcctctctctattggcccaccaatctctgttatatttggcccttgaagtagttgtttcaaagctaatagaaaacagcaaagtgtctcgtttgttttacatggtcgaacgaaaacgatacaaaaaacataaaaatatctcgtttgatcttatatgctatgaaatatattaaatgctttttttagtatatgattcattttatctctgtttctttgtcgtttgtccccactaaacaatcaatctgattttgtatatgatgagatatctaatactattatatcatgatattgttaaaactggttttgtatatgatgataatattatatcaagactagtttagactatgagaattaattagaaagtgatatagtttgaatgtcgcgtacaaagttatggctcaaaattttgtttctttttttttgacgaagtacaccaaaaatatttgattgtttcagtatattctttttgtgtttgtatgcctttagaaagtaatattaacaatttgtaaattgatagtgtttaattagaacataatttactttataaaatctattattatgttgtgaaagaaaatattcactcaacatcgatcggtcatatattcaagaatcaagataaataatctgaagttttaaaaatctgttttcgcatgggttaaatataagtttttacaaaaaggatgaagacagaaaacaaataaaaataaatgtgaatgcagactatataatatatcattgaatgtataaattatacaaattcaataagtagagaaagagagagagagagagagattgattgtggtgcattaacaaaaaagagattgattgtggtggtgacatgaggactgtagcattgtaagggtcgtgggacctaaaacgttatcaggtgcagtgattgtcgtgtggacctctttgattctctcatctccgtaaccaacgttcacttttttccctcactgacaccaacaaaattctttctcttctcttttctttttcaccacactcgatcgctgtaattaaatatggcaacaccatttaccaccatttaccaccatatactttcatatttcgttctgtcttgtaaactacatctgtcaaagggatatgaaatgtatatataatcatatagtatacatcatcggacttgaaggtttagttacggaaagaaaatttcaacactaatgtttgaaattcgtacgtaataaaccaatggatgacactattattattgtatatatttataaattctcatgttgtcattatgtattatagctaactccgatctaatgttttaaattcgtaataaattaataaacacagtttttgtatatagttataattctcacgttgtcattatatcatatagctaaccccgatctcatgttttaaattcgtaataaattaatgtatgtcactacagttctgtatatatttataaattcccacattctaattatatgatatatacttcgagctagtgattcatattcgtaataaatgaatggatgatgtgctagttagtatacggattactctgctgaaattgatgattaattgagttgcgtcaatatttatttttacttacgttttttttagcaattttttagatatataaatatatgtcattaaaactcgggactacgtacgcaacgagtcaactgattttgtaggacagacagaggtgcaaacaattttaatagtatagttggggtaagttttagatcacatgggtttaatttcggaagcaatcatcgtacggaaacgtaaaacttggtccccatacgaaaattacattaaagtatagcaaatgtacgattataagtgtcaactcttcaactagtcacggggtcaaatacaaccatgtgtgaattgtttgtttgtcttttgatacatattttaaacgaatatattaatgcttttagtttcctttcacacaaatatttactatgtactagtcagtgattttagaaccttttagctcgtgcaacaatactgtatctcagaagactaatggtgagaaacatatcctaagcccaaaaatgtactaaattgtggctatataagtgggccttgttgctatgaattatatcatctccgacattggaaaacaaaacatcgagacagaaaaaacttgttacttagaaaaagaaaagaaaagaatgatcaactattgtaaactttccttgttcatctaaactttcatggggagttttggcaaagtcatgcacgagagttccaagctttgcgcattttttgggaaagatacattgttgcattaatagctcctgcagccaagaaaccagacacagcttgtcttccgcttgaaaccattacccttctcctcatgactttctccatacatttcgctgcttcttctctcgaacttatacaaacttctcccataactctacctgtacatatataccagttttgccatcaaaaatcaataattatgaatccatttcctgctataggatcagagagatcagagttgataccggtctcgctcacgaatttcttctccccgagtgacttccccatttggcttctcactgatgcaggaagagaagagaccagagaacgtgttgctgaaaggctagaatcctgctcacaagttgagaaggattgatataagaacaatctcaagattgagttaatatccatggtgatggagctataatctgtgtatacctgaactaatttagtgtgactagcttcagccgatgagaatctcaataagtttttggtctcgcactcttcaagaaaaggcttatacatcgactggaaaagatcaaattgtcccttcacaatcttgttcacctaaagggaaaggattgaatcaatggatcagaaatacttttcaccgaaaaaagtaaagcaacttccatgttatgaaaccaattttaccaatatgatgtaatcaagaacatgactgggttctctctcaccttattagtgtcctctgcaaaaaacatgcgcaagtctcccatgtaagaaaggctgcatattttggcgtatagatcttcctgcgccagagttccgtgagttatagtgtgcagtctagtgaaacttcaaggtttctgagtgagcagtgaacagaaaaccaacctcggtgaatttcgatggcaagagaagaagagctgcagatattgcagctctcttattaacagaattcacatcctctatgtccagattatcaacaagcatatgaacctgcaaccaaaggcactttcctaaaacatctcatgatttacagttattactaagaacaccaagcaactgacatacaggtttttgtaaacggccactcaagtagaacctcttccagtccagtatgtcctgtactaggtcatgcatccgaacaactccatacttgagcttctgcaaatagcttcacaaagaaggtaaatcatgcaagaaagatggcttaagattacatacaatgctatcatcctgagcagaatgaaaacatatgaaaatataattaacaaacttagattgttcattaggttttaaacaactctacagttttgggaaatttcttaccctgtcgttccagttgacaaacggattgaagtgaactccaactcctactttatcggcaacatttgtaatctattctcaaattaaagagaaactgtgagttcagtatttgattaagcccgtataagcaatgcaagaatatggtatatagagagtaaatatataccagcctagctccaccaaggtgaaccatccatgaagcatagtgatctgaattcattttcagattcttgtgtcatacaaaagaaaaatactaattaggaaccgtgagcttttaaatagctcctggtctaacaattataatcaaaagagataataatgctcaccgcagaatgccattttataggatcagagactccaaggatatagtccaccatcttagactgcacaaaagcaaaggtcacatttttacagtcaattagcaaacaggaaagatcatcacagagagttttcatgagaagataaaaaaaaaaaagaccttatcttggttatttgggtgcaatgttgaaccataaacacaacagaaatccacaggaggaagaacacttaagaagctcgaaagctcatctttttgagtagtttccattcagacaaaaataacccttgtaatgtattcaactgggcagacctattcagatgaagaaacgtaataaaaaggttgcttctgatagattggtcaaatttgatttcgagtaatctaattaaagtttctacaattaagttcatgatcatttgatcattttgatttcagattgacacaaaccttggaaaaaaggagaggaacgaagccagaggaggaattaggaagcgttagttgatttaagaggggaattgaagaagcttacctgcgactgcgagtgaaggcggcgaagagcgaggaagaacaacaaacgccgtgaagctagcttttttgggtttgggccaaacgagattagtttctaacagatgtttttccggacccggaccggtaatacccacgatccgcttaattatttggtccctgtctagctctaaaatcccggtgcaaacgaaccggcaaaaccaacgacctagcggttcggtattttgtttctgaaatctgaaccctccgatttgttcttctttttttttttctttttataatgcaaacaattgatgaaaaaatatattatggtccgaatggtaacctcggtttttaatatgtgagaaaagtggtataacattgcagtacagttcaattacggtacgtgcgagaaaaatatatttgcgggacaaatatggtttgtacaaaataagcggtacagaataatgtttgattgatgaaaaaattatttgcggtgcggattataaattatatatatatatatatattaataattaattattatttttgtgttaataaataagcaataacatatatttataaattattaatacataaataaatcaaaatatacatttttaaagtttaacatacatattattaaattcgttgaatagtttcatcataaaaaattgaaaaaaaaatcataattttttactagtaaattgattatagaacttatataagcttatagtggataataattgtcaaaatttctataagtattatgatatttctatttcttgtaattacattttcttagattttaattaaataaaaagaataaaactataattattgcatatatatatatatatatatatatatatatatatatatattaaagtccattagttaagcaaattgttatgtcctacgtatatttttttcttttatgcactaggtaactagtgattctgatgcacacatatactctctttttttgtacatatatttaaatggggaagctaatggaaaaaaaattaaaatttgcttaagtaatggagtaataaacgagggatgtgtgtatggaagaggcaaaggctgagaaacttttggttgggacgtaggacataacaatttgcttaagtaatggagtaatgaacgatttttttgttggaatgcggttttgagcaaaaacactaggtaaatgatttttcttcttttgaaaagcattccagtgtattgtttttaggacaaaattgcaaacttttttcttttttttttcgaaaaacgcaaatttgttaaaagtattgattggtaactgtattgtagttttaataaaaaaacaagaaaacgccttttgtatgtttcttaatcacagtgtatgaatggtgacatagaccgcccccaaaaccgtaccgtaactgtaacagtataaaaaatctctatatatacatatatatctatgtatttttgttattatttgaaccgtcccatactttttccgtatcacaaaatacagtcatcattcgaaccgcaaaactatatatagtatttcggtttttgaattcaaaatgaaggagaagaggaataggcagattaatataatttcgttatttctttttaatttcctatcttcaatttttcctcacccactgaatttgactatgccattaaaaatgtgtatactaatcatcataccgtcaataaatagagtttgtgggaaacacacgacagacacgtcatcagctctcgacggcgcgtttccatgcctttattatccttcacgttgaccccacatgcccctgttttttttttttggtgttctacggtatatttttgtgaaaatgttacttttcatctactcgataaaattcttaaacagatagtacaactttttacccgattaatctgtagaaaatacaatgttatttacactcaacaaacatttccattaatagaactttacccgatttaaaccactcttccactcgattaatattattattttattaattaaagatacgatgacgtgtccatgagagatgagctttagtggcacgcaacgtaagagaagaagacaaaagtaaaaaagagaaaggcacatgtcgaactcacgtgtccacttaaacgcaccaccttcttctgtgctctccacgcgcctccacacgccctcctcaacttcggaccttcttcctccaaaaaaaacaatttcactcttcattttctcagattctcttattatttcttctactcgtttcgaatcctaatcgtctacagtttccgacgagattctcaccggagaaagaaaggtagttcttttctctgaatctgttgtgttgagaacttagccgtaatttttgagaattattcttcactatttgatttgacaagaatatgggtaataaagacagaatctaaaacacttgcttcagtttttgaggaatcaaaaatcacacgaaagttttttttttttttctgctcctatgtttcttggtgcgtttgtgtttatttgacattaggagtgattgattgattataaagatgaatgatttgttagattcattaagatcactgttctttttgattaatcatcttatgtctaaattttaggtgacttgacagagaatcttgttctgtaataaaagcaaagatggtatcgaaaactccttctacatcgtctgatgaagcaaatgctactgcagatgaaaggtgattcttaaggagacaattcttggaaatagattatggaaccttttatttttatttatggggattgattatgtttggtgtataaaacagatgtagaaaaggtaaagtaccgaaaaggatcaacaaggccgttcgtgagaggcttaagcgtgagcatttgaatgagcttttcattgaattagccgatactcttggtaaatttctcatctttccgtagatttgaatgaacaattgctcgagtgtgttgtgatattttgaatgtgattgtgatatctaactgtgaacatgtttctttgttgcagaactgaatcaacagaacagtgggaaagcttctatactatgcgaagctactcgattcttgaaggacgtgtttggtcaaattgagtctcttagaaaggagcatgcttctctcctatctgaatctagctatgtaagtcaatttctatatgcacattgattgtgtttatgtattctgtgacgtgaatcaacaactaagacgaatgttgcttcaagaagttacttcatctttgtatttttctaaatggtcttgttgatggaaactggtgttgtgtgtaggtaaccacagagaagaatgagctcaaggaagaaacatcagtgcttgagactgagatttcgaaactacaaaacgagattgaagctagagcgaatcagtcgaaacctgacttgaacacctctcctgcacccgagtaccatcatcatcattatcaacaacaacatcctgaacgtgtatctcagttcccaggacttcccattttccaaggccccggctttcaacaatctgctacaactcttcatcctcctgcaacagttcttgtccttccaatacaacctgatccccagacacaagatatctcagaaatgactcaagcgcagcagcctttgatgtttaatagctcaaatgtgagtaagccatgtccaaggtatgctagcgcggctgactcgtggtcttctcggctacttggagagcggctgaaagccagtgaatgaggtcttgaacggctccacatggagtagcaacgcaagttataagacatggcaacttatgaaggactctggttttgtattttttaatacatcgttctgatgtccttgtgggtttggccttggctatttcttgtttttgatggttgttcataggatcaggaagttatggccttgatgggtcgtttgagataaataagtaaattagctctaaccattgtcattttcttttgtcttaagattctaaaaacacagaaacagaacaaaaaaaatcaaatttctttttaagaaaaaagctttctaatggaaactaaaatgtgaaattgggtttaaaagacaaaaccggttaataggttttggtttggattggataaagaatatgatggtattttggtaaaataggcacttgagaaaaagagaagtgagaggagccatcttatctttgctatcgagtgggtaagaagaatcagaaaacagaaaatggcgaattcactatgcttcttctcttctcctcctaccttttgcttccaatctccaagcaaaaaccctaaaccttctcacttcttctcaactaatgataacacctcttccttggtacagaagagagaactgcttcagacttcaagatcccaaagttttgaagttaaggttagaattttcccaaactcttctcttctctataaaatttgcttacttcattgaccatttcgttaatgcaaaatctcattctgtggtatcaataggccgcaaacaataatcctcagggcactaaaccaaacagtttagtttgtgcaaattgtgaaggggaaggtaagttcttacctgttttataattctcttagttttctactcctgaattggttagtaatttgataaagatgttttttcaaaggttgtgtggcatgttctcaatgcaaaggaggtggtgtgaatttgattgatcatttcaatggtcagtttaaagctggtgcactctgttggctttgcaggtttgctacatcttatattctttcttctaattcttccttctccacaacacatacataaactcattacttaatatatatttttacatttcttgtgggcagaggtaaaaaggaggtgttgtgtggggactgcaatggagctggtttcattggtgggttcttgagcaccttcgatgagtagtagaaataagcttcttccaagaagactggatttgattacatggactcaaaaaacactcttttataaaccttagaagaagtaaatctttctctctatcaatgctcttctttaccaaaaacatgtattactatttgttattgcacaccaaacttttgttgtatttttgtttttcagattcttctctctctctctctcgttttttgtcttctacaaattgctaaaagtctatagcacctctatggtagtcttgttgatggcttgaaatgttgaatggtttagagaagaattaatcaaagttttgttctattcatttacattgaaagagaatgttttatatcatcctagtatctatctatatgatattagaatttttattttattttgatatatttgataaaataagatggataaaactgaaaaaacattgcacctgaaaaaaggagaagaaatggaaacaactgtaaataacagataaacgcatctgagaccaacaaaaggagaagacacagaccttttttctcttatctgttgttgttgttgtcgtcgtcgctgggtcagaatcttgttgttatgtttttctttattctctcgctccacgtttcaaatccaacacaaagatctgtctgattctcgggagagtcaagtcagaaacctaacgagggatattagttcgtctaaattgctccaagctcaacatatgtttgttccgtaatttcaataggattcgatttgttccacaaaaatatattttcgcattgtggcgtgcggaacaaggaactaggtgcgtttctctatgatttttgatcatcaatcctgttttgtgtaatccgcattgtagatgatttggttatttctatatttcaagggaaaaatgatgaatgcaaatgcgattccataggagaaagcagaagtagttattagacgtcttgatgaggttttcgattcgaaagcttaggtaaagaacctctttggatatcaaaggcaaaaggggttttattatatggggcgagcattgggattatctggtgctcaaaacttggaatggcttgtttccagagaagtgttcccacagatagggagaatgagcaggtttgttccaaactctcttagtaaagatcatcttcaattcctaaagtttgattcttttggcataaaacttggttcaggcgatagcaattctgaagaaaggggcttatcttttgaaatacggccgccgtgggaagcctaaattctacccttttcggctttcaagtgtactaattcataaccttcagtcacagtttatttcaaagctgaagattgtgatttgatagtggttttctcaaaacttttgcaggatgaaatatatttgttatggtattgtggtaaaaaggagaaacgtcttaaactgagttctgtgacaaggatcatacctggacagcgaactgtaagttaaaatgtatgaatcattttatctggtaactgttttgctgcagatttctgaacagaagaatgttattgtaagaacttttccaggcggttttccgacgatatcctcaacccaccaaggaatatcaatccttttctcttatatatggcgaacggtctctcgatttggttagtagtttcctccctgtagtctttttcttgttgttccctgacatgtattattccacaggcattagctgtcttctgaagaccacatgcaatctccattgctacatcaatctctaacaagttcttactcgttgataggtatgcaaggacaaggatgaagctgagttctggctcactacccttcgcgctcttctctcacgaaacaactcttctgcattggtacttcactcaagaagccgtagtcttgctcctgaaaatggagaacaaagtagttcgagccagaactcgaagtccaacatcagatctgtcagcagtgacacaagctatgaggttttgttggttgttttctttcttcatgatagcaccatcgggttgtttcctacttattatcttcctgtctcacctggcacttttgcaggaacatgcaaaaaaggcctcaggatctcactgcaacactccacagagactggggaaagttttctcagaggttctgtcacaaactgcagtactaaaggcactctctttggacgaactggttcataaacctcatacttcgcctccagagactatcgagaatcgaccaacaaatcactcctcccctggcgttgatacaagtaaatatagcatttccagcgcagtgagttcatctagtcaaggatcaacttttgaagacttgaagtctctctgtgatgtctttgtttggggagaaagtattggagatgggctattaggaggtggtatgcacaaaagtggcagcagctcttctctgatgactgattcttttttacccaaagtcttgaaatcacatgtggcacttgatgcacagagcatttcttgcggtaccaattatgcagtgttagtaacaaagcagggacagatgtacagctggggagaagaatctggtggcaggttaggacatggagtttgttcctatgttccacacccaaaacttattgatgaatttaacggatcaacggtggagttagctgactgtggggaatttcatacatgtgctgtaacagcctcaggggatctatatgcttggggtgatggagatcacaatgccggtctccttggacttggtagtggagctagccactggaaaccggtacgaattctcggtcagatggaaggtatatatgtaaaagctatatcttgcggaccttggcatacagcgtttgtaacatcagaaggtaagctgtttacatttggtgatggtacttttggtgcgcttggacatggtgatcgtattagcacaaacatacctagagaagtcgaggcattaaatggctgcagaacaataaaggcagcttgtggcgtttggcattcagctgctgttgtcagtgttttcggtgaggccacatcatcagggaagctttttacttggggcgatggagatgatgggagactcggacatggtgatatagagtgtagactaatcccatcttgtgtaactgaactggatacaactagctttcaacaggtggcttgtggccagagcattactgttgctctctctatgtctggacaagtttatgcaatgggaactgctgatccgagtcatgatattgtgagagctccttcttgcattgaagggggtctaggaaagagtttcgtccaagaagtggcttgcgggtttcaccatatcgcagttttgaactcgaaagctgaggtctacacttggggcaaaggatcaaacggacagctcgggcacggagacactgaatatagatgcatgccgactcttgtgaaagctttgaaaggtaaacaggtgagaaaagtggtgtgtggttctaattacacagcaaccatttgtcttcacaaacccattacgggtaccgatagtactaagtgctccggttgtcgccatccttttaactacatgaggaagcttcacaactgttacaactgcgggagtgttttctgtaattcttgcacaagtaaaaaatccttagcagcagccatggctcccaagacgaacaggccttaccgtgtctgtgatgactgttatatcaaactcgaaggaattagagaatctttagcaacacctgcaaatagtgccaggttttcaaacgcaagtctaccatctagctacgagatggatgaaattggtataacaccgcagcgtcagcttctaagagtggattcatttgatttcttcagacaaactaagcacgcggacctgaaaaccattggtgaaacttcaggaggaagctgcacgtcttcgattcactcaaacatggatattaaaggtagtttcaacctgaaaggcatacgacgactctctaggcttacttcttttgattcagttcaagaagaaggcaaacaacgtaccaagcattgcgcttcgaaatccgacacatcctctcttataagacactcggtgacttgtggtctaccgttttcacgtagaggttctgttgagttgtttcctttatcgataaaatccagccccgttgaatccgttgcgactacttcagacttcaccacagacattactgatcatgagttactacaagaagtgccaaagaaatccaaccagtgcctaagccatgaaatatcagtactcaaagcacaggttagtccaatccaaccatttagcccctattgaatcaaaatgtattgtaaaagaagacaagtaaaaagcttttaatactcaggtggaagagcttactctaaaatcgaagaaactagaaaccgaacttggaaagacttcgaagaagcttgaagttgcggtactaatggcgcgagatgatgcagagaagatcaaatcttcagaagagatagtcagatccttaactctgcaggtacgtacatactcattgctattcaaatatgctacttaagctccggtaatgtagatttcagtcttattctcttcatacagttgatgaacacaaccaagaaagaagtagacaagacaaggagacaccgaaactcgttttgatataaaccttttgaactataatttgatcaaagtaagtgaatagaatgtaaaatacaagaagaaaagatttctcttttatcaaaattacataccgaaaacaaatcaatgtagtagttacttacaaaggaaagctcacaacacatacacacatttatgaattcgaaattgacaaaacagagaaataagaaaaaagttccaacctttatgattggtttagtgaaatatcaacaaaagcttcttcatttgactaacaatggccaaactaatactcatcatctgattagccatctccatctttttcttgatctcattacccacaattgttcccatttcttcaattccatcggaacaagtctcaccgtcagtcatggcggcgctgatccaagtcttaacatctccgacgacttcttccgtcaaccaattattcccacctttcttcttctttctctcgatctctgtaatcgaatcgttgagttgactcaacgcgtcggtgtaaagcttcacacaatcaccaaccgccgcgtcctcaggcatatcgttgattgatcggaaagagatagagaggtttgagatctctttagcagcgactcgaagagaaagctcgaggattgattcagggttaagctttgaatcagattcgttgagagaagatgatagagagttgaaacaggtctctgggtaacgagtcacggagcatagtgacttgagagaggcggaggagataggtggatggtgtggaggagagtgagtgaaagctccggcggttaaagcgacgacggagaggattaagaggagagatacgacggagccggtggcgattagggttttacgggaaaatgatgatggttttggaagtggagaatgatgatgatgatggatttggttttcttggtcggatactttgtcgtagcctttcaaggtgttgattgattccattgaagggtaatggttttttgatcgaaggaaatttgaagaagatgaatctgtgattttgggagagaaaaagtcaacaggaagaagttgaaatgtgaagctttgttgcatttaagagcaatcccaatggtttagaaccaattggttcttaattttcaatcttagccttattttaaattaaaatgttgtttttactaagttaagaaaagttagaaaaaaacttaactaatttccactccaatgattaggaactattgggttcttaagaaacaaaaatttaaattattccaaaacaatgtcttataatacaagcaattacacaaaatgtttataatacaattcaaattattgaggacttccaactaggcaactacacaagatgcttgctccttgatttttctgtctagacaaagaatctctgcctccacgatggctaattcttgaaagagctcagaaaactgttgaacaataaaatctcatcattgtttgatcattaagaaataattaacattatgtgtgattatgtctattggtattgcctgaggtggaagaaacaatgaggagagacttgggagagaaacaatagagccatcaaaagcagctcgtaaagttctagtcactgcttcttcttcctctagtctctctttaagatgcatcacctgcataaacacaaacattcaaattattggtatagagattttgagttaggaacagaggtgcttactccttcctctaagtcatgtctcttgttactatgtagctgtgatgaatcttccatgagtagttcctcaaatttcatgagtttcagagaaacataagaagaaggaaacgggtctaagtagagaaagataatgattagagtgaaacgtgggagccattaaaagggtcggttcggagtactaaaacagttattgacttttgttttttggtcacttgaagttgttaagaagagataatgtaagtcacatgagacttgccggaataacggcggatcagattctgataaaaagagaatctctgcaaaatgatgtaaagatattacatgtctcagcttttgatcgtgtaaaatcagattgggagggtttgtttgttttacctttcttctaccaccggcatgtgatgtaactaggccaacaagaattccaccaagagcattgcttattactgggacctataagaacattcacagtgcagacataattgtttttctatcaacataatcgatttaggatattgagagatagtttcttaccagtgttaaagcagttcagccataaaagaagccatgtctttgtgtgttcttgtaatccatcctttagtctagctgttgcagaggaaatatatgattgtggtgaatgtgaattaacaaggatcacaaaacaataaaaacatacttcaatttctgtttattgtaccttggaaagaagactgactagtttctgttactaaggtcaccaagggaacaagaatgacatgacaatgatcagcaaggaaatataaattagactaaacatgaaagaagagctgtcatactatcaatcgctagaagctttacttataaacttacaggaggaatacttaaacaaaaaggaaaactcaaagctagcataagttaaaccgaattcattcattttaaaaactgattaacatgctcaagcattacaaagatgaaataacaaaaacaaaaagaagactaaattatgacacatgaaactaaaatgttgcaacagagagtgaattgaaactatgagtttgacaacatctcattgattaatttgttcttgagagccacttctatatcagtaagtggctctttttttgtgaagagagattccagcaatttggtccttgataatctttcttgcttttcaaaatcctccttctcttgctctcgatccttctgccttagctcccaatccttctgctttatctcccaaatagactgaatctccaacatcacattccctttgtcttccacagttgttgtcttactcacagccttttttgctttcgcctttgcagctttaacaccaataggacgagacattgcttcttctgcttcatgggtttgtggctgggaggttgaagccttgtcagactttcttcttttggacattacagttgctttagtagaaggagcagagagccatttctgttcaaagcgaagcactctccaagcatgctcaagggtgaacttaccatgttcgctgttgtagatttcatgtgctaatgcaacgacatcatcgtcattctgtccactagatttctgctttgttgcagcttcatagctccctacaaacttgcctacaccttcattgatcttagtccacctctgctttatgtgacctgtctctctcttttccacaccgttgagctttggacttgctccgtaataggcagcaatacgtgaccaaaaggcataacccttttgttcattgcctattactgcatctttacttgtgttgagccaagcactgacaagcaccaagtcttcaccggcagaccatttccttctctctcttttcaccttaggtgtgtgtgcagcttggtttggagaaacatcatcatcatacggattggtttctaaattgtgagcctcttgttgactagttaagaggttcatgaagcttgatccatgactatatggatccatagactagttctctggttggtgtaagaaggagcgggaaagattgtttttggtgtgtgtttctagtgtgtttctggttaggtgtttaaataacaagaacaagagttaatagtgtctggtaataatatctggttggtgtttaaaagttaatggtgtctgttttaagtgtgacatgacaatcaactaccaagtatcaaccacataccgacaacaagcattcaataaaagccatatatagtcatctaatataattcatgaaaagtcagaggttcaaagatataaggttaagattgttttaccttctatgagccttccattcggtaattgtatccaattcttacacaacagacatcaatcattctagcaactgtatccacttctccatttaacctcaacaaaaacagcataacaaaaacaagtgttatgtcatgaacgtaagacacaataaatctacaatcaaatacaaaacaagtctgtaatcaaatacaaaacaaatctgcaatcaaacataagataaatttacgataacaagcaaacatatatgtacttaaccaacataaaactgtaatcaatcaaaataaatctgtaagcaaattgataaaattaaatctgagtgtactaataaacaaaattgcaaacaaatccaacgacaaaatcctagttctacgaacggcaaacgacggcaaatcccaagaaatagcagcaatcaaaggaagacaagacaaaataaaattgtaacaaaaaaaaatacagattcgttggaaaagacaactccatgagaacagagaattggacagcaacctatgagaactaattttcctatcatcaattcccaattgtgaaaacccctaatttctgaaacaaatataaaccctaatttactatctacaactgaaaacaaagagaaataacacagatttgtaccatttatcatgcagatgatgataatagcggctcaaacaagtaattatgacttgcaactctctcaattcgaaggatgaaatgttggagagattttgccggcagaagcgagagataaatatcatgatggagaagaacaagaaagagagagagagagatgaatatcacgatggagaagaacaagaaagagagagatcgtcggattacaatggtcgccggcgtcttgagagagatggagagaaagagagaggaaaaacagaaagagaaacacgagtgtttttttgtttcctccttttatttattttttctacccactcaaaacacaacatgtgtactcttcttagttttaagaaaatatcttaattaagatgtttatcttagctaagatttgttgatctcattaaatttaatcacttttatacttaagaattagctaagaattgtctaagaaccaaggttggagttgctctaaagtcacaacgtatttctgacttccacgtcttctatctatttacaatttacaaaatcaatcaagcttttcaaatgcggtttaaaattgattaaatcatagttttagatcacataatctaaatcaaatttatgcttgtattttcatttgattttgacagaaaccaaaattttggaaatgaaaattgcaaacaacaattacataacaaaagaactgttatggttttgctgttctttttgggcaaactagttatattgatagaagaacaaacttgaagtagcagacaagtagagagtgcagttttagccaaaacgttagctaaccgattagacttgcaggaaacaaaagagaacttgatatgaaaaaaaaaacgactaagaaaggcaatatcgtggagaatcccttgtagattgttcgtagaggtctttgtatttagcagagatataaagacttgagagtcggagaaaacgttgatggaggtcaattccattctagtcgctgcgatcaacactgatttcatagctaaagccgaggtgagtgtgtgcgtgttgcagctccatggtggaagactcgattgttctaagttttgaaaagccaccccattccgcacaaacctgcatttgcagtctagaccgtatcaataaagcaagaaacaacctctctaggagataagatatgtatggaatcctccgtacaaggaagaaagatcaaagaaaccttagtaataaaaaaactgcatggatctggatttttggtgtcaacatcctccattacatgtattctgtatatttctcaacaaccttgaaataatgaaattttcaaattggattttattaatttgagtgaaagactactaacaaaaagttcttatccacctttatcaaattttctccattgttatgtaatccaaataaacattgtcctgcgtacaacgcatcaagaacgtatgaaatcaatattgcaatttgcaattgtattagcttaatgaaaaccaaatttggtgaggattatattttgaaatattgtggtttaatgaaaacccgtaaatcttgacaaaaaaacaaaacaaaaaaatgagaacccgtaaataaacgttgtataagtaaacgtggcattatattttagtagatttacgggtttgagatattttggttgaggtttactatatcatttaaattgggattctatactaaatttggtgatttgaatttaaaaatctttcaagaaatctatcaaaaatattctcatataatatgagtatttgtttttttttgtaaaagtgttggtcatatagaattaaataattaaaaattggccatctttccagttgccgttgccagccgtttcctacttgtgctttttcacttttccgttctctcaaaccttttttctctgcttccgtttcgtttctccgttcaaaacaagatcgaatcataaaaagtttcctcctttttttcttctcgaaacaaaagagaattcttgacgtcttctactccattttccatcaatacccatttcttctatcgctctcgtttccaagaaaaaagagggttttagagagaagcaaaactcaaatggcgacgaacatcggaatgatggatagtgcatacttcgtcggaagaaacgagattctgacttggattaatgatcgtcttcacctcaatctctctcgcgtcgaagaggtacttcttgcttgttggggttttgtgttctatatcttgcatgagtgctttctctaattcttctatggtaatgtttgatttgggaattagggttttgaacttccaaggaattgtagatttgggtttgatttgtttcaattggctaatgagatttgtaagttaatgttgagttgagtctaatgagagtagacaaagggctttaggctttggcattgtatgattgcttacttgttttgattgttataatgtcatagattcactgttgtagggatctaaagagttctactagttttgtattgaactactgttcttgaatgaaaattttgtgtcactcttgtctttgttctaagtaaacaattatggattttgctaggctgcatctggtgctgtgcaatgtcagatgcttgatatgacatttccaggagttgtgccaatgcacaaggtgattttgtcacttttatatttatctaatcttacgatcattactttgcttcttggtgactgaatatctgaaattatcctctgcaaggttaactttgatgcaaagaacgagtacgatatgatacaaaactacaaggtcttgcaagatgtgttcaacaagctgaaaattacaaaggtaaatcaatcatctctcgatgtatcgtgttcttgtgatacctgtgtgctgtgtatatagagatttctgaccttgtttgtcttactgagaaaacacctcagccattggaaattaacaggcttgtcaaaggccggccactggataacttggagtttctgcaatggctgaaacgtttctgtgattccattaatggtggcattatgaatgagtatgtcagattttttgtatttgctaatcgacctctattgttttccaaacaattaagtttgtaaaatgtatggtctcttataggaactataatccagtggagcgaagatcaagaaatggtaaagagaggagtgtgaagggatctaataagattccaaagtcactgcaaacaaacaataaccatcctccacccaattccagttcagttggtcttagcaaagcatcaggtctgccatttgataaacagatttttctatgcaaacaataataattcttgattgcatttttcttaacatgttggtatcatcataattctcagggcccaagtcagcaaaagcagctgaagtgcaggctttgtcgaaggaggtacattgacatagagaccatcgctcttagttttcacctatcctctaatgaacgaaacatccatcatatgtcatatataatcctttttcatcttctgtgatacagctcgtggatctcaagatctctactgatctcttggaaaaagaaagagacttttacttctccaagctccgggatgtagagatactctgccaaactcctgagctagatgatcttccggtaaacgtttccgtagagcctgttcttttttttttttttaatcttgtttaagtgtaccttgcatggtatagccaccaacttcactatttagctccaagacaagttttccaatagtctagaaccagaatttagtttaccggctgttataagtacacataccgttcttagaattaagaggaagataaagagctcttaccaatgaactcctcatagcaccaccagatttcatcagcgaccgcattttatgtttttcatcatatgaactcaactttatgaacataattttgtttgaatctgatatatatgcttccctggaatgcagatagtggtagcagtgaagaagatactgtatgcaaccgatgcaaatgaatctgcattagaagacgctcaagagtacctaaaccagtccctaggagttgaagatgatgaagctgaaggaaacggagaacaactggaagaagaaaagactcaagcctaagctctgactattaacaatcctaagtagaagggtgacgaacaatggctggccatggccttctcttccaagtttcttttgtgaaaggaaactaactgaaacttgaagatgaatgagcttcttctattagaaagattagtttgaaaacaaagagacttatttttgttactattcaagaggcttttttcttgttttaaaacaatactttgacccaaagtgagaatttaagtgtcggtgcttcctttttgttttgtttctctattaactcatgaatcattaatttaagacgaaacagaaccagagctggttagttcaatttcaattaaaaatccaaagttgtgtgttatatcttaatccacaaataaatgaaatgatctcacctatgaatgtaccttcgtatgagatattgatttgctgaaaaatatctaactaagagaacactctactcttcgctaccttcttggcttcggcttcactcaaatatcgaattctattctcacgtagccacttatcgcctctactcagaccgtccttcacttgcttctcttccatcttcagaagcgtaagcccctcacttagtttaggaaagaaaccttcgggtctaacacaccacgtccggaaaaccccatatagaacctccatgtctacttttaacctttcgactccatcattggtaaacttcacgttcgccatcaagatgctgttgaagaacaacttgtctatctctgaggctagagttctccacatagcggtaaagtctgctttgtttagattttcttctattatagacgtttttccttgcaagtagtctagagccccaactagtgcccttgacaccgtccattctttgtctttcttctcctgccattgctttctgttttttatgtattctcggattcgagcatcaaagcctctcaagatcaccaccgacaatttgtttatccactctagccggaacttctccaacttttcaaattcttctccgaaaataccttcagaaggttcagtaaagttctccagtcctggaacttcctgtggatcgtgctgtccagttcccatttcaaggaaaaagacatcctcagaccattcttctaagacagattcaatgtagtgaccagcattaatagagttcgagaccttgattagatcgttattttcagttaatgcagttagtccgtcggcgtcttggcacctgagaaggaggcaatccaagaacttatgaattgttggtgaggctgccagtctcaggaacctagccctcaaatataaggccggcactgatttggatcgttcgattattgatgacaaatgctgtagaaagatgctggaaatgattggtggtctgtaaacgttggaactggagatgagttcgtcttggaccttcgctgtccaatttctgtcgttatcaatctcctccttgaatttgacgagcctctcatctagctctatctctgcccataaatcaagccaatcaggtctgtcacagaaaactgagagagaggaaattctcaaaagattcccatcttcttgaagcgaaagtattcctgattgtgataccaaagactgaactcgcttatcaaaggagatcatcaggtcaatgagatggagccacgagaccttagcctcagaacgaagatcagtttcatttgcttcgtctagctgaccaacatatataggaaagatctctttcaccaagtacaaagacagtgagcttaccatagccgaaacccactcttctcggcaactgtacccagctagttttgcttcatccacaagcggttgtaacaactcatccatagaatcgacatagtcccttgtgattttatacacaagggcaaaaatgaattctggcttttcactccactttgtaaaatgtcgctgagatgcaactgtcagagggttgaccagctcttcaatagcccagagtggctggtggaaaagaacattttctcccttatggatcccaagctgccgcgactttctttgcaactgtaacccctgcaggctacacaaggcatgaaaacttccacagtattgacttttgaggctcccttccatgttgaaaagcggattttgaacattttctgactttgaatcaagacttgccgaagttagtgtagaaagctgaggtggccatcgaagagaagaaagcaacgctctgtaatcagcaattgcctgaggtctcatcatagctaaagctctatcaactctatgatcaacagcagaaacaagacgtgcccaccgaggatgtctctttgctactgaactcagtatctcttctgtcgttttaagtgttttaatagcatgtagacgcacttcctgaaatcagtaaaaacttagaacattgaaccacacacactggctaaaactacggaacagtctaagctgaagacagtgtgcttacttcaaaaccacttgaccgagatgttcttaagtttttattcaaagaagacatcacagcatcctcaatatcaccaactaaagtgtcaagttttagtgcagtctctgaaacatagagaaagatcttaaaatgttgaataccacagtgaccaaactaagaaagaaggttggtaactccaactttgggactaactaatcccgatcaacatcgataacaccaaatcataaaatagagctagtctttatcagaaagcagccatcaaatacaaaacgccttaacaccaaacataccagcataagcacgcacagactcaacttgtgctacttcctttgctaatgaaggaagatcctctccggctacatgctccgtcgcctcctcctcctttccgctatctgaatgaattaaacaattatcaaattctcaaattataacgggaatatattcaatcttccatcaccaggactgaatttacatatttgactacaacatttcaagaacataatctacatccagaagaatcgtgatgaaatcatacgaacctgacgcggagcgagtaacggaggtagaagaagagagatcagccaatttggcattaacctcgaaaaatagaccaccgacgcgatcggaaaacgaagcgtaagcagcgagacctgactcgagctggcgatttaatccggccaatctctgatccaattcggaaatctccgtctgtaactcggaaaccagacccgtagaatgagagagatccgtggattctttgaatctgccatcgagaaagctaaataccgaagcggagaagctcgagacctgtggaagtggtttgatcgcctccatttgcgattcgtcgtggcctcagtttcatcaagaacaatgaaaaattgaaatttcgttggaagaagatactgagtcaatgactcggagtgttaacgagttgcgagttttggtaactcggattaatgggccctggttaagcccacaaaaatgtttttaacatatcaagtaaattaaaactgtaatggcattctcaaagaaatgacattcttttatcggaaaattatcactaaaatctccaacttttatttgaaaacatttgtttaaattctcaacatccaacgaaacgaaataaatatcaaatttatgttgatttttctaataaatatcaaacttatgtgactttcttaataaatacaaaatatttgctaatggtcatattagacatgatgttaagtagattaacagattccgttaacaaaattaattttttattaacatacccgttaattcaaaacattattgctttctataacaacaaaacgttattgttttctataacaacaaagcgaaaaaaaaacaaaaaaaaaacaaagtgacgtcgagcaaaatctccaaattcaatcaatcatggatccccaaatcgagcaaaatctttaaccttaaattcctatatgacttgaaattaaaaatttaattgacccgttatgacaaaaagacgatgttttattcttagagagaacgttgtcattttcaattaacgagtctattaagagaaaatgaactttgatagcaggatttgttatcccacttaacggtatgtctaatatggctatatcaacaaaattttattatttatttggaaagtcaataaaagtttggtattttacagtatttgaaaaatcgacagaaatttgatatttattttgtttcgtggaaaattgaggatttaaattaacgttttaaacaatttgaggattttgatgacattgtttccattcttttaagccaaattaggataattaatcaatggaatcgcaccagcaaactcaggattagtattttgcatgcatttcatataaaaccgagagtgtgatgtacacgcgcatgtatatttaagtacatatgattcctaaaataaacaataaatttcgagttgtctaaggaaatgtgtagtattgagtctcgtacatatttgtatatataaatcatcttacacaataacatagaagcgaatcattgagacagaaaccatatggcaaagagatctccgtaatctttcttggaattc

SEQ ID NO: 85 - DNA, 96679 bp, Arabidopsis thaliana
aagctttgtgattaaatgtgttctatttctggcagaaaaccagtgtcaaggaacttgacttagaggctgcattgaccgagcgccaggtttaaattctcttccctacttgtcgtcaccaatttcctttaacccactgctacggaaatattctcgtttgtatttgtttatttttaatagatttccacttcacactgtcttggtaactccgattgtcgtcacagttccattttaaggctttgcactttgtaattgacacattgttgtatgaatcttttatactgatagtggttaataactcaatactctcctgttgtcttgtgcagcaccacaataaactaatgatggaagctaaagcaagaggagaaggatacaaaattgacaagctcagacgaaatatagagatggacgagtatgatttcttacactggcgccgatctttggaggaaagagaagcattgctcagagatatcagctcgtaagtaaaaaaaagttcactttgatgtttttcaaagaaagtgtttagatgaagaagatttattttgcagtcggcaagcacttggtttaccattggaggaaccagggaggtacaagccaggaagcttctttgggaaagaccagtacgatccaacaagtgcattatatcagtatgactactggggagagccaaagaactcagagattagcaagcaagagagaatgaaggatgcacacaacaaatccattgttgggaaaggcaatgtgtggtatgacatgtcttacgatgatgcgattaagcagacaatagagaaaagaaaagaagggtctaccttggcgagtcaagaagaagaaacagagtcagaggaagaagaagaggatgacgatgattttgacgattttgactatagcattctgagtgatgagagcagtatcggttactcggaacagcaacctcttgttaacggtactcaagtcttgacagactgatgtttaaaaggaaagtaaaaataagaaattgtcgaggttgatttatttgaatttttgtctgttaggtttgatctatttgatagtttttttttttcatttcttcttatcccggagatagtaaaatcagtttcttattaacttagccagacgtttgggatcttgtagtacaccgttgaacgttaggaacgtgacgttttttgttttttctatcaatcgtcgtcagagaaggtagtcttgacaccgcaaaatacgcctaaatgtttctcttgtttcttctgtttgggctccaaaacatcaacttctatcaaaaggctttctcgttcgtacctggaatatcaaaaacccttgtcatctctccgtgtataccaaaaacttcacaccatgtgtgctctttgatgacaaaactcttaaggcaaactcttaccaaagctactctgcaaggttgtacctaattcacaaaaataatagcattaaacttgtacaatgacatcaaaactctaaagcaataagttagagaaccaaatctccataacatggaaaatcagtttacttgggtcggagagggtatggagctatctcagctacggagaagatgaaaacagagacggtttattagcctggaagagttcgttgagagcagcaaaagaagttataaatataaaccttgaagaggaagagagcgagagaaaagaggtgctccgagttgtatatgctcgttaagggttttcgctcttctttgtgggccttaaaaggctaataagcttcggcccaattttattattctgtttaaatcgtccgttgacttgttttattttatacaaccaaaaacaatcttcatacatattgtttacggtttaaggatggtgtttgcaacgtctcagtactccgcttctgatcagttaggtcattaacaatagtaacggaagattaagtaatactaaaagattctaacaaacaatttacaaaagaaaagtctccttaaaattcttaactaaattattatacaatttatgtccaatgtaggtagacttgtattgctatttaaaactcttaatttatttatgttttgattaatttgattatatataacgaaaaataaattcaaaaagattctaaaaaacaatttataaaagaaaagtccccggctaaacactattcatttgacccttaaaaactcgattatagtatcatacaatgtctttgattttagtcttgtagcgctatttcttatccggagatggtaaaatcagtttctcattaacttaacgatttggaatttggtacacaccgttgatttgaatgttttgaatctgacgtcttcttctttttttgtcaaaaaatggaactgatgtttaagttccaaaaacacagctacacatagttaaacattggtccatgtggcatttctattatggcatagatgatatatagatgtcccacgtatcattagatatcgcacttttaccgcaggtagactgtagtacattcaaagctgtagtacaacatttattcctcaccctccttttttgttttcttttgctccgacgtatcacgtttattgggtcgtttactttcttatattccttgtttcctcaaaacgtgagtgccgacaaaagaaaagaaaatatcaaaatcaaaatgtgatgagttcgactgaaatatctcttcaagtgagtaactagctcaaagtaagaccggttcgctcacacttttttgtagcaatcaagatggtatgtttcacattttttggaccattttggaatttgcatgtttggacgatcactcggaccgtaatttccaaccgtccttgccgtgaaatctcacaacatgcgtccaatataggtgggaaccgcaccgacgatacgcattaaatacttacaaaattttccttcattaattatttttaagcaacaagcttgaaatttagcatcacaaatgcgtcaagaacaaacaaaagaaagatgcattttttacaaaaattcttaaataaaaaactatttaaaaaacaaccaaaaacaaagaaggcataagaacaaaaacgacataaatatatgttaaaccattagaaatctaattagttctgaatccatattttatcattggaggacatatcatgtgtaatgttcgtgcccatagtgactaaagttgatctaacggtgtcaaaggcacaaagcggccttaacgtcgagcctccaagcaaaaccaccaccgacgtccattctccacacgtcgcaaggcaccgtgactgagcctctctcacgattttgacacgtgtactggagtttcattctgcatgtgaatccaggggacgttagcatcggcctctccctcatcaccaaccgtacgatcacgtgaaaactatcgccgctagttatctccggtgcaccttcttccacgggaataatatccctagccatcttccgatacgcgtcattagtccacgtgactctccctgaaccgtcggatatgaaaccaggacacgtgtctctcacaagattcatcttcctttcttcatctgacctccctaaaccgtaaccgtcaatccaagcgtccgttacacgctccaccgtcatacacgacgaaatcaccaccgtcctctgcacaatctccggtgtctgataagccggtgtgagcatccctccgccgtctttgaaactcaaccataacggaccctgccgcttctgcttctccaccgccgccttaagatctataggtttctccggtaatagagaaagagtcaccgcattagcactgccgtgaacgacgggtttatccgacgtcttccgccgggtgcacctcttggcgttaccaccattctccttcagctgatgacatttcctctttcttctactagctgatctaaaggaaacgtcggagcttccgccgccgctatctccgctggatacgggatttactccgccggggctggccggtttaggagcaatgggacgaaatcgaagcatgatgcgatctgctttggaaagatcgtacggtccagagccaatggcgtacctagctatgcaacaccctcccctaccgtccattttttctcgctatctatatcactcttgatatttttgtgtaaagaatgtttgagaattaggtaaaagctttacttgagctgaggaatacactgaacagaaatggtaagggttttataacgtctgtgatctggacacgtgttggagtctatactagttgtgacatggacacgtgtctttgcctgcacgcttgtggttgtgttgggtctagaagacagtagtaaagggtttgggttgcacatggaaagttattctctctttttgtttttttgcctaagttattctcccaactctaaccattaattttaccgttcagtaaaaagaactgtaactttatatattagtgtaggagaaaaaaaagtttggtctatgctatgacaggagtgatagttcttgttgcaagaagaaaacatagttcttgttgaagattatgtattttgggtcgagttttttttttggttaacttcacataaatctatgcatataatctttttgattatttttaccactaaccctcaactcattgcttcgttttggggcaacgtcaaaaaaatgttaggcaaaaagataaaaaggtataatttggttaaaattagtgacaacatccctatacaattgtgaacgaactaataagattcttggactttcgtatatttcccaaccacactcttaaaactaatccatatactataaatttaagaataacacagtttttttatttaagttttttttttgttatttgccaatcaagtactaatacaaccatatatagagtggatcactggtcagtaattagttccaaaatttgcaaattaatctccacttacgaagcgatttactgatgtaacaatagtgaagagatggcaaaatcaagttaaaatatctgacaacaaaaatggtttttatacgcacgagtcacacgactcaaaaggtgatgagtcgatcgattataattataatcattgaccaagtctaaatttaaagcgaatggcatcttaattaaatttaaagtgattgtgacaaattagatctgaaaggggacaagatgatctcatgcgtaaatgaacttaaagatttggtgacaaaaataaagattagtgccaatggagttaggtaatcgttattgaaatatcaagaaggaatattgattaatcaaatatactcctattgtacctatctatagtaaatgattataacaagtataatcatctatatctggtttataggtgtttccttaatttagctattaatattagaggaattcttatggacaaaacttggatacattcataatacatatataaattttacttgagcttctgcttcgagatcttcttttgaggatagacatattcaaacaataacggatttgacaaataacagttatagtttgaccagtaaatgagtttaatggctattagcgacttgatatatatgttttacgagttcgaatctaatttttgcaaatgggaacaaagaaaaaatttaggccagtggacctatgccaaacaaagagtttgattgtgtaactttgttttctcaagagatggtaattagtttcaatcttctatatgcgtcagatacatattactgtccaaaccattttaaatttctgatgagctaaaaacattctcaaaaagacattattcaatctgtttgaagtctatttttttgggtagaataataaacatctcataagagttcaaaccaaaatcttagtctccaaagattttttgttatccgtcggcttagtttctaggattatcttgttaatcgccagctttagctttgtaaaactctatctataatctatctttcagtgaaaaaaacgaaaaaaaggagttcaaaccaaaatcatatgcaccaacagtttagtctaaaataatttggatgttaagtaatatttagataatacgattgactgtattatagaataacggaattgtattaaataaattttatgtagaatgaaaaataaaaaatcattaaaaaaaattaatttctatatgtcataaaaaaggttcatttaatcccttggtttatgaatgataaaatgagtgaatataaaccagtcagaatttatagttttggttcgtaatatttgttgtcgtttcataacttaggttcaaatctgagagtgagttaataaacaaaattcccaaatcttaaacttagactagagttctaaccaaacaaatcttgtaaaaaactatttaatcttagatttgggatagtagtgttcgaaggtgcgagggaatctagaaagtattacgagtggtccgtgttgtgaactttgcatgagaacacgcaaaaggacacgttaagacaattcattagcttatgtttataataatctttttttttttttttgctaagaatatgtttataataatcatcacataaactattagtagttaactttatttgtttatttaatcaaatgaaattaaccaaaaccagttatactaagcataaagtactcatcacttttttatatgttttaagtacagcacatttatcgctggaagtgttttcactctagaaccacaatctttttttcgactaagacatcagtagtcaaatattcaaatctaatttggtataagtcattataattatgattatgttagcatgttttcttataaatatcaggttttagagttggtaactccgtccacactttggttttccaatttttcttgaagtttttgaaatcttgttagtttgtgaactacaaaactcggaaaaacaaaattaaatatcattaggtttaatatggttagctagaatgatcttaattgtttttttcagtggagttttggaatcaacatttggaattgtagttcaaaaagattttaatatctttaaaaaataaaataataatatcatttcgtacggtttaatatgtggaattaacatttcattcaaatatgagtcgtggaccatatatatttgcattcacgatcaatagttgcattgcttctgctttgagataaacagcatggactgatcaagatgacttcttattggaaatggtatgtgttttcaacatcactagatttgtttttgggtatccaatgttttcttttttccgtttacaactattttttcagtctagtttagcaaaaaaaactatttttcagttttcatgtttataataatttaattagtaaattgtttggatcatatagtgttagacttagaagtttaattttttctttgtacgtcttgattttttggactgattagccatttcaaatatataatataattactatgtttgggaagaaaaagaaaaaaagtgattcattgattggtgggcaaggcttggtagttacttgtataaaatatagtaacaaaaatgttcaccctcttttaatatgccgtctggaacacgtggcacgtctcatataggttgccacaatacctagtacctacctacgcaatttgaatatttggtatgttcataagataagtttcacaaatcttatcagttcaattaataaaatatgattcgattcttataattaatattgagttgatcttccgatgaagacagttgttctgagggccatctaatattatattcgcacttcaagattaacttcaagatagttctaaaatgtaaggaagcaatgttatcttttatatgcgaggaggaaagttttgaaaaccaaattatacggatcaaagttcttataaaacagtaattaattaaatctaaattacaccaacaaaagctaattataactcatttatctttcttgtttcaggaaaacgtaaataaactcctaaatactgaataataaacaatattatttgagtatcgattaattgtgtactgtgtacatgagcctcgtcaattgcaatgtttataccaaccaattacctttagttttatacaagaacattattttcatattatcgtatctctggaccgtgccaactgccaagtgacttacttgaacttgaatataaagatacacgtaactctcacatgaaattcagggaaaaggttaaaaagttgagatgtgcttccataatcggaatggtgtatgtaatgtacataataagattacatataatttatgcataacttataatacgataagtggaggattccaaaggtataatatgaattgaccaagatttacgtcactcctcttgtataatgaataaaaagtagatacaagcctaaattactacaataattaacatttgttctatctatatatagtacatgatatagatattattttatacgtgataattggagcctggagggtttccctttagagaagtctctaataatagtgattagaacaaccaaacgaacgatttactttctaaaagtagaaagcggacaatctcttatctttagaatataaaagaaataacatatgcttttcatttttcaaagatattgattacataggaaagaaaacattgattacgttctataatctcacctgctgctttgatacctaattgtataattaattagtatccgatacagtaatagtagtacacagttcgcgtcgccaacagttttcgtaacaaatactactatagtactatcatccgcaaattaattgattattaactaatgaaaccaatggagatcgtcatttagtaatcacaagtgaactcaagagaacaaaagcagacatgttcgaccaatgaaaactagccaacccgaaataagatatttattagggtttaaagaatttgtgagaatagaagaattaggttcgtcttgaaggccgtaaaagtcccaaaaccaagaatcctaacttggaaaaatgacgaagttgtttgagccacgtgtgaggactgtaatctggttggtagaactaggatgagtcaccaagctagtgtcccctgtaggacaatagcactactagatagatgtcttttactccaattataccaaagtagccatgactagaccacttctccatttgttttttatttgatgttctactctcaaaactaataaaggttaccggccgtttgataggcttacttttacacacagacatatccacaaattatgtggttatatacaatggcggtcctaatgaagattgagaaaaattactagcacaattggcaaattttggttattgaaaattttaaatgaacctactcacctaggtaatgatagtataatactaaggaaaatgtattggagtgatgatttttgaagacttttattttttttaacaaaattctgttactcaatttattatttgcaaatgtcttcccaatctggtgttattgaacatataattcacttaaaatagtttataataaattacatcccctgttttttattcaatagtttatggaagtcatataaaatttgttgtattttaaaatttatgaatttagcttataatttatagaaacaattgctgggttttgatatagcagattagcagttggagcaataattcaaaagcttatataagagttttcaaattattgtgcgaaaacaatctagactttttatttgttatttgaattatgtattttctactgttttcgaaatatgatcatacaaagatgagacgaaacattttaataaaatctttgaaatgtttctaattaattaaagaaaatattttttctaattaataaaaaatatatatatatatatttttttaaaaccaatggagaaataaaaatttagtatttccttaaacaaatgattttgatattaactattttaactataaactaatatattctaattataattaaacaatttttacccataactaatgacaattaaaataaataaatgactgattttggacaatgttcaaatgttcttctcttttaaaaatataaagatagatcattgctcgctgaaaattgttgacaacttgacatctaagcgatcggtgtgtgcctttgtaagttaggttgattctacagagtgagattaactctgtgaactaataaaattgtggagaatgagagagtgatgagatttttgaagtaagatgcgtataattatttatactaccttgaagggtttatttgggttataattagaattgtattgtggtctctgtatagtcttgggctttatatgttgggctaaatattgttaatcccacaaaaaacaaaaaatccgacctgccggaatcgaaccagcgacctaaagatttgctgtcacagactacagtcttccgctctaccaactgagctaaggtcggatgctgcaatacattcgctttgtttactttattaacaaatgtttacaactaagaataagctacatgtctacaacaatgcaaaagaattgacattatagacattctcattggtttggttctcactgttcacatttcatttagcttcaacatctacatggccagttcctaactagattattgatttttgggcttatttggttattttcggtttgctcaatccaatttggtttcgtttgggtcagcggcaagactacaagctctatttctaactcgatgcaaaaaattatgtttcaaggaattgaaccaaaacttacctgattatattcggttttggtatgttttacaaatttatacagattgatttcgcaggcaggagtattgccacactgatattctatatataaataactcgtttttacatattctattaaacgttgttaaggatgtgacttcttctcttgatcttcaccttaagcccaccagccatatgagccgttaaaagaggaacaaaaaccggccggtctttgttaaccggcacaatctcaaaccgactcaaaacagaaccaacgacgtatttcatctgcataaatgccatctctttccctacacaaaccctcggcccggcttgaaaaaccggaaatttgtagggactaataggtttcaaaaccggtcgtgtactccccggttcagaatcaaaccaccggttcgggttaaactcttctgaatccgtaccccatagcgtctccatcctccccataccgtatgggaaataggtcactttgtctcctctcttgacacgtgtcccatcaggcaaaacgtcgtcgtttgcagcatgtttagagtcccacgaaactggaggatatagcctcatggcttcacatagacaagccttcgtgtaagccatctctttcaaatcctcaaaccctaaccctaaactcaccaacgggtccacttcttctaaaatcttccgctccacgtcatcgttctcagtcaacaaccaaaacagccacgtcatcgctgctgacgttgtatctcttcccgccatgataaaactaataaccatgtccctcactgcttcgccgttgtggccggcggctagaaacctcgacaaaagatcttgctttgcttctgctccggttccgatctcaagactcttcttcttagctctgacaatctcagagaccaacacgtgcacggtcctgatcgcttccctaagcttcctctcgcttcccacgttcaacacacgcttcgttttccaaacagcgtaaataggctccgtggcacggcgagcactaatctcagcagcggtgtcaaaagcctccacaagtggattaacgggtcgggttagatccaaacaatccggatcccaacccaacgagactttacaaacaacatcaaaagcaaaacgtttcaaaacatcttgcaaatccacggtcgtaccaacatcagccgccgtggataaaaccgggactagacggttctccacttcgtctttaagaacctcaaaagcaaaactcctaagcgagcgagtggagaactcgtggctagcgagtttgcgctgcgagctccatgagtgaccgtcgacattgaatatgcctccaccgagaagatcaccaagaagatcagtaaaaggtttacctttagggaagttaaagaagtttgttttgagaatgtactcgacgtttaatgggtttgttgtgatgatggtgcgacggttgccgaggagaggaactaagatggtttgagacggagagagacggagaagctcggtgtaccattgaagaagacgatgacggtttttgttgaaagagagtatggagccaatgagtggatacgatggtggtccatatgtggtgttttcttggacttttttagttgaagatgaagataaaaagaagatgatggttataagaaacgctagtatcaaaaaactcagaagaaatgccatattgtttaattgttttttgttcttggttttttttttgtgttggtgtgttggaaagagtttgtgaatgtgctttttatattgctaattaagtgtttgtgtgtgttcttggtgggtattgcgtgtgtgtatatagaaagggaaaggtggcgggtccggaccaatctgtcccgaaacatatcgcttttagtattaatttgatttcttatatcacattttgatcgacgtaacacggtattatactattatgtgtctacggagatattattttatctccttttttgtctttagtgtagctgtatgtcactgtttcattcctttttttagtctaatatatagtatctttttttgagaattgtcctaacgaaaatataaatgtttagtcaggctattttgtctcttttaggatgacgatattgtttcgagttcctaatactgtagtatagattttctcttttagtgataagctccatcaggatattgaactgttagtgtaactgtgagtatgtatcatcaaatgattaatattgtaataagcacattgaacaactttcctgaaaaaaccacatttgtgtataaggaatttataaaattaaaaaaaaaacaaaaaaaaagaatttataaaattaataggacatcaaacatttcttttaattaatttattcgtttattacatattgtttggcttacttgaccctttatttatcgctcgtttgctatctaagccgcttttgtgtttcctaatttgacgtgttgcaaacgctttggcgacgcagaagtccaaagttttagaacgtggcatatctccgacaaaaccacgatagagactatgacgcaaggaaaatagacctatattaaagtaactaaattaattatagtgtactttgaatggttaacaaaaaaactcaaatgatatacgacatctccattaatggttacaatattacgaaacatccaaacattatattaatatttgttaggtcaaaatttgaatcgaaccgtggtttctagaatataatacatgtattaatggtatagttgaaatttgaatggtagcttgaaaacatgaatttcgctccggcttacaatatgtgttaataatcactattctaatgtcttaaaaataattaagcgattatacttttgataaaatggtcgggtgtcaaataaatctggaggcgaaatgtagaaaagtaaacattgaaaagaagaaaacaaatactagcaagagcctgacaaaactgttcccactcgaacaagagctattcaattgtgcacgtgtttctttaggcttgaatttaaccagtaaagtcagttttatatgagacgaaagaaagatgaacttgatttcagccactcacgttgtcgataccgtcttttcttgctcgcacacaaaataattacggaattgaacaaaaataacggcgccgttctataaattatatgagccaacataattgattggtagcacgcaaaaaaaatgacttaagaaaaggaacaaccgttttttgtcttcatgacttcaccgtccaaagaactcgtgggttatacaagagatatttttccagatgtatacaacatttcgttgttgatgttgtaatgtaatagttataccagatttctatgataattttgacaaataaaggtttctatttttttttttgaaaattttattgtaagtggatgagaaatttcataacttatttgatcaatagacgccaaagcagtgtagaaaacaatttttgtgatcaatcacaatctagaatgcatgagaaatttattaaagtctaatagagtcggtgtaataactaattaccttgttctaaaactaacatgataaaataaaattcgttttagcatatacttacatcatgttcaatatcaattgtaagccaaatgaaaagcaaagaaaggcagaagcaaaaaaacttcacatagccttttagcctcaatccatgacttgtttcttgttgttgttgttgttgagttatcttcttcctctcgacatgaactctattagcttcttcttctttcctttcttatggtaaacgatcttttgcttcacctcttctcacgtcttctcactttttcttttgcaagtttaatgaaatgtttcaagttcaataacaacttcttacgaaattgagctccgattagattcaattcagcgttaagaacgatcgaaatgatgttgcgaatgatcgatctcaacttatgcaagatcagagaacagaaaacgaagaataaagacacacgatttgtttacccggttcagcaagatcggtgtgatcaagcctacatccggagccgaatcaattcggcaaatccactaagctttatgaagagtacaactaaaaccgagcttacaacaatggtgattctctcaagttctctctctctcgatacaagaaaacttcaaagaagaaaacagatgaagaagatgataatcgtaacagactctgttactctttgtataatagtcaaaccctccactgcagttagagtctttgacttctcttctttaatttccggtttaatcagaaatcccttaaccagagataaccgactgcttcaatcttcaattgacttaaccaaaccaacttcagagtttgaatcagatataaaccaacaacactccaccttgattcaaatctctccataactagtggacttgcacttacttggatttcaccttcggctgagatgtctttccacctcacctgagtagctttagaaactctaaagctgactcaaacttctgcacatgaatgcctttggtaagcatgtctgcaggattctgagaagtatggatcttaagaacttcaacacttccttcttcaatcacatccctgataaagttgaacttgatcgcaatatgtttagttctttcatggaacgtgttgttctttgccaaactgattgctgactgtgagtcacaccacaaagtaaccttctcttgcttgaatcccatttctgttaacaacccctgaatccacaaagcttctttcactgcttcagttaaagcaacatactctgcttcagtggttgataaagccactatgctctgcagatttgacttccaacttactgtatttccaccaacagtgaatacataacctgttgttgaacgcctcctgtcaaggtctgctgcatagtcagagtcactaaagccttgaactctgaaatccttttctctggtgaaaaccagattcaaatctgtagacccttttaagtatcttagcaaccatttcactgcagtccaatgaatcttacctggtttgctcataaacctgcttagaactccaatagcttgagctatatctggtctggtgccaaccatggcatacatgatgctgccaatagcacttgagtttggaactttatcagtgtccacacactcttcttcctcaactactgaggcaagtttgaaatgtgctcccataggtgtgcttacaggtcttgcttcagtcatattaaacatgtgaagcactttctctaagtatcctgtctgagacaaccgcaatgtacctgcttttctgtctcttataatgtcgattcccagtattcgactagctgcacccatatccttcatttcaaatcctgtactcaacgcctctttgatcttgttgatttcagtcattgacttagctgctatcaacatgtcatcaacgtatatcagtatatacacaaactcttcatcactcacctgttttatgtaaacacacgaatcatgaccacttctgataaagttctgatccatgataaaagagttaaacttcttgttccactgacgtggtgcttgttttaacccatagagtgacttttttaacaagcacacttgatccttttgttcatcagcaacatacccttcaggttgctccatgtaaagtggctggtccagatcaccatgcaagaacgcagtcttaacatccatttgttccaattctagatcttcttgaacaacaatagacatcaagattcttatcgacacatgcttgactacaggtgcaaacacttcatcatagtcgattccttttctctgagtaaagcctcttgctactagtctggctttgtatctttcaggttccacaccgggaattcctggtttcttcttgtacagccatctacaactgatgattttctgattcttgggatggtctactatatcccatgtatagtttttcaatagtgactgcatttcatctcccattcctgcattccatttttcccactctttggtttctttagcttcatgataacagctaggttcttcactgctgtccatatcttcagctgccataagagcatatgcaaattgagagtaatcagagaatcttataggtgctctgatttgccttctaacccgatctctagctaactgataattgctcagtctttcactgcttgctggagcttctccttcgggttcaaaatactctgactcatcatcactagatgaaacatcaactgttccacctgcaacagaactctcaccaacctgctgttggttacttactatttcagagacagtcttttctgcttgagtaatcttctctgctctttcttcttgttcagacttctcttttaactgcaaatccttatacaccaagtcctcatgaaatatcacatttcgactgataacacatttcatttcttctaagagccagatcttgtatcccttagtgccttgcggataaccgaggaacacaccttttaaagctcttggtttaagctttccttgatcttggtgtacataagcaactgacccaaacctccttaaatgcttgtacccagatttcctgtttaaccacaactcttcaggtacattgtgatccactgcaaaagcaggtgacctgttcaccagatatgcaacagttgaagcagcttcagcccagaatatttcttcaagacctgattcactcaaaagacatctcactttttccataagagttctgttcattctctctgctacaccgttctgctgaggggtataagcacatgtcctgtgcctttcaataccaaacttcttgaggtaatcttcaaatttggaattacaaaactccaatccattatctgtcctgagcactttaaccttctttcacacctgtgtttcaacaagttctttccactcacaaaaacggtcaaatgtctcatctttagatttaagaaacataagccaaacctttcttgtcttaccatcaacaatagacagaaaatatttcatacctaagagtgatggagttacatttggagagccccataggtctgcatgaacgtatcctagagcttcctctgtgatgtgcttgctgacattgaagctaagcttcttggattttcccattacacagtgctcacagaactctagttctttgacatcgttcttttgtagcagtccctttccagccagtatcttcatgttgtttaaactcatatggccaagtctgctatgccataattcagtactgcttttagtgtcttctgcattaaagctctcagacataatggtctctccatccagaacatacagtccattgattaaacgtccaactaatgcagttgcattgttcttatggtatctcactttaccatctccaccttcatggtgatatcccagtttatctagagtgcctgttgaaattagatttcgcctgagattaggcacatacttgacattcttcaagattctgattgatccaccatttgccttaatccgaatagaaccttgtccctgagacttaactgtgtgatcgtcaccaagaagaattgttgtgccatcattctcctcaaaatcactaaaccagtctcttcttgatgacatatgtgatgtgcatccagagtctagtacccacatgtccttgaccaatctgtcaccaatgtttaaggcttcagaaacttctagtttctcaatgataacaccagcctctcctggaccttcactttccagttttctttttttagcaaaacaatctttcttcacatgaccttcctttttacagaaccagcaggtgacctttgttttggaattagatctgctcctgcctttccctttgtttccttgctgctgagacctgttttggggtctacctctttcagttgtatacaacacagttgaagagcctctttcagactctttagattcagcaagttcatgttccaatgacttagctgatgatacaacgtcctgcacacagagagtcttgttaccatacttcaaagtgtgcttcaactggatataactcacaggcaatgaattcaagatcaagattgcttgcacttcttcagcaactacaatctgcagactgccaagttcagccacaattcttaagaattgatcaatgttctgatcaatactcattgtttcaagcatcttgaatgagtaaagtctaagttgagtatagatcctgttaggcagagatgtttccatgtagagcttgtttagcgttgcccacatatcagctgcagatacacaatgctgaactttaagaagaaccgcatcagtaatgtgattgattatgatgttcttagcttgtttcgattgttcaatcttgatcagatctggaacttcttcagtcggagatgattcttcatcggtttcaggtttctttccttcactctttgggactggaacaaactttgtcaaagagtaatccgttaaagtgttcatcaaacccagaactccaagttgtgcttcaatccgaatcttccatagagaaaagtctctatctccattaaatgtcttgatctctacctttgacgacatcgccattaacgctatcgaagcatcaaacctcctcaattcagaaaccaaggctctgataccactttgttacgaaattgagctccgattagattcaattcagcgttaagaacgatcgaaatgatgttgcgaatgatcgatctcaacttatgcaagatcagagaacagaaaacgaagaacaaagacacacgatttgtttacccggttcagcaagatcagtgtgatcaagcctacatccggagccgaatcaatccggcaaatccactaagctttatgaagagtacagctcaaaccgagcttacaacaatggtgattctctcaagttctctctctctcgatacaagaaaacttcaaagaagaaaacagatgaagaagatgataatcgtaacagactctgttactctttatataatagtcaaaccctccactgcagttagagtctttgacttctcttcttcaatttccggtttaatcagaaatcccttaaccagagataaccgactgcttcaatcttcaattgacttaaccaaaccaacttcagattttgaatcagatataaaccaacaacacaactagtcattacaaaagtcatatataatgttagtgatacaatcacgattcacattgatcgcataatatttgattgctctgtttaatgtaatgcttgtaattagaataatctagagtctcctctcttattcttattcttgtataaatatgttgatgtacataaccctaaatatattagaaagacattttttacatggtatgagagctttgtgacattcgttgcagtaattaattggaagcttgcagtacattgccttcaccaaatttgatattgcctatgcggtcaatcgtttatcacaaattatgcatcgtccaacggaagatcattgacatgctgctaaaagaattctaagctagctaccttgatgggacacccactcatggcctctttttctcggcaaacaacaaactcattcttcatgcatattcaaatgcagattgcggtgagattcagacgattatgtactcgtacatcttgttagtgcaccttcagtcaggtcaaaccagaaggagtgttgattgctggaacaaactggaagctgtttcagaagattaaagtgaagatcaagtaattgatgctgacgtggatataccgccaaatgaacgaatgacgtggagatcacaacagaatgagttcggtttggaaagaagatattcacgcaaagatctggagtgatccaagatcttgaagactaacctagaagaccaaagacctcgatgatataaatagaggtgctaaggtgcttgctagagttggccatgattgtgagtgaaaaagctagtgcaacgcttttcattgttagagactaaggtttagtctgattggaattctagagagatcaaagagtgtgttcttgtgatatactcttgtgtgtttagagaaatctcaggtgacaagatatagtagtttagatcttgtgtaaaaccaattaaggtagttgtaaacttcttaatcagatttctaataaagtgatactcagtggttcttagtttggggaatacgattcttggttcatccggaatttcacatctacctaggacgacgaaacccaatatcttggacaaccaagaaacggaaggggtggcaagatcatctatagaagtagagtatagggttgtcgcaaacacggcctctgaactaagttgggtatatatgtaatattttcacataacttggaattactttcaacacaccacttgttgtgtactgcgacaacgtcaaaaatatcttcctttgtgctaatccggtcttacactcaaagatgaagcatattgctatagattatcatttcatccgtggttaagttcaacaaggtgctctccgagtagttcatatcaacacaaaggaccaattagcagatgtgttgatgattggagtgtcacaagcctctccatcttgagggggcgtgttagtgatacgattacgattcacatttatctcataatatttgattactctgttttaggtaatgtcttaattgaaaaaaactagagtctcgtctcttattcttatataaatatgttgatgtacaaaaccctaaatatatgagaaatagtttcttaacatgttcaggtcatctataaggcaagtaaaacacatgcttaagtcataaaatagaatctaaagagacattattctgaaatgatcaacttggtctacttagcctaattttaagtcaatacatacaaatttgatctctctaactatatttgtttttctctttctagtgttctttttctttccaatatatatacatagcatattttgaattctttttgttttatggagtaacgtcaaatattataatagccgcatataaaattagaatttattaaatattaatttataacttttttattgtagacaattattttaggaaagcaaagtatatttagacgaaaatagtattaggatgaataattttttgaaagtcctaatgttgcatattttttgttttggtgaacaaatttcgtgttgtagttcttaaacatctatactattaattgggaatcattgaaaataaacaaccttacgaagggtaaaatattacaaaaatactattgattgttagtatttttaaataaattctgattaatttaaaataattataattatgctttacatttagaaatatataaacaataaattgtacatacttattttgaaatattttggttttcttttttctttttttcaacctgatttttttttaaataaatccataatatattattgaacaaacttttgaaataatgtaaactaatacatttttcattcaaaacaaattatccaacaaaaataatttggattatgagtactatataaaataatttgaaaccaaacttgacatcaaattaaatatctaactggtatgagtttgggttatgaacactatatagcatgtacgtattttgtgacacaaattctatttgtgatgtttacaggttggtagtattttttttccacatatacagacgggttatgagacgaaaaatttatgatacatacatcacaggttttccattccaagaaatataagtcaaatatacgtttttattttctaaactaatcaaaacattataactgttataacagtaatcaaaacattataacagtttgattactggtgtaaaataggatataaatttggttttagtttgggttatttatctgtgtgaattcggatcttaaaatataattatataccaacataattgaatttcgattattattcttaactttataatatttatactattacaaagtttaattataacaaaatattatatattttaaaaatctatttaaaaagttctattttatatgtatatgagatttcaaatatctaatatattgtattataatatatattacaaaataaaaaaaaataatttacattgaattaaaaatatgaatccgcacatacgtaaaagttaggatctagtaatttgtataaaaaagaaagaagaagatagttatccatttcataggtcggctgctaatttttggcggatttctaataattatatacaatccaattaaataaatgaaatatgtcgtggaaagtggaaactatataaaggatagagataagtacgacttcgacaaatggagatatattatcattattattattataatcattatctttcgctattcctgaccaatacccaaatgatctccgctactctttccacgtgtcaaaagcactgaattgaacggatgagatcttaagtcactaaccaaaacaacacttgaatttttttataacaaatcacagttccacccaatgaaatccattttgtttcaaaataaacccgtatctttataatgaaactgaaagattcaaggatgtttttgataaattaaaaactatgtagggcttcattcataagatttaagacaacagggtttatgaatttgtctctgcttcacgatctctctactatggtgtactgtatctttcaatctatagttcagttacaaagatcatcacagccaattttagaaaacttctgacggaaaataaaaagagaggatttatttttatctttctgtgttaccggagaataaagacggtaccttttcactgttgacttaacggagaagatggcgactgttccggagataaagataatgagaagcgagagcttaggtcatcggagtgacgtgtcgagcccggaagctaagctagggatgcgtgtggaagatctctgggatgagcagaaaccacagctcagtcctaacgagaagctcaacgcttgctttgagagcatccctgtctctgctttccctctctcttctgattcacaaggtatgaggattttgatgatgtgggtgtttgaccatgagctgatctataattggaactggtaattgtgttgaatttgaatcatgttctatggagattgattttgatttttgtgatgcaattattgatgggttctgtgatctcttggtatgtgtttgttgatgacttgtagtaggaatatgtgctgtgtgttgaaattcaagttattgaaagttttataagtcagaatttggaattcaatccagcttgttggatactcgaatcagttcgatttagggaatcagaattagttcttgatggtttttgtttcttagtctccttgtagaatcagagtacttattgattcagttctgctgtctcacatctttgtggtttccctatatagatattgagataagatcagacacaagtttggctgaagctgttcagacactatcgaaattcaaggtcttgagcgcgcctgttgtagatgttgatgcgcctgaagatgccagttggattgatcgctacatcggtattgtggaatttccaggcattgttgtctggcttttgcatcaggtaattgttctccaaaaaatacgagaggcgacttgtttttgtcatgatcaaattggattgtggtacctagtgaactatacttcatgtctgtactctacttgtctcctttaaaaaacagttggagccaccatctccaaggagccctgctgttgcagcttcaaatggattttctcatgatttcaccaccgatgttctggataacggagattcagcagtaacttctggaaacttctttgaggtccttacttcttcagagctatacaagaacaccaaggtgaagcttgtttttttatgaaggacctgatttcagttgacttttttctcctgattacggcttctgaaatgcgttggatattctctctgacaggttcgagatatctctggaacattccgctgggcaccgttcctggctctgcagaaagagaactcctttttgaccatgctgttacttctttctaaatacaaaatgaagagcatcccggtggttgatttaggtgtagcaaagatcgagaacattatcacacaatcaggagttatacatatgctggcagaatgcgcggggcttctctggtttgaggattggggaatcaaaactctctctgaagtcggtcttcccattatgtcaaaggaccatatcataaaggtcagtttgtaatctaactcatagctccattgagagttttttttttccttttttaacagatcattatttctctttcagatctatgaggatgaaccagttcttcaggcattcaagctgatgaggagaaagagaatcggaggcatacctgtcattgaaaggaatagcgagaagccagtaggcaacataagccttagagatgttcaatttctcctcactgcacctgagatctaccatgactacaggttaatacttcacaaatccttgtgatgatgatacaccgagttttgcagcattgtcaaatcttcaatcctttctctctctttattttaggtcaatcacaacgaagaacttcttagtatctgttagagagcatcttgagaagtgcggggatacatcagctcctatcatgagtggtgtgattgcttgcacgaagaaccatacactaaaggaactgatcttgatgttagacgcggagaagatccataggatatatgttgtggatgattttggtaaccttgaaggactcatcactcttagagacatcattgcaagacttgtccatgagccatccggctattttggagatttctttgatggtgttatgcctcttcccgaaaactaccgagtctgagagaaaaatggtatctttcttctgtaaattgtcttttgtttggtgataatgcttctgtctgtttgtgcttaagttctcgaaattgtgttattaacgtttaacagaaataagaaaagaagaaagagcctgtctttgagtgaatatgtctgaaatacaataactcttaagattctcggatttggccctacattttgaatttgaacaattaggtctctggttggagtaagtgttcttcgaacttgatcaagatctcatccatctctggttgatgtttcctgacctgaaaattttggtttcagacagatttagataccaaatgagacttcccattacaatcactgtagagaaatttcatgtggaaatctaagtggctttaattactttgacgtttgccatggataagagcttgtgagaagctacataggcaacatctgagtcatttggtctcttttccacaaaatagattacctcagcaacaccagactgcaagaaagaaaaccgaaatgacaaaagtccatatgattgtgatgatctacttgcatcaaattggttaattggactaactagaacatttggtttttatatgactgcttagctgaagacattgaccataaaagattactagagtagcttattaaggatccaaatttgacaaatcaagccaatggtatatagaacaaacctgtaaaataatcttggcacattcattgcaagggaacattgtcacataaagcttctgcaagagattcgaggagcacaaaacaaactcatataaaccatccacacacaaatacttcggaacagaaactgcagcagagttccctaagttttctataccaaatagcatttccaacttattagcttttgcgcagaaacctaaaagagaatattctgacaatgatcttgtgtaggatactttaaaagttttaatcttttcactcaagccagaaacaccatgatttgtgagaaaataaacactgaacaaattccaaagaaacaaacctggccagccgccgatgcgtggtttgtgtttagtatggcattgacttcagcgtgacaaacatatctacaaaatcagagtcatgaacatcagagcttagcaatgagcctaaacggatgagaactgaaacatctcaccgtattacagattcccaaagaaagtgtgcacaatactcatcaaacaagaacttaaagattcagccatagtttgcatcactaagattagtacttacggatacttggtctctaatgggtccccagttcttgatttctgcaaaattggtggggagcaaattaagagaaaattaataaatctaggggagaaagttccttgcattatctctagacaacttctgtatattcttagaattcagatgaaggtaataccttggcccaaggaagtttgtcatcagagcagcctcttggaaaaccattatagccaatccctaaatgaaagatgaaagtttttgagtcctcgtttatatgtgtctcgcatgtaccagctaagtgacaaaatgaaataaactatacaaccacacttcatgttgttcaaagagatcaaaacacaagtgtgatcgtattatcttaccaaggattacaccattttggctcaccaaacatgcgccaacctgcacagccataagaccgggaaagatagtcaatttttgaatgcatccaacaaaatccatcctttttgcatcatatgatccatcagaaatggatatgaaattgccacaaaaggaagatataaatttcgaatttgtgaacctttagtcaaaactatactctaatcctaaagaccttaaagtccataaactatactctaaatgtgctagacatcaaaacaccaatgcatccattcattacaaaatcagccagtgcgatatcttaacaccgaaagaatacctccactttgatgatagaaaactatatagtatcatgaacataatacattttgagcagcttacacatatataactgtttggatactcatgttgttcaaatatcacaaacaacaaaatttacctgcctgttaggatccttggatcgttctgcagaaaggaatgcaatcgccatgaaataatcatcccatgataagtaccttcacaacaattcaaacaaaattctaccattaaaaatcaaagcagattctaaacttgggattttctgaaagttggaaactttagctatggaataacgaaattagatatattgaatggaattatgacaaacccatttcgtttcaaaggactgaaaggatctagagcagggaattttctggaaattgcagagatttcggtggaagtgaattttcgggatttggggtttttagggtttgatgagaagaagcgaaatgctagagctgaaatcaaagcaccgaagattgcagatgtagagacgagtgtaagatctcgagagttcatggggagcttcaaaatcgataaaacagatttatccagaaaaatctttgctcttctctcttcactattaaatgtagcgggaaactataagagagtgaaaatccccgccattccggttaaggcaggtctatcattcggttcatatgattgttggtttaggtttcggttaataactagattggtttactgattgtgctttctcttctcagcagaaaattatggcaattaacagattttggttaatttcatttttttcaaaaattatgtgttattgaatcatttattttattatttgttatttttttttattttttttagtattgagtgctaccaatatattttttggataaaaaaaactataccggtccagatttgatatctcaaccatctcttctatatttctattaactatggatttaaacttttttgtatcgttgatgttttgacaatcttttcaattcacaaaaaggttataaaagattgattttgaaattttggttaatgatcttgtgaaaaaattgacattacctttcaaaatttttttttataactatagttctatattcttattttgcgcttttaagataccgtctctgacttttttattggtaggcacggttgtgtatacctatataagttttagttttatttcgctatttagttttcttttgtctaatgtaatgtaatatgaactggatagattaagaaaacataaagtggaaacgaacaaagtttgaaaaataacaaataattggaaacgtacatgaaactatgaaacacatgaaacaagttaataactttaaaaaaaaaacattgaaagcattacgtacatttttatctataaataacaaaatgtatttaaaacataacgaccaggcaatcgtagatcacaacacaattcagattagctattaaacctgtggaattttgtttttttttgtcatttagagcgtctatactaattaatgtaattgagattgcagcggaaagactcaaaccctagtttccgaattctcaatcctataaatctgttataatctttcaactatttaaatcacatatataaataaaatataaactgttatatgagaagaatttgattaaattactaatatatacggactaagcacatagtaagtgagctagttgctagcttttgaatccattaagccacgtgcatcaccaattattacacaacccacatccacattttcatttttttaaaaggatacgttaattaacaaatatacaatcgcaaagttattagttacaaaaacatataaaatgagatagatgatgaaaaagtgaaaagggtttctttaaaaagcctctcatgcttcaataacgtgatccgtttatatcccatcttctctgtcttttcttcaacggagattttctctacaccttaactattttttttcttcctatttctatcttcgttttactaacctaccctccattattttcactttacaagtatgctcctcttatgttttggaaaaaaaaaaaacaatgaaattttgcaattgcaagttatgtcataatatatagtagctttaacgtaaaaaacaacattaatcacgtttgcgtttacatgtttatattatttcgacataaacgcaaataacatgttcatcattataaaacattctaaaaatttggttattggtgactatttattttgtaactcgacaaaacttaaaaaatcttatatatctaacctatttttaactttagttgattgttgtacaatcacatcatttcgtcttatcatggaaccacacttgacaacaaattcacataatggcggtacggtggtcgtttgttaactttgaggattatataaaaacccaatgatcaaataacccaaaaagatatgcatattcgaataaggggttataagtgtaatttcaagtagatagtatatgtgcacagacacgaagcagcttacatataaagtgattggtaattgccatccccacacttattgagaagtgcagccttttagccaaaaaaaacaaacaagaatacaaaaatggctgaacaacaagatcatcacaaagagcttcagcttttaccttctccaccgtctaccgaatctccggtaaggaaacaccgaccaacagttataacaaccgaccatcacaacaatcaccaccgttcctcctccatgatccaccacgatcttgacctcaaactctccatcagcctcagctcgatctcaacagcggaggagcttccaaacggtggtgtggaggcgttgaagtggcaagccgcggagcagataaggcttgcggctatagagaaggcttacgccgagagggttagagagttgactcgccgtgagatggagatggctcagtctgagtttgctcgtgcaaggtagttaaagctagctcgatcaagtaataattctggttttggtttggttaacggttttgaattgtaaccagggtgatgtggcagaaggcaagggaagaagtggagagagctgagagattgaaggagagatcaatgacgaagatcgatacggcttgcttggagatcacttgccactcttgcagacaaaggtttaggccataacataagtatttatttgtttctcttaattattgttattataaatggatatttgaagagaaagagaatgttggtttaatttaaattttattttgtagttaaatttaatttgttttcattttcgagtttggtaatattatatagtccttcctttttattttcttgaaatcgaaggaaaacaatatgctcagataagagatgatttatgtttccagctactttacttcctcttctttgccaaccaaaaaaaaaaaaaaaaaaaatcatgaataccatttagtgaattacttgggaattagggataaaattcattagttacgttgtcaacattagctatgtcaattcctcaacgatcagctattatatactatatggagtattaaaatctaactatgacatttattaaccaacagaacaaaacctaattagtaattacagtgattagttagttaaatgcttgatgttaaagtaacaagagatggagtgacattcacaatcgaggaacgtggaaaataaaaaagagaatggacggattgcatgatttgaatataattggctgacccatatgtgattcatttgatttgttgtaatcatctttgaaaacgttcgttcaatgaaaattgatgattattctgaaaacaaataatcaaacacacgtaaagacatatgcatggagatgatgggtataattattgcattaacatgcttatttcatctactttaatctcttaggtcgctttaaatagtatatatgtgtgtactattattttgtgtttgtgcatatacgtacatttacttacagaaacttgataaatgtatgaatatttttgataagagagaggattaattttaattatgtacttcgtagactatggtttaaatcaatcgtgtactacagataatatgttcaaatttaaatcctaaaaaatgccgagtttacgatcataccctaaatacgtaaatcaactcggctgatctattcggttggtcgtcatattctctataaaatgatacatacatatgaactatattaacgattatgacaatatatagaatatatgtaaacattttgagaatatatatcaaaagcacattgtaatccactttgtcatttctatgcccatctttagtatttggaactgaatatacgttttcgaacagattaattttctcgttactatttttttgaaaagttgtgtttttttacattgcaaacgctatagtgtttttttatatgtgaaattattttttcgcaatgtaatatgtatcttgacggaccaaactcttatgcgaagagacattagacaagttaaaatagatctagaaaaactatatatatctcatgaatgcgtaaaattgctgcaaattaaataacatcttatatatgaaggccatgaaaccctagagagcttcctttttgctctttggatgtatgtaaacatctattttcttttcactaaaaaaaataagatctattttcctgtcaacatataaagatctttatatttaatacgtaacttatgttttaaataacaaaataccttaccttttattaccacacacagacacagttccattcacacgcgtgtaaacacacatgtacatgtacttgtagccttgtaggtatttttttataaagaaaaagtatcgtaatcaagattccaatttgggtactgtctaatgccaaatatatagttattgatatatatgtgtagcaattggtacagtacttttcttttggtacagtattttatagtgcaattaatgtaaaatacgtgatctataacggtaccgagtatatgtgttgatctttgcgatttgtgaatcaatcatcaagtcaacaaggaaatggctcaaaaatcatattggacgataatcactatgctattatagaatttatataaatagtaacaaaattgagtgaaacaggaggggccatgtctcatatttttgatgataggaacctttgataatgaaagatagaagcaaatggatcaaaacaaaaaaaaaacacaatcagtttatgtaatttttttagaaagatgaataattgatgacagaattacaagacaaccaggggtgggaaggagtcggagtatccacttgttttcaacttcttcttcttagacctttctctatacacaaactccaaaattaaattcaaatagtgttgcttagtgcttagaagatattacctcccttcacattatccaaaatcacccaatgatttctaaacttttcctatgcttttacataatttaaggatatggtgattttttattatatatttttactctaaagacaagaatatatatagttttcattattttgatttcttaacagcttagttcaaaaacaaaaacttggctgaacatgattgaattcgtttcctcaaatcacctctactccttaactgtctaacttttcaccaattaaatttcatgttcttgacttaatttctcttttacaatttatatattctactaatgttttaaaaaaaaataatctttttcttaagaagaagaaatcattttagataaataaaaagacattgatattctttaattgttttaaatcatctaatgaactatttcttctccttaacactcttcttgtaattccaaatattttccgtatagtaggtaataattacatgctcaataaataaaagcacaacttctaaattttatttaattattacaaaccaatcaaatgtatatgtgtaaaataatcaattaatataattcagcaaatttcagaatgcatgtacttatacaaagatacatatagttgatgtagtgacgcaaacgtacatgtatgaatattattatgagcgtatctcaacgtacatacaaaaaaaaaaaaaggaaatgtataatcacaacgttgaattcaccagaaggaaagagatgtgtctgcgaaattggaagataatggaaactgataagatacatcaatacacagcaatcttgcgcattgtgacacaaccttaacatttgtcttttcacatttgtctttatactcaaaatttgtagatgtacacactacacacacacatatattctatgtgtattataagtgtatctgtacataaatgttgtatgaacacacatacatacttacatgcatatacatatgtgtatcatcagtgcatacagaagcagtcatattggtatcaaagagagccatcattttccaaatgttgttttcctttgttcagctttttcacaaatttatatattttctgaatcccatgtgggatggatctttgcttgtcccctctagttagatttttttgcttaaaatatataataattaatctcaattctaattctttctacaatataaactatttaataataatttgtgttgtctcttatagtttatatccttatgacagagatttgttttggtttcgatgtctatatattttgtggtccttacacaagttagcttcattattatgcatgtttatctctttcccttccaccacctagaaaatatagttttattgagaaaattatcattttacaactattcttaatgttcattttccacactatagatattttagttagtaactaggcctcttaatcatggattggaatcaataccaaccatgcatgtaacacttacgtatatatgattatatgattcatcatttttaaataatgttttggaaaatattatcggatctttgatgatcgattagctactaattgttgcattaaaatggaagtattaacgagttctaataattgggagaaaataaaacaagaagaagaagccaagtttggttggatttaaaagagaaagggacaatgcccttagaatggaagggaatgaaaagacagtgttagggaaggaagaggggacaatggatgatggaagttactctcatcatgtgatccatcactaccttatatctaattttacatatatttcatttaatagccacaaatatttaccaattatattttttttgtgcatatatatatgagcaccttgcaagcattttcattcttattatttgtttgttttaataagtattttgggattcttaaaacaatcataatttatacgatgaattaatttgaacgaaaatttctacccaaaatcaatatccagtaaaattaacgacgtgattttgaaataattagttaaaaacaagaaaatatatttattatatggttgatgagatagtggtcgttatataaaagataattcttttgatatattgatattaatatacgtataagtttaattcttatatatatatatatatgtgggtattcgtttataagttaatctttttatctttatgctttaaacaactaaaattcggtattatatatgattctatcatttatggcgtaaataattgccaaattataataaaaaacaactaaatgaagttcacaatgaatatgtgcaggtatctcaaccatctaaaatagtcttggaaaccattttgagagataatagttttgttcttaagactacaaaaccatgatcgagttagttactaacaattgtcaacgttggacattcccatattcgaacgaaacaatttaattagagcctgaaaactcgattaccctaaaaagagtctcggatccataaaattacaaagcaaatattccaatagttgcacgcaaaaaaaaaaactcttttggaattacaatttcattgatgttcgtgtataattttgagggcaataatagtatattcagtactatacagatggcccaagagacagaaatatatgtaacatatactataactatttaaaatattttactcattgacgaaagaaaaagtgaaaaaaaaaaatgccaagtcaagagattttattttgtatataaatgggccaaaagtaaaaaggagagaaagtgagagtctttacttttaatgtctgagaaaggcgaaagggtctcactctttgaagtttgaacaactcaccaattacacatttgaagattgaccaatttatataagcaacagtaattaatatgagtggtttctctatgttcgatattttttttttatgaacgtgctatggaaaataaaggttgatcctgatttacatgtaagtatataataattaatataacgttgaaagttacataagtatttattttttattgttatttggttggatctacttttctatatcaactgcattcagtttcttcgtatagattatgagtatatgtagtttcgattaaaattagctttatgcaatttgcactttcttcacttgaaaaaaatatcaacaaaatataaatagttcaatttaatttgttgtttaacaaaacaaagaacaagctcgatttaatttgttgtatacggtatatcgttataactaaattccagtttcccatatagactcatatagttacgtaccaccgatcatgtatacgttttttttaattaatctaatacacgtcatcctcattagaaatttctaacatgcatataaacgataaaacaccatctacaactaaactttaattagtttccgaagaagtctcaatctttattggtgttacgtggtctgttgtgtaactcatgtttaacatatcaatgaaatccattgatgaaaacaaaaagaatgaaatgatgaaaacaaaaacagcatatagtttacaatatatcggaattaaagatgtttttttttgtcaaaaaagaagaagaaaaaagagcatgtaattttctagatattgtttttgtttcacataaatgtcgttttggattattcatgtaatattttaaactaaagtacaatttttgactactttagtttactagttaagcttttatttttttgactaaccattgaatgatgaagagatcaacgcatcatatttacaacttacatagtcttttggaagtgtaaattgctaatactacctaaaatatatctataattaactaatattttttcgtcaattataatagatcaattaaaaggctatcaaaaggaaaaaaatgaaatccacatcctgccatcataacctcatgctggaaaaagaaatgaaaaaatataaaaaatttcttttgtttattaaatttacaactttaatactagtttcttttctattttttaaaagcttttgtcacttacttaaaaaaaaaaaactttttgaaatattcctacttccaatgtctgattagtgcttctggatttcctttttggatcatgtgaatcctaaatcagaaaaattcatataatacccaattcagtatattttcatacttcaatttacaagagttctctatgtttttagcttctttcttttaagccaaatgttttaagcatcttttatacattaaaataatttagtgttgagttgagatttttttttttttttttttggatttacttgttcaaaatctgaaaaaatgtttacagaaggttaaaatgaaccaaaaggcatatcaagctagattttgaattaccctatttcatcgtatacacaaaactgataatgtggacacagttgattttacttctcgatgacatcgtagttttatttaatttggaaaccacggcccatatgagcacatttcaattaaaaaccaatggtaagagcattttccatgcaagattcgagagatattaacccagtgactgttaaaacagcttagaaccctaataacgaatttcaattactcaatttaccattcgcatttcgcaataaccaaactgagccagtcacaaggagtaaaccgaaccggattatttatttataaaatgaaagaaaggaaaccaaacaacaacagcagtagtagtctgacgtaaaccaaaaagcaggcagatcaacaactaaaagaaactcaaattaccaaaacaaacaggaaattgcaaactaagtttttttaccatatgcatacaaagaccataaaaggttctgataatcaccggtttcatctctcagtatttaatccggccatctccttccgttatgacatcgttgaaagtgccaccactcgggatcatcggcaacacatgttcttggtgcggacaaatcacatccaacaggtaaggtcctggtgtatccagcattgtctgaatagcttctcggagatctgctttctttgtcaccctcgccgctggaatcccgcaagctgctgcaaacagcaacatgttcgggaatatctcgtcctcctgagccggatccccgagaaatgtgtgagctcggttagctttgtagaaccgatcttcccattgcataaccatgccaagatgctggttgtttaataaaagtaccttcactggaagattctctacacgaatagtggctagctcttgcacattcattataaagcttccatctccgtcaatatccacaactatcgcatcagggttagcaacagacgctccaatcgcagcaggaagtccaaatcccatagctccaaggcctcctgatgatagccactgccttggtttcttgtaattgtagaactgcgccgcccacatttgatgttgcccgacaccagtacttattatggcttttccatcagtcaactcatcaaggaccttaatcgcatactgtggaggaatagcttccccaaacgtcttaaagctcaacggaaacttctgtttctgtacgttcaactcattcctccaaactccaaaatcaagcttaagctcctccgctcggttctcaagaaccttattcatcccttgcaaagccagcttaacatcaccacacacagacacatgaggagtcttattcttcccaatctcagccgagtcaatatcaatatgaacaatcttagccctactagcaaaagcctcaagcttacccgtgacacgatcatcaaaccttaccccaaacgccaacaacaaatcactatgctccacagcgtaatttgcatacacagtcccatgcattccaagcatatgtaacgacaactcatcatcacaaggataagatcccagccccatcaacgtactcgcaacagggatccccgtaagctcaacaaacctacccaattcatcgctagaattcaaacaaccaccaccaacatacaacacaggcttcttagactcagaaatcaacctaacaatctgctccaaatgagaatcttccggaggtttaggcatcctagacatataaccaggtaatctcatagcctgttcccaattaggaatcgcaagctgttgttgaatatctttaggaacatcaaccaaaacaggtccaggtctaccagaagtagctaaaaagaaagcttcctcaataatcctagggatatcttcaacatccatcacaagatagttatgcttcgtaatcgaacgcgttacctcaacaatcggagtctcttgaaacgcatctgtaccaatcatacgacgagggacttgtcctgtgattgctacaagaggaacactatctaacaacgcatcggctaatccgctaacgagatttgtagctccgggacctgaagtggctatacagatacctggtttacctgaggatcgagcgtatccttctgctgcgaatacacctccttgttcgtgacgaggaaggacgttacggattgaggaagagcgggttaaggcttggtgaatctccattgatgcacctccagggtaagcgaatacggtttctacgccttgacgttctaaagcttcgacgaggatatcagcgcctttgcggggttgatctggagcgaatcgggagatgaatgtttcgggtttggtaggtttggttggagagggagtggttgtgacattggtggttgtgttgagcacggcggagatggaggagggagagctggatttgataccgcggcggcgggaggaggaggatgatttgttggggtttagggagaatgggagggagaatctggagattggtaatggtgatttggaggaggaaggagatggtttggtggagaaggagatcgaagaagatgttgttgttgttgttgttgccgccgccatggttcaggagaaagatgagcaagagatagagaaacagagaagaagaagagacttgtgaacatgatttgtttaaaaatgagacttgaagtttaagggttttatgttggattacgaaaatgccctcgggatttgatttttggtcctttatttatagataaaactcacgtgacgctggaatctctagtctatctattgtatttgtgattgagccttcgatatgctaaaacctaaatgtagaatttgtggctgagaaatttatcaaattgatctttctttctttttttattggttaagagaatggatacaagctgcaagttggttccacgaattggacaaaaacatagtcctggtgatttgagatttagattttaaagatacttcttgatgacaatataatttgtatacatgaataaaaaacttataaggtctataaggaacaagagataagtgaaaatggaataagaatggagaatttggctacaaaaacaataacaaaactaagagcttcctcaaagggctgataatgtcgtttggttcgttcttctcctcctactcctcggagcattgcctgtagcgcgattcagagtttagaaactttcacaaatgagtgtttatctcagcatttcttgcatgaaacaacccaacatgcattacagaaacatggaacagagactccatccatgacaccagagcgaacgaatacagaacaaacaaaactcatgggacgaatagatataataaagatacaaggagacagaagcgtgtcgatagcagaagcaatggagacagcaaagcactaatcttttgagacaataagccaaaaaaaaaaactagctgaaattcatcctaaagtcttccactatctgatctataaccaatctacttctatatccaccaatatgattacaaattattgaggaatgaaccaagaatgtggtctagtcaaaatgatctttaaaggaattaacagaactattgaatcaatgactatatgtcaagtaacataaccaaaatgtagatatataatgcgagatcaattacctcgtaaagaaagtactacactaagaagatccaacgatgatgttgttgattgggatgaaaacgagcttcacgaagaatccaacgaatcccatcaccacaaatccaatcgccgtacgcacagctactttcgtgaattctgataaccaattcaattacaaatgatatcaaaatttcagaaaaccctaatctacagatcaaaaatcggaaatgagatttttttgagaaaaggcgttacccttgcgatcgggtttgtgacagcgctggacgagacgaacactgctcttagcgaaatctctgagaggatcgattgcggaatcaatggcttccatgacttctttttagatcggaattggtaatcgaaattagggtttcagcaggttcgtttaaggatgaaaattgggttttatttttgacatttggttttatactttagttccgttgactttcgcctccaccataatttctccaattcagatttgattcggtctgaacacaaagtccggtttggtttcttatttgtcttaatatcgattactttccatctataaaatatttttctacaacatcttaagaattataattgagtgatgttgatgctactattttaagtttagaaaataaacactaaaaagacaaatgtctcactcatcaaagtaaaactcttgaaaagtgcaagagctctgaaatttgagaacgaagacaagactccttgtttttttttgtttttttttgctaaaaatttaaatattcattattacaatgaaaatttcggttacataataaatggtaaccaaatcatggttccatgacaaaaaaggataaaaagcatggaagcataccaagactccttgttactacgtcaatctcttttatacgttttcagccaagattccggattatgaaagaatcttgggattctaacactttttctttttttgcttgaaagaggtttacaaattttaacactttttttttgttgaggattttagagtgaaacacatgttttgaactgtcttcaactgaacaattcatgttaggcgtctatataaccgtcggttattcacgaggtaactacacatgaacatgataaatttactctctcttttcattaaaaaaaagttgtacaacttaattacttatgtcatgaaaatagtatatacgtaaaagtagattatttttgtggttttccttttttttactataacaataaataattctatgttacctaaattttcttaggtagtataatggatcaaattgatatggagtaaacaaaagaaaaacttaaataatctggtctataatttgaagcgcttcaagccttcaacatcaatccgagtacgaacaataatatgagatttcatcaaaatattatcctggaaacgatttttcatttatatgcgattatattgttaatgaaagttggaaatacataatctagacacgtaaatgtcgtattgatcatgttgtgaaatgagctgtcgccttggtggcactttttggcattctctatttctctttccacatttaccacaatgtatccaaataggcaaatatataagcttagagagttggctgcacgtttttgctaaacttgataaatgagtcaatacaaccaatatagccaccatccatatctacaaatctacacttatcatctaaacttgaagaatatttgttattttatcactaaccacaaaagacaagactcgttacttaagttaaatgatagtgacatgattaagagaatattagctattaggtcggaaataagagaaataagactggtagtggtatggttatgtaaattatcagtacatgtatataacacttgtccaaataatggctttcacattacaagtcattctttccctgagactactgcaagaaacaaacacggaattctcgtgataaacggattagtacgaaggaaaaagtaaaatgcagtaaccaatttttatatttcaaaaaacaaggcattttggatgcaatgaaatatttagatatataaatttgactagtgacaacaatttaaagttgttagatttctcaaatccaaaaaaaaggaaataaataaataaatagtttatggctattcaaattgtgtattattttttctattggttaaaatctataaaagattttttttttattacttcttaaatttatgtttatagccaaaacatctaataaaatgggacagagaataataactaggaattcaaacacattatcaatgattagcagaataaaagtttggaacatctaaacctaatgactttatacttcccctttttagagtttactttgtatggaaaactttgtaagctaacaaacaaaagtattgaaatcgtgaaaaatagtaaagctttttgagctgcaatatttgatgcgttgaaacgagttggaaacagctttcactacactaaaaacaaacttaatctcaaaatttagatggattaaactcaaaactttttaattaattgaataggattttaggatgatgcagtgaatatagactatttggtgaaaaaatacaacgtaacgtacgtggctgctctaagcctatataacatagcccaagagagtcgtgttctaatgtgattaagtaaagtgagggagaagcaacgagagatagagatagagagatcaagatgagaggatctgatcagaagattctactgatggttatggtggttgtagcagttgtagctgcggctcaaggccaagaagagactactggattcgtgacatggggtaacaattactaccagacatggggacatcaagctttggttattaataaaacctctgagctccagctcaccctcgataaaaactctggttttctatctctctttctctctgtctacatgtgtctgtgtgtttgtgtctagtcgatgattgtgattggtctatgttccttacagggtccgggtttgaatcccaattgatttacggatcaggatacttcaacgtaagaatcaaggcacctcaaactacgtctacgggagtcattacttccttctatgtacgtgaatgaccagtaaacttaagtttgtctaaaaataaagatgatgagattacgtacctgaatagctttttgaaatctgtttttctgctatacggcagttaatctcccgttcaagccgccatgatgagctctgtttccagatcttgggaaagaatgggccaccgtatttgctgaatacgaatatgtatctgtacggtgaaggaggcaaagatcagaggtttcgtctctggtttgatccaacaaaagattaccattcctacagttttctttggaaccctaatcaacttgtgtgagtatcatataacactttttatcagatcatccattgattaacatcagtaacaaaaagaaaatgtatttccacattttcaggttttatgttgacgatacaccgatcagggtgtacagcaagaatccagatgtttactacccatcggtgcagacaatgttcctaatgggaagtgtgcaaaacggatcgataattgacccgaagcagatgccttacattgctaagttccaggcatcaaagattgaagggtgtaagactgagttcatgggaatagataaatgcactgatcctaagttctggtggaatcgcaaacagctaagctctaaagagaagacactgtacctaaacgcaaggaagacgtacctggattatgactattgttctgacagacagcgatatccaaaggtgcctcaagaatgtggaagttacacttagagaaagatcaatacctgtcacagggttaagcctacaaaacaattatcttgaaaaaataacttatgttactgtaagatgctttatgataagccttttctatcaaataacaacattattgtcatcaatgctagatacattactatgtcacgagttcatatacagatacctatttacacagaaccaagttggttcagatcgggtttgcttgaggtttacaagcactgaaacctctgaaaagaaccttacaggttacaagactgcattttctcagacatcaagataagtcaaatatgagaaaaaatcggaaagaagcatacaatagaaactgcacattagattatatatagttaggctaagtcgcagcaatgatggttttgctacaataacatatacgttaacagagagaaacaagagttttttttactcttctttaacgaagccttttcattgaatttaggcataatctatcaaacacatccaaaattcaaggcgaggtcgactaatatctgctatcttcaagcaggtcaagcatcatctggaatactctgagcttaactgcaaaaatgataccaaaacattgaaaggtaagtttaaggagccatagttcattgattcattcagattcagcagaagagcaagagaatctagttgtttgatatagcaatgtttgcaaattgcgatatgaaaacaattttcaaatcttgatgattacaggattagagattgtttatcattccaaatcctaaaaccttaataaacagagaaatcttggactaacatgattatatcccaaacaaaccagacttagagattgtttatcattccatctcctaaaaccctagacgatcatgtaatcaatcaatgtatatcacattgcacagaaaatgaaactttacccttggccgtcgagattcccttgaccggaacttccaccactaccataagagacatcatctcccgtccccgtcgaagtctgccaaacactctgccacgcctgagacggaggctggacataaacaccattcggatccatagctggtctcccaatcatcatccctccaggaccagctggttgtcccatcggcggataatagtaaggcacgccgctcgcggtaggagccaccaccattccaccaccgaggactgcggcttcgtccttaatctcatctctaggaacaatatcaacaaggaaatcgaagatatcagtcctagtaatcgcagcagcgatatcgtttttctgaagcgtacgacgtttattctcctcagcgtgaagccaagatctgatcgtgagctcgagaatgaaaagctcacaagctttcgcgaagagaatcggtgcttctgcggagatcatacgaacatcttcatcggctttcatgatcttttttatcctagctagtggaagctgatggtttttgaaatcgttaacttgttcgatctcttggcgttggtaggtccagaatagttggagctgttgttgttgttgttggagaaggtggtggtaagaagctcctcctcctgcggcggagatggtggttccaggtggtggaggagggattccggcggcggagggaggtggttgctggttgttggtatccattggtcggttttggattttgatttttggatcaaaaaggtcgtgacaagtttttgccaaagggattggggtacaagtggataaggtggacagcgatgtagctgatgattttctctcttttttttctatttcctaaattaatttttttctattttctatttcaagttaaattttgttttttttttacacgtaccaaagttcatatgcatccgaaatgaaccaaaagaaaacatcaagagtgaagagagctgtcaggaaaatgttgcatcaagagtgaagagagctctttatttccgactttgtctttgccatcgagtatcgtcttcaaggtatcatcgcatcgtatccgccatttactacacttcgtaatctacaaatgaaacaagtgagctctaaacaaatcataatctctaaacatgaaaatgcaatctatgaccaccaaacagagaagcaagcacaaggtccaaagccacctaaagacactctatattcgtaactggtgaattcttcatctgacagtgtatgaattgacaagctaagttttcaaaatatgcaatcagaaaagaccatttccacaaacaaaaccaaaacattcaagtgagtaaacaacattttcagcgtagatgtcaattactccaataatgaccaacacaagaatcaaatcactaccattctccagtctctagagactccaatccctaaatgcataaacatgtaaagaggagatcataaggaaagtaaaaaagctaacccaaggaaactcgagcagagtaacaccctcatctacgagcttgtgatcaaaggcataatctagcaattttctcaaggcggcgtcaaaagagatttcgctttggccgacgaatctagccagcggctctgagactttcacaatatcattgaacccccatttttctatagtacctccaccggtagccttcaccttcgccgacatagttctaacgttaggaaaatgtcgcaacaaaagctccgtcatctctctgactccgacgactttgtcttggccatcgaaaatcgtcttcaagttatcatcgcacagtatctcctctatattctccggattctacaaatcaaagacctataaatcagatacattgctccaacagaaagaatcagatcaaaagacctagaaatcaccaaaaaaaaaagtagaatgaaaggaaactggagaagagtttcgaaatccctaacccaaagattgtgatcatcggtatactgctccactttctccatggcggtggaaaaagagacttcgctttggccgacgaatctagccagcgactctgagactggaaaaatcttatgaattcctcctcttctatcaacgccggcgccggtagccgtcgcattagtcaccgccttcgccatcagtgtcctgcatcctcctagaatcttagaaattggcgacattgttgtttctccttcactccactgcccctaacaataaacaattgaagaaaagtctccaactaaagaaattgatgcaactcattttgggccttgttgaatatttatatatgggcctaattgggcttcagttatattgggagtttatgaagatctttcgattgctcaacatatcactaacattaacaatgaattttgtctatttctttgttcctcaattctagtttccatacataaaatcacacattttcagatcaaaacataggaagacgaatgcaaacaagatttttaatcagttgtgtggccgtgtagtgagcgaagatcgcatatcgacaatagcagatttatcggcaccaagcttcattgcctctttactagctctaatgaaccgagaagtagctcctttgacatactcatgagcttgtttcacagtcatcttctttccaatttcttccgggaagctactgaggaagtgatcaccattgagaaccgctgcaagctgaaccacttcaccttgaaactcagaaagagcagcgtcttctttaggctcagtggctctcataggtgcaacttcaggtagagtcatgggacaatcggttcgaggagtggttaagtgagatacaacgtcttcgaaagtagcagcccatgcatctctatgtgttaagaaattggaagagagattgaagagtttcttgattgtcgctggtattgatgaatgctcgtactctgagctctctgttggtccttttgcttcacttacgacttcattcaaaacatataataaaataagatgttattaaactatatatagtaaaaaaatattaaaatcaaatggggtcaaaggatggttgaaaaacatgagtcacgcaacgacgccgacaaattataatatactccatctttcaatggcataatcaatggattcaattattttctccaccattattaatgaatacaatcttatagttgtcaaatgccatccatgtgatttggtttttgcagccttaaattttgttagcaaatgtcaaaaatctgtcggaaatagtagtagaaagtggaaatacatgaaatacaaatgaatttctttttttgggttaaagaaatgaatagtttcaatattaataattcataagtgaaaaaaatagtacgttaaataggcataaatactacatataagttttttggtcagtagtttcaaaactatttatatatcaagttcaaaagcggagtgttcttgttaatttggaaaaaagcttgaggattctactaaaaagcaatgcacactaagaacaaatttgtaaaattataatagagaaaaagagaactaaccggttcctttttgaatccaaggcgaaaccataatggtaggaacacgaacacctaaccggtcgaatttaaagaaaccaggagccggtccagtattcccatcgggatttggtataccgacataaggagtcttgacgtgatcatagaacccaccatgctcatcataggttataactaggagcgtctcgttccactgtggactcgacctaagtgcctcgtacacttctttaaccagcttttgaccgttagccacgtcatgcgacgggtgatcatcgttagccggtaaacctttgagatcgaaatacctcggttcgattacggttaagctcggtaactttcctttggccgcgtctttcttgaatttcaaatcgtattgatgcaaattgaaaatgtactttagctgtcggagattacggtagaataatgtggtcggaatattctgaaagtatattccgaagtcgatgtcgttgctatgaagcgaatcaaatatcgtcttctgtggatacctgaaattaaatgatgaatacataactatgcaaaattttataatagtttatattatctcaatattttctatggaaactaatcttaaaaattcagtaatcaagtgtgaaattaaactaatgaaaattaacaaggactaatgaaaataataatttaaagaaagaatttgataatgttacccttgagcgagttgtttcttgacatggctagtggaaccatgtgaggtagccgaatagacaaataaccggtttggttgagtcggaccgggaattgaagaaaaccaccggtcgaacacagcgaattccttaaccagctcagcataaaccggaacagcttcaggcctaaagcctttcattacagtctccgacaaatttcccggcatggaaagcgcttgctcaacgaaacccatcatggacgggatctgacccggcccagacccgaatacttgttgctcaacagcttcaaacgaatgacccggatccggatccacaaactcagcatcactagtgaaacatatagtttgtgtagaattcggaaccgggttacattcttgacccgttacaccgtttattgtcgggtttactgagttcttcatccatcctaagagatgatcgaaagatcgattctccaacactaaaacgacgacggttttgattggtgattgccattgatgagatccttgagctacatgtgtttgtgtgagaagacagtagagtgtgagaaagtgtgagaaagttaaagaaaatcttgaagctgatgatggtttcatggatgggttttttcttgggaaaaatctggttaagcttttggtgtagaatttgtgtctgtggttttgttttgccttagattggttacatgaaagaagaacataaagacagtggagagataattgtctctttgtaaccaaaatacaaaaagataaaaagttttaaatatatagtattataaagattttgggtaaatgtgaagtgtagagagcaagaacaaaaaagctgtggtgtctatttactgctttatttgtttccactactactgctttgatttaggtgggctcgatatgtagaagaagattctgttctcactgagaaaaagtaactaaaaacgcagagatttactcggtcaatgaaattcttgaattttggctgattttattatttgtagctatattataaaacttggaaatatatatgcacgtgaagtcgtgaagagttggtcttgagaaaaccacgtagatgacctcagggttgatgttgttttcttgtagattttagtgttacaagtggattcctagagttctaaatagtttactagttgtgagagatcttgacaaatgtatatcataactttaaaaacataaattggatccacaatccatacaaatgtttataactttatatctgagttttttttaaggagtattgtataaattctctgtaccaagagtatcggaaagtagtattaatatacttaaaataattgaacaataaatcatcatcatggtagttacttttgtctaaggtgccccactgatcttccattaggaaaaaataattggaatttgggagttaaaggaagaaccaatgcttagtgctttttcattctccaaatttctttagtatttttagtttttctgcctcaagtttagtgtttttagaccatgtacataggtgatataattagagtatcaagagtcacaaaataatttttaatatatcaaacaatagatttaggcctgatactgtatcagtgcagtgattcttttgatacccagtatcggatgacgtggaggcttatgattcgtctgtgaaattcgtttttttctggaaaaaaaaaaacatttttctctccgatagtctttctactgttttagctaagtagctacattttccgcaagtgagtaattttgccaacttttcgtgattatgcgacataattttacagtaattttgtaactctatatttttataaatttattttttgattttgcaaatatttttttttttaatgataccaatatcggtatcaccactggaaacaatttattaccagtatcataaaaaatctcaaataataaataaacattaaaattaatattaaaatattgttaatgatactcatagtgtatcaactatgtgcatgctctaaaaattgttagtttaccatatatagtttattttgtgattcacaaaacaacggaataacgaaattatttcgaattttttgtaaattaaataattacgtaaaaacgcattagaaagatgttgaggaacaatttcatttcttcgctcttaatcaagaccttattacaaaacaaaaggaaaaatgtgtaggaaaaatgatatcaagaaaaagagtgaagccaaaaaaatagaagacaaaaacaagagactggaaagaatcgccccccaccacaagttcaccactgggctcgtgagtaagtgaactgatacctcatgcaaccaactagatttggtcgtgtgaacacattcatagtatatatttgtcaattgaacataagctttttaagtttgtcttctaacccattctaaaaatatatttaatctctctcacccatagtactgaattacaaaggttttgaatcgaaggtatattataacttttttttttttgctaagtttatgatttgcattatgatcagcgttcacatcttcggagctaaactttttttaacaaaaagaacatagtgaatttggctacgccactgcatttagcaatcgaagaagcaattatatttgctggaggcgccacgccgccaccatatgaaacacatattcagtcactagcagtcctctttctttagtgattggcaggcaagttttgtgacttaatagtgttggtgttcatataatctgcagaactgaaatggtcatatctttcttttctgtttgagtgttcatttgggtctgtttgttgcagcctctgtatcaaacatccaaatttgtttcgaggaagcgagaagcttgatgtttcatgggataaagggttgtatgattccaatgtactggtggcttttaggagacctagacctgaatggcgtccgcaacagtgcttcttcatacaggtactcaactgatcggtgaagctatcttagaaagtgaattttccaaattatgctatgttaaatacattcaatttttttcaacctggtacagcattctctttcgccagagataggggttcatggcaccccagttgacaacttttctcggtcagggagtggaggtgtaaatctttctaaattggctgttggtttagacttgagtgagccagcgagttcaaaatggagcagcacaaccagcgtaaagtttgaggtacccggacattaccttcttcagacattgtagtacaatatttttctctttgctgttttttgctttggtgaaaaagagtattattttccattggtgcagcatgtgcgtccgattaacgatgacggacgggcgatatcagagatctggacggatttcctataacatgcaggtgatattggatctcgcttcccttaatttgtttccttaagctctagcataaaactgatatttacatgtgtagaattctctgctatgcagtggaaatacccatgacagtatggtagttttaaagcaagaatcccggtttgcaaaggctactgaccaaggtctttctcatgtaagagactcatttctgtttctagcctaggaaaaccacacggccatttttgcactaacttgtcgacgttacttatctttcatactggtttcttgctttttcagtttagtatgcaaatagaacaaggtattccggttgtgtccaactggcttatcttcaaccgtttcaaatttgttgcatcaaaaggtgtcaggtttggaccggcttttcccttagcaaggtactgacagaaaatcttacatactctatgtaaacaactacacgtagaaaatgctttgtaaagatatcctagttttgcggtggttcttacctcttccgtgacagcttgacaggtggttcaattgtaggagacatgacaccttatcaagcatttgccattggtgggctaggcagtgttcggggatatggtgaggttgctgttggatctgggcggtcatgccttgttgctaatacggaattggcggtacctttggaacgtggagctgttgcatatataatttggtcttcagaagcatcaaatggtttcccctgttaagttctcattgagctttggttccttttggtgtacagaacaagatgacagaagggaccatcttcttggattgtggaacagacctaggctcaagccgccttgtcccggtaagttcactttaccttctccgaacaagaaccataaagaagttgttgagacacgaaaatgataaagctgttgcggaattggtttcaggaaacccttcgctgagacaagggaagccggggtttgggtatggattcgggtatgggctacggttcaagtctccattgggtcaccttcaggttgactatgccatgaatgctttcaaccaaaagactctttacttcggtatcaccaatcttgcttcatcaacatagtcaaatagaataaagcaatcaagaaaagcacatattcagtaacttgattcaaggatatatttgcatttgcgttggagccagaaacgtcacaagatgaggcatacacagtctaaggagatgctattaaacaattgacagagatcttgagaagataaatgaagtgttcccatagtaatcagtcatgtaatattacaggactaaaagttttcattggtttggtatatacagctgccagagttttgtctgaaagctgcaggtttcatagagaagagaacacatttgatctgatggtgttgcaaatacgtacgtatctattgcttttacatatatacgtaactatggctgactcttgactaactctggatacaagtggttgaaccaaaccatatttgcccagaatagggacattctagttcctaccacaacaatttccgcaaattcgtgttacatttcataaaccattagagagtctcaccaaagagattaacttacgtgatacaagcaaacaaacaaatacaactccacaagaagctcagaagaaattattgagctgatttgtaagtgagctcttgaggtttgaatacaaaccataaagagaatactgcttaagattatcaacttcataccacgagttgagaaccgccaagtgcttatcagtgccggaaaacgccagctgaatcccaagactacagcccactgaacctccccggcctttacagctcggtgttcttatcgcacaaacttgctttttaagacacacaaaattctgattccctttacacgacgcacacacgtctctcttccaatacagattctgaagcctacctttctgaaactccatcaccttaaaagtcataacaacaccataagtaagatctcttgacgaatctatacataacatgtactgtataagatatgatatacaaaaagctttacccaagtaaaactggttacgataaacgtgctgttagcaataaaagccggatcgacctcgctgcgtatttccgacccgcgagtgccaacattatacatcctactatattatttgggaagtacattttaaatgtaaccttaatttttgtaattaattacatgataatgccattagaaaaatttaatcaaaaacaaaatcttttaatgacacattaagattaccaaaatcatttaacgacaatattcatctcttaattataggcttattggatttaaagacgggtcatcaaagagtttctaactaaagcaaaatatactgaatattcaaatatctatctattaccaaattataaacaattaagttcgtaaaacaatttaatattttatatacaaaataaattaaatcttaatcacataaaaattagcacaaaaaaaaatattgtacattcaggtctatagtatttttgcaagacttttttggtggatttgggtaaaagtgcattcaggtcatatggtacattcacctattaaataaatatggtgcacttctatgttattagctaaaatgtttagattataattcagagtcatatcataaataaaattactattaataaaataaatggctttttggcaagacggatttggagggacgggtttttgaatcaacattaataaaaaaagtaaaatataattaatccaccatttcaatacgggttaaatctttaatttattattttttaagatcactaatattaaacatatcaaatcatcctaatttagaaaagattatataaaaccaaaaatgttatgtagtatatataatgttactatatataaacttaaactataaaatataaatgtattagagaatgatacaatttgcaaaacttttatatagaataaataattcttaaattttaaaaattactactttaaaaaaaaaattacggaacgggtaaagaaattacataacgggttttattttggaattgggttatatggtgaatgtatttgaatcaatatttataaaattttaaaatattattaatatgttgttttaataagagttaaaacttcagttttttaacaattgtctcatggattcgtggtatagtgttacttaataacaattataaactgtaaaatataaatattttataaaaataaaatttgcaaattttaatatatattacttttaaaaaataaatcatcccgcggtataccgcgggttaaaatctagtccactaattaagggtccatgaatggtcaaatcatacttcaccaaatctgaattcactaccaattcaagtaatacttattataccaatttgcataataatttcacataaaaccaaatctggtacttttactattattagtacagactatgaagcaatctaattagtggtaatctagtgaggtcaacactaaatcttcaaaaaaaccaaagtcaaccaaatctatactctgaacagagattaataaaatgtgatttaactaaactaattcgatttattaaataaacaaaaaattgatagaatatatattatcttttcgttagaggttccaagccatactctcaaaatgtgaacagaactaaatcatttgaatctctcattcacttctctacataaaccccactacaataatcacaaattcacaagctactttcttcttcatctcgacaacaaaaatccaaatacatgaaacaaacaacaaagaactgagagagtggtaatatggtcctactataaattaggacgacttaatactttaccttccatgtggcttaacacgactaggagctttatcgccttcatcgcttcaatgtttggtctctattcccttagaatactcatctttctccattaacgtctttcccctcgcattggcagccgttccaagcgcaggagaagacatggttaggcgacaacagggagaaatttagtcgcgagaaaactaatcgccactctcccccttatctttgcatgcttatgcttcttctcgagcacttcttccagctcacggatcttttctaaaatcataacatgatccttgtagacagactcgtactgtgccacaaactcgtttgtgtatatgagcttgttgaataaattcaaggtcttgttgttattctctaaatagagattaatcatagactttagttcttcgttcttagacacatgttcttcgtagtcactaatgtatcttgaccatagcttggtcaaccagaatcatgcagttaccattgatattatactggagctaatatggaatagaaaatcaagattaatacttaaaagcaaaaaaaaaaaaaaaaaaaaaaattaccccaacttttgataagaattttgctcaagagaagagaatgttgtgtttctgatctacaagtattaggtactggatattacaattatataagcaacaaaatcaaaagtcagtcaactttgaaactacgggggaaaaatgtagacttgtcgcgattcataatgtggagagaaaattcaatcttggtacgattataactacgtaaaccaatagtcgagtcaaccttgtaatgtaaatgtgtggcacacaagattagatttgactcgcaagaattctagatgcgaaaacccttttgaattgaagcttgatctcttgcagagatagagcaaatctaaacagagaaagtgagagaattttattagaaacttaagtcgaaacatcatgcgctctcttagccaacatattagtgactcatgattcaaacacttaaaatacattgatagttaccacacaatacattcaaagttgggtgacactaatcgagaacaagaacacaataatctacatagaagcaaaatacatgaaacaaacaacaaagaaatgagagagtggtaatatggttctattacaaattgggaagccattcacaccattatttgcatagacacaataattaaagactaaatacttaatcttcaactgtggctctttatcttctccatcgcttcaatgttgccttttgttgtgtttccaatcaaccgagacaaacctaacaatgtcgtctccatagaattatcttcttccatcgtcaatttatagagcttcttcgccacctcaacgcccctttcccctccctggccagccattccaaacgcgggatttaattggcctacgaccgctacgacgaaacaagggataaagataaccgcgccaaaaccaaacttcattatcctttttctctttgcatgcttatacttcttctcgagcactacttctagctcacggatctttcctaagagcatgacatgatccctgtaaacagactcatactgtgtcgcgaactcgtccgtgtacatgaacttttcagataacttcctagtcttggtggtgacatgatcccagttggtggtgacatgatcccagtaaacattaacttgacacacatattgtgtcacgacctcctccgtgtacatgaacttttcaaataaattcaaagtcttggtggtattctctaaatagagattagctatagactttagtccttcgttccaagatacatgtaggccgtttgtagtaatggtattggccacatcttggtttaggacctttaggtcagccagaatcttgtagacctcttgaaccgatggcattgatattatattggagctaatctagaaaggaaaacaaaacaaaacaaaatcaagaaaatttaaaggcaagatagtttttgcatacatcaagtttaaagttagcatcataaaaattagcaatcaagcttaagttgtttgagatttattataataccgtgtgaatataacatagtaataatatttaaaggcaaggtccatgagatgatcaagttgagattgggttgaaggaatagaaaaattagctcaactttggataagaatcttgctcaagattagagaatgttgtgtcaccgatctacaagtattagctactggataatcgttatatagcaacaaaatgaaaagtcagtcaaccttgaagcaacgcggaaataatgtagatcttgtcacgtctcataatgtggagaagaaaatttaatattggtatgagtataaatgtacttaaatccaatagtcaagtggaccttgtaaatgtttggcaaagaatcagttttgttgctattttagatgaaataagtttactaagaataaaaaaatcgacgaaaaaaaattataattcaacaaacaaaaaaataagtaaacactttcaaaaatttgactacataaaaaaacaattaacaaaatataagtagactattttaaaataaatcaaaagaaataaatttaattgacaaaaataaaatttaactcgacattttataaatagattttatgataagacaacgtagaataaagtaagtctacggtgaataaacaagtctacacattaaattaaaaattgataaacaaaaaaaagtaagtcaacagttcaaaagatttactatgttataaatcaactggccataacataagtcaactgttttaaatctagtcgacggagacaaaaattaaatcaacaaaagtgaaaaataattcgatagttcaaaatatcaaccttaaaaataaatctatatagaataaaataagactaacaaaaaatatcaaaaatatatgtacacagatttttactttaataaatataaattatataattttgaattacttattcttgaataattaataaatctaaatactattatcaacttatataaaaaaaattaaacgagatagtgattactttaaatatagtatattaattttgttaattatttattattaaattaaataattacgaattttagttaagttatcaattatttaatttatttttagttaatttatttaaataatttataaataaataaaaagattattatggttattgaatgtagttttcaaaatagtataacagtgaatgtagttttcaaatttttaataaaatttagagtatttataaaaatttcaaaaaaaaaggaagtctattcgttttgtgaataagataaactttttttttatccagtaataagataaactttttaactacaaaaaataaactaaataatagaaactaaccgttttattaccgcgacaaaaatgaaactaacgaccaaaaacagagttgttgttgttttctttttttctttctaaatactgtaagattaaaagaagaagaaagattcgatttgctagaagattgtgattatttcccagacatttacaacttacaaggttggcttgacttctgatttgaggttacaaccttaaccacattgcattttctgtcgatacaaaatcggatgtttctcctcgtaatttccaagtgaatcctcgcagtttctgctccatattgcattttctgtccatacaaaatcaaatgtttttccttgtaatttccaagattaaatcttcgaggttttggttacttgttttattattgttccaattattgttatttggcaaattatttcttaaatttaatttatcgataaatatatatatatataacagccaaaaacaaagttgtttcttattctgtcgtcatggaagattcgattcaagagagcatgtttacccatgatattataaagtatcatagacttaaatcaattaaaaagttaattttggggatcatttttctttgatttggatcactcagtgatctatttgacaccgttaatttctcaaagtttaaattattaaataactaatgctaatgatattttatgaagttcattgataaacatgctctttatgatgcttctaaaccgatgtgacaacaagattgagtctatgccacacatttatttacaatgttgaattctaataaaatcgtaaaccgttgaattttctgtccgcgttgataaaatcaactgttttctccacgtactttcaaggttgactgactttaggttttttttttttttgcttatatattacgtaatagttgtagatcagagacacaacattctcctgtcttgagcaagattcgtaaccaagttcaagtaatttctctttcttcaacgtcatctcattttgatatttgttatatcttccttgtatttaagtattcacaaggttatattcacggaattgaattagtcttaacaaatggacccttgttaagctgctaattttcagtgatatttacttacacttggtgtatgcaaaatattctgaaatctttgtctttaattttcttcctttccaggctagctccagcataatatcaatggcggcgttggttgaatttatctctgatcgtgtcctgagttcttgcaaatccgcttgcaaagaagatccaaagctcagatcctatatttctgcgcttcgcgaacgaatggacaaattgatggaaattaaacggtcaccggtcgaggaagcaagactggaaaaccatccaaggaggactcaatcattaagatcatcgactttttagctgtctcaagccaagatgtggtcaagatcattaaagaaagcaattatgatttctcgaagaacaaagacataaagtctgtgattgatctctattttgagagtaccaacaatactttgaatttagtcaataccgtcgagaaatacgtagcgaaagcaaaaaccaccacgttcaacatttgacttgcgatccgacagtttgaaagagagtcgagggacacggattttggaggaaacaataagtacgcgggaacgttagagaagctgaataaggttaaagctctgggagatctttttggtgacgagttcacgactcagtacaaggctatctacgacgagcatcagatgcttttaaacaagtcccatcacatgcaactagagcatgagaagaagcataagaatgacaagaaatccaagagattggggtatatttttttcgcggctgcacttttatctgttctcgccttatggatttatcttggagcagtctcacttgtggtagcagctaaggttgtgattgaagtggcaacaccgagtattgcacctttatggaaatgggtcactgagatcctcgaggactctgagtctgagattgcttacaagaaacttactgatttgtttcgatcgatggataaaaatgcaaacctcaacatcgaatttgcaaagacttttaagagcctagttgagacgttattaacaaggatcaagccgatcttggagactgtagattatgctgtggagcaaagagaagaggagaccgtgaaacttgttagcaagaaatcattaaggatattgaaggttttgctgacaaaatcgaggaagttggtacaaatgtggctaggtgtagcaaagtggtcgctgagggaagagttgatgttctggaacacataagcaatttagcttacttgaaaggagagtggtgactatcaatgtactatgtggtaatacttttatattcatgtttgttgtgtgcaagacccatattttgaatgtttgaataatgagttactttgtacttgtatgatcattgcattctatatccaaatctcatttattatgttactgataaaaaagtaaatgaggattaattgaaaccgaccgttttatcacgacaacaaagatgaaacttaaatagaccgttttaatacaactgaaacagagtgacgaaatcaaaactgccaaaaacaaaactgtttcctcttctttacaagatcttgtttcacttctaaaatttaagatcatgttgcctagaaaaccaactgatcaacatagctaagacgaagctcaatgggtcatcaatgtccgaaaatctctcgatgcagagttcgaagaacacgataacgaacaagtcatcgtaagcattttcaatgttcctaaagcgctaatgagtagccatccagattcatacacacctcaccgagtttcaatcggaccttatcactctctaaaacctgagcttcacgaaatggagaggtaaaaactcatgatcgctagtaaattccgaaaccaatctaaatctttcaagtttcatgatcttgtagagaagttacaatccttggagatcaagattcgagcttggtatattaagtacaatgctctacttgtcgtgtagttggagtacctctttctttagttgtaaaaaataagatagatcataactcaaatctccaaaaacccatagatcaattagattgtgaacaagacaaaaaaaataaatgcagggagaaattataagtgtaactgcagtaccaaattaaagaagatgattgtcataatagtgagttcatggtacaacctatttcctaagatgttaatatggtgattggattatatctagttacctaacaaccttaaggtccttccagttgtgccggaaatgaccgaagcctaaccagcagttctcaactcactttccagtatggccaactccctctgcaaagaatgttacatacggagacagaatcgattaaatctaacgaggaaaaatctatctcatccataaaatgtaacaagatcaagtctatctcatccacatatgtacaaacattcaacatcatcaatcaatcttatgactcacctatacctccacgtgcccacaaagatctcagtccgtctcactagtagaaaataatggtggagtcattgccggtttagcagcggatctcatgatgtcaatcgtctcaactgcagcggatctcatgcaggattttaaaacactcgttaaagagacaaagagtgtcagttaaaacactggaattgttttagctgatgggagacaaagagtgtcagttaaagagggatcagtgaggcttgggccgaatctgacactaaaatcaaatctacaactatcaaaaacttatggaacaaccttaacgacttcttgttccaaactgcccgcatatctcgctaatatactcgggtgcaattgcttcaggactgatctgcggcgatggaatctggaccatcccatccgctattctttcaatattaagaatcaatctacccatctgtatgtactttggaccatcctagacattgttatcatgttaaaattttgttgcattatagcaaaaaatagagtttatccgtctcactctatctcataacatgacattttaagtagaagaacacagaattataccaataaacatcttcatgtgtgtggcataaagtcaaacagtcaatgttgacctacgaaactttaattgggcttcttctataagctagaattgtcacgagggaggaatgttttcaatattactagcactttgctatcgtttttggctccaaaaggtgtttggcgatgacaaatgcattacattgatgtaatgagattttgttgattgcgcattcgttcccattttgtatgtgacttttttttttttgaatggttaaatctaatgaatcattccgaaaaaaaaaaaacaatcaatcacaaccttatttttctaaaagcaaatgaaaatgtgatatgcaatacaattcttatatccctaaattttaatacaattataatattattaaaacgtaataagtcacaagaaaaaagtattttttcacaatataaacattattacgaatttgtaacgatttgtgaatggttggaatacaatcgtcacaaattttatttgtaagaaaaacatcataaaaattgaatcaaatatatctattaaccattttcgttacaaatagttaaaacaaaaaaaaaagtttaaaaaaaactctcaataacagactaacatcgtcataatttgtgactaacatatcgacttaattttagtaactcattattacataactacagtctcaaatggtcacaagtgatgactaaaaatttgttgcatattcgtaacaatattactcaaaactaatggtattttgtgactatcataatgctccaattccatcacccactataatatattagtttcaaatagtcccaaactattactaaaaaaaatcatcggatatggttaaaattataaactaaaaacataacctcaaaacactattctttattaaattattgtcataaacatacatatttcttataataatatatatcttagttataaattataattcatctccattcttacaacacaatcacaaatttgacgataactagcagagaatgtaaggatttgacgattactctcatatgataacctctatacagatgatttcaggctctctggaaaggtaagattcaattattatttttctgtaaacgtgattataaaagggtaaagccctgttcttttcattgtcgctgcatcagcgatcggcgaccaagaattataactgagttgagacacgtgtctatggtgagtaacaccggcaacaccattaaaacagtcgcagcgactccttttcaccattccaactgtcgctcatttttccagcgacaacggcgatacccgtggaagtgatcgcatcgactcttttttaattattctccatttatgtggaaattctggtcgcttaaagctatcgcagcgattttaaaccgaacagggcctaagccgtttttctagaaaacggttcaaatagcttgacaaaatgctaattgtgtatcacacctatactcgtgataatttatataaaaataatttcattcatatgttaatataaatgacatgtttacttagtctatatcaaaattatagaacaaatttcgagaaacagaagaagagaagaagccatgaagctaactagtacagtcacaaaaggacgacaccgtttcgaaattgggccagagacaaaactaaactggatcttaaatcagcccaagccgttaactataaatttgttacattagtcacggactcacgtgtcacgtccttcgaaaacaacgtatccgcacgtgacatcgccaccggcctttttttttttttttcacaccgcacgaggaagtttaggtttcttcaaaatcacaaaaccaaacaacaacaaccaaaaaaaaaaaactcaaaccattttctctctaacttctctgtcatttctctctctagtggcaaagtatggcggattggggacctgttgtagtcgctgtgatactgttcgtgcttttgactccgggacttctctttcagattccggcgagaggtcgtgttgttgaatttggtaatatgcagactagtggagcgtcgattctcgtccacaccatcattttcttcggtcttataaccatcttcaccatcgccattcgtctccatatctataccggttaatttcaccgtaccggattcgtaacttcccccggttgtctagttttatggtttgttttggattttgtttcttctctgtgtcttgtcaaaacgttatgaatttgtgaatctgaatatgcattaagttaatttcaaaattcgctatgtttgattctcggtttggtttaaatctggttatggcgttgatttgaatttgatggtaggcactaggcagttagccttagtttggtttattggtattcgagttcaaattggaattgagtactaaaatgctctgttactcatttctgcatcttgagttcttatggatttgcttacgaaatgttcaattttgtttggtctggttcggttcgttctgaaacgaatgtcgagagtcttttgcttgactcgaaacttgccttgtgtcagcgtgtaggggtttgtaagaataaaatgggctttaaaattaagttattaatgggccaacacatgatccaccaagaagaagtgatccggttgcatcttagattctcatgtgatgtgattgaacgttgaaagtgcacagaagtagacctgtttaaagatgtttcacactttcactgcgtactatgtaactagtggagtcagtcccgtcatgcgtatgagtaaagcgcgtcgataccacgggaacacacaaaaacatgtcaccctagtaaaaactgtgttcgttagctcattgtaaattgcagtatatggcataaacaattgtttctacaaattccaagaatgtaagaatcaagacaataaaatgtgactatatcaagaacttaactaaagtttcatccacttaaatgaaaaagttgatttggatagaacaaaagacgtaatattcgatgtgttctctctctctcccatctttacttttattgactttttattttcactttaatgtgtgatgtaaaaataaaaagtaattatttgttcaaccctaggtgaaataaaggacgacccaaaacaagtgacgagagagcagagagagcttcttcttccggacactgaacagtgagagcacccatctccaacctcttcctgtaagtttccccaactactctgtttcttaaatgttctgcgttctttaaaacaaagtatagaagatttaggttgtaagatcgatctcgtttgatttcaaactcactatctgaaactctttgattacaaacccatcttcataatctctgtaaaaatcaaacatgcaattcacttaatggtgcaaaaaccccagaagagggaaaaaggaatcaaatttagtttataaaagcagtggaattgagttgcattgttgaaatattcaaaagcaagatcagatttttgataaagaatttcacttttgattgcaacttataatcaaggaacaagatgggaagcactgtgattttaagctcagatgatgaagattcagatattagtgaatctgaaatggatgagtatggagacaaaatgtacctaaaccttaaaggtgggaagctgaaagtgagactctctcctcaagcttttatctgtccttattgtccaaacaagaagaaaactagttttcaatacaaagatcttcttcaacatgcttctggagttggtaatagcaattctgataaaagaagtgcaaaggagaaagcaagtcaccttgctcttgtcaaataccttcaacaagatcttgctgattcagcttcagaagcagagccttcatcaaagcgtcagaaaaacggaaaccctattcaagattgtgatcatgacgagaagcttgtgtatccttggaaaggtacacactttaaaggttcttacttttctccttaagattgtactgcaatgtgtgtttagtgtttgtgtatatgtggttgaaacaggtattgtggtgaatattccaactacaaaggcacaagatggtcgatctgcgggcgagagtggatcgaagctaagggatgagtatattctaagaggatttaacccgactagagttcgtcctttatggaactacttgggacattcaggaacagctattgtggagtttaacaaagattggaatggacttcacaatggtcttttgtttgacaaggcttatacagtagatggtcatgggaagaaggactggttgaagaaagacggtcccaagttaggtctttacggttggattgctcgtgctgatgattataacggtaataatattattggagaaaacttgaggaagacgggtgatctgaaaactatagctgagcttacggaagaagaggcgaggaaacaggaattgcttgtgcagaacctgagacaacttgtagaagagaagaaaaaagacatgaaggagattgaggagctttgttcagttaagtcagaggaacttaatcagttgatggaagagaaggagaagaatcagcaaaagcattaccgtgagctgaatgctatacaagaaagaacaatgagtcacattcaaaagatagttgatgatcatgagaaattgaagaggctgttggagtcagagaggaagaaactcgaaatcaaatgtaatgagttggcaaagcgcgaagtgcacaatggaaccgagagaatgaaattgtctgaagatcttgaacaggtatccatttactctctgtatctctcttttcaagatatatgttcaagaaataattggtttttttctcttatcagaatgcatctaagaatagctctcttgaactagctgccatggaacaacaaaaggcagacgaggaagttaaaaaacttgctgaagaccaaagggttagtgactttcttcttctttgtaaaaatggttgggcttattttcgtgattactgagaaaattctgtacctaacagaggcaaaaggaggagcttcatgagaaaatcataagactagaaagacagagagatcagaaacaagcgattgagctagaagttgagcagttgaaaggacagctcaatgtgatgaagcacatggcatcagatggcgatgctgaagttgtgaaagaggtggacatcatcttcaaagatttaggtgagaaggaagcacaactcgcagatctcgataaatttaaccaaactcttatccttagagagcgcaggaccaacgatgagcttcaagaagctcataaagaattggtaaacgtatgtatcattcaaagtgttgttcttttcaatcacatcgaaaagctatgagaaagcttgacattttactaaaatcttggttttgtttgtttcatgtgccttcatagattatgaaagaatggaacacaaatatcggtgttaagagaatgggagagctcgtgacgaaaccattcgtggatgcaatgcagcagaagtattgtcagcaagatgtggaggaccgagcagttgaagttctccaactttgggaacactatctcaaagattcagattggcatccattcaagcgggtcaagctcgaaaatgaagatagagaagtggtaagaccgccttcttgactctgtttgttatgttgaatctctctgaaagattaaaaagcttttttggtgttgttgttaattgtgtttaggaagtgatagatgatagagacgaaaagctgagggagctaaaggcagatttgggagatggtccttacaatgcggtcacgaaagctttgttggagataaacgagtataacccgagtggaaggtatattacaacagagctatggaacttcaaagcagataagaaggctacacttgaagaaggtgtcacttgtttacttgatcaatgggaaaaggcgaaacgcaagcgtggaatggcttagaggtttaaccatttttgataaccgaacaaaaatatgttttcatttgcaattgttatttgctaatataggatttcgattgatggtttgcagctgcaagatgatggacatgggactgaataaaaagccgatgcggtttttagttgcagagaaatgtgtttggtttgaccaaactttggtggattctgtttgtttttcttctcagaacttagtgaataattgacacaactttgatgtcttgcatcggttcttttcattgtaacatttgtaggagtttggccgctttggacaataagaaataaaaatatcattgtaatataattcacatgtaaaacaactagatttggcctctcttctgtctcatatcttaagcatgtcatttagaaccttttattgtaaaaacaaactttgtcatgagttactttttgtagtcaaatttgatattgaccccttccttattatgctaacactgttttcatcttataaccctataaatctaagtttcgtgaatatagccaaaatcatctacatcattgcaaagaaccttaaaggagaaagaagaaaaccggcttgagagagatggaaaacaactcaggagctattctctttgtgatcttagctatgaccattgttcttcaagtgaggccagggttctctcaagcactccctacgatccccggacttttcccaccgggtcttcctattgatatcataaaatgttggtcatctctctttaacgtccaaggatgtgtacaagaaatctacaaatcgatattttctggtcagtttgctagcattgaagccccatgttgtaaaacgttttcagctatagatacaaactgttggccacatatgtttccattgaacccattcttccctcctattctcaagaacaactgcgagcgtattgctacgactccatcatcaacacacaagtgaaggctacacacaaatgttgcgagccagttgttagcttcgaggtttaagaagttcttttatcgatttgagagatcacaatgcccaataatccaaaattctccttgcagtaatttttttttttttgtaatctttagcttaaaataaacaaagctaagctttttgatgtactcgtatgtgtttgccatgtagtttgttaaaagagtggttataacataaacaaaattttgtttgcgtttatatatgaaaatattgttcttacactatggaataaaacatatttcagcatttaaaatttgtaaaaacgacgaacacgaacgcatatcaataccataccaaaaagattatatcgtacatgaaacttgttgcagacaatggcatgactaatgggcctctattaacttagcccataaggcccaataaaactttccaaatagtttcatttttcagattttgaagaatctcccgacgactcctctctgtctcctcctccgggaagctttctgtctctctctctctctctctacacaagaccttgaagaatccgattccataacaatggcgacttcgttagcacgaatctctaaaagaagcataacatcggctgtttcatcgaatctgattcggcgttacttcgccgcggaagcagtagcggtggcgacgacggaaacacctaaaccgaaatcgcaggtgacgccgtcgccggatcgggtaaaatgggactacagaggccagagacagataattcctctgggacagtggctaccgaaggtagctgtagatgcttacgtggcacctaacgttgtgttggctggtcaggtcaccgtctgggacggctcgtctgtatggaacggtgccgttttgagaggagatcttaataagatcaccgttggattctgctcaaatgtccaggaacggtgtgttgttcatgctgcgtggtcgtcgcctacaggttcttgttctttgtcattttttcggaatttgagtctctgtatggttccattgtagcttctagtttgagttctggatatccaattgctgtagttactgcttgctagctaatggaatcattgatattggaatttagggttttcattttcatcttccattttgattatggaaaatgtagagtctcacctttaaggagattttacacttttatctgaagtagtgaagtgtaagtaagcatatttgtttggagtgaagatgtccccagatcaagaatcatgaatgatatttgttcagtaaagttaatcttcagagcattttgcgtttagctagacaaggatgcatagaattgcgtagttctttaggtgattagtgatattggaagcaagaaacccattgatgatatgtgcttgattttaaaatttaggtaattcaggggttgaatagattagcatggtggagaccatcttgtttagttgtagaaagttgcctagcagctctggagaagtttcaggaactatgtcatagtaaagatttttagttatgcggagagaattttgcagaaagttgatattatattcagtggttggaaccgagattctgaagctgcgtcaagctgaatgaacataagcgtcttttagtcttaccaaggtggattccgtgtcaaagtctttagttcaacagcctcctggtttgattaagctgtagtttacaactagtacttaattacttgattcaccattttttcgggttaatagctctgtattatcaaccagtcttcatgctttttctatactaacatcttgaaggatagagcatactgtggtgctgcttttgaattttgatatgatagataaaaatctgatcttagaagatactttctactttgatttttttcaggattaccagcacaaacattgatcgataggtacgtgacagttggtgcatacagtcttttaagatcatgcactatcgaaccagaatgcatcatcgggcaacactcaatcctaatggaaggttcactggtcgaaacccgctcaatcctagaagctggttctgttttaccacctggcagaagaatcccatctggtgaactatggggaggcaatccagcaaggtttattcgaacactcaccaatgaagaaaccttagagatcccgaaacttgctgttgccattaaccacctaagtggagattacttctcagagttcttgccttactcaactatctatctagaggttgagaagttcaagaaatcccttggaatcgccatctagaaagcttcttccaggtttctggctacttccctcattaagaaagcttcttcgttttcggaatttgatctgaataagtagctgcggaacaagaaaaagagcagagctgtgtttcaaatgttgtcttctctgtttgttttgtttaagttcatatccttgtgttcaaactttctatgaagatgataatggtgaaaactggaaagtgtaaaacttctttcgtctcccctcacaattggaaaagctaataatctcgtagtgttatagaattaaacatctcgtactaaaatattttcatcttcaatttttattgtgttgctttgggcgaaaagccaatcactgaaacattacagaaactgagagacgcaactaaaatatgtagtaccaaattattccaatatctctagagagcacaaagctagttccctcccttaataaaccctgagaatttatgcatgacttcaatagcattatcacattcaggtttcaacaaatgaaaaacatgatcttctccttcactctccaccacttcaacctctcctttccaaccagacttctcaagcttagccgcgtaaccccaaccctgcctcaccaacgcatctttctcagccaccattaccaaaaccttaccacaacccaacccagacaaatccaccgactctgattgcaccacgttgagcaacggatcatctgttccatctttgctattaggacttgccatcatccaaaacgcctctatcttcatcctcaacgtttcatctttcgtatccttctcgtcgattggtgttttcgaccagaagtaaggatgaagcaagatgattccagagattcctgtatcgttcaaaccaggactgagtttctctttcgcagctctcatcgccatgtgatgcacgatgtttgctcctgcactgtctccggagaggaacactctgctgaagtcagcatgtttgtttaaccaatcttcttgaccagatccagtgatatgggtgaatacccatttgagagctgtccaagaatcatcgaacgggacggagatcggatgctccggtgcacgacggtaatcaacagagaccgctacacagttcgacgcagagacagacgtcgtgaggaaagtgtggtaagttggagagaaagctgtctcaatgatgaatcctccaccgtggaagtaaacgaggagagggagtttcgagtcggtctcggcggcggctttctccgggaggtaaatacggacggataggttgttgtcggcagaataaacaacgtccttggaaacgactccgttttgtggttcggaagaaggtgggacggtggcttcacccatgagtcgctcgatgcggccactcttgtagattttgagcaatggagagcagtcgacggcgatctcggaatccatggttagttgattggttggtgagttatgataagattggtgtgtgtgatttatattgagaatggagtctttataactctattggagattttggtatggttgagacacgtgagttgtgtcattccattcttacacggaagatatgtttgccacacaattcaaagcacacatatggcagttgttgactatgtgacaacgactggcacctctcttttttccttttttagtttttttgtttgtctttggagtttgaactttgaacattcacttttatttccttttttgtctatttagtctttgaagtttgatccctttttttttgtctcattttaatctttttttctctattgactacatttttataggttttgtactatattttaaataaaaatactagatgaattttagtggatcttggtctattttgtttggtttggttgtaccattgagtaatgttaccatttatttagacaatcaatcaagacgttaattaagtggaaaaacaaaaatcaagattacaataaaaatatttagtgggcagaattaaacatctcttattagcaatacaattgaatataatgatgttgtaagcaacatgcaaattactgaaacattagagaaagtgagacagtgacacatctcaaacaccaaactaaaaagcacaatgttacttgtctcccttgataaaccctgcgaatctgtgcacgagttcatgagccttttcagaattaggatccctcaaatgaaaaacatgaccttctcccttagtctccaccacgtccagtacttctccgttccaacggctcttaccaagcttctcccagtaaccccaaccttgcctcaccaacgcgtctttctcagccaccattaccaaaaccttaccacaacccaacccggacaaatccaccgactctgattgcaccacgttgatgaatggatcatctgatccatctttgctattgggactagccaacgtccagaccgactcgatccacgtccttattgctacatccgtcgtctccttgtcgtcgactggggtttttgaccagaaataaggatgaactaagatgattccagagattcctgactcgttcaaagactcgggactgagtttatctttcgcagctttcatcgtcatgtgatgcgttatgttcgctccggcgctatctccggcgaggaacactttgctgaagtcggcgtgtttgttcaaccaatcttctgagccagatccggcgatgtgggagaaaacccatttgagagctgtccaagaatcatcgtaagaagtaggaatcggatgctccggtgcacgtcggtaatccacggagaccgctacacagtctgacgctgagacagccgccgtgaggaaagtgtggtaagtcggggagaaagcggtttcaacgaggaatcctccgccgtggaagtagacgaggagagggagttttacagaggcttcggtctcggcggtggcggctttctccgggaggtaaatgcggagggagaggttgttgtcaggagaataaacgacgtccttggaaacgactccgttttgtgggttggaagaaggtggcacggtggtttcacccacgagtcgctcaatgcggccactcttgtagattatgagcattggagagtagtcggcggcgatctcggaatccatcgttggttgagattgagagagtatgattgtgtgtgggagagatatattatagtattgagaatggtgtccaaaatgtcattgtttacactgaagatatatgccacacaattcaaagtacatgtcagttattctacggtgcaccttttttccttctttttaattttctctacttgtcctacttatatagttcaataaaatatttaatttttaatattaaactagttaggaagagacaagtgtaaggaattgacttctaattagtatatcaaaaattataattaggtgagtatctcaacgagatatctccaatggaaatgccctcagttagcgttaaaaaataataactacaagactatttccagtaacatgccaacatgtcacgagtctagacgcttagatgagaatctgagataaagcctcaagaagaacaaaggttatccgctagagtctccgactccgatgaaagttatcgtcggaaacatcatccaaccaatgatttcaataacagaaacgagatatattacaatgttctattagagaaaatgaatatagctttgttttgttttagtgaaatcttttgaaatggaagtaaaatcttcttgtactgagcgttcttgaggttggtgcgctatgtaaatcctagcttacttacctaatgaaacacttctatcagtaaaagaagagaaacatagttaagtgaaatggatagatagaatattctttcttaattaaaaaaaagggatgtatatttcaaacgacttatcttagattgcgtaagacactttttactggatgaaatctatcttaaccaggattattaatgatcgtcgcgttatttttggcctagtcaacggttatatatgtgtaaaatatccggtcaacgtttttatcatgttttatttagcctcataaaaagttcacgtattaaataactattttttgaaagttcatgtatcaaacgacatttttctcaaaaaatttacgggatagctgtgaaattggggagtgagcgagagccccgcctttgagtttcttcttttggcaccaaaatttttgaaatccccaaattttaggttttcgaatttctctcaaaagctctgaaatttagttttttttttttttggtttaccctttgattcgattctcctttatcactcccatcagctttctcctttattcaccactgtttcagttagtcgtcgtctccacatggcgactgaaaccctagaattgaaaacaccacaactagcagatactgttgctgttaccgagaaggacacagagacgaagaagaaggatgaagtagagaaagatgaggccatggaggagaaaggagaagaaattgatggagaaaaagttaaatcgccggtgactccagtcagtgagagacctataagggagaggaagaggactggccgttacgttatagatactcctcctcgatcctccgggaacaagcctctgtcaattacacaggtataaatatgtaaagttgcttcctttatcaatttttgggttgagttttggacattgaatagttctagtttcgtttggttgtttcagggtcgtggaacacggcttaaggaaattccaaatggtatgttaatttatcacatttggtgatttgggttctttatcttattagatttagatttggtgttactctttgaaagccaaatttagtctgatagagttgttaactgtttcagttgcttataaactgtccaagagaaaacctgatgacaacctcttcttacttcacaccattctttacggcaaaaaagcaaaggtgcttcatttagttatgtataagaaagctgtctcgctctgtttatatgatatgaatattatcttgaagtttcactttttgttcactttttccagagtgaatgattgattactcaagggttgtgttgaaaaatgctgtgcaggcacagatgctaaagaaaaacattggtcagttttcgggttttgtatggtcagagcaagaggtaactgtacaccatctcttagatatttagttccatggatgtgtatgatgatgagccttgttttgagtgtggtatttaaatgttttccaggaggagaagcaaagagcaaaagctaaagagaagcttgataaatgtatcaaagaaaagttgattgatttctgtgatgtgcttgatataccagtaaacaaaagtactgtgaaaaaggtaagtgatatgaatatttggtctatctatatatctatttgtgtctttctcgattatttattcatacatctgtatccttcaggaagaactggctgtaagagtgcttgaatttttggtatgtcccaaagcaacaagggatattctacttgctgatagtgaaaaggtactctaacttagcagctgaatcttgtgactgttcttcattgttttttattcagtatggggtattaaattgctatctcctttctttgaatacatgatgtaggaaactaaaaagcgcaagaagagcacatcgaagaacgtgacctctggagaatcatcacatgtcccagctaaggtttgtaattgttaacctttctcttctttatagtttgtagtcattgacctgatttgtttattctagactcgtggctggtaaaattagctccgtttctagttttgtaatcaagtttgttgttatgaaccattaggtctctatggtatgaatatctttgtctgcgctcccttatcagttactgcaactcacattatgaatgaatttcgagattgcatcaatgcgttataaactggtgttttcttatttcataattttttagttgtacttacagctgccatttggtatgcagtaattattaagcaatgtataataccataatgagaaaatttgggaatagtaggaaatctaagataagttccatggcttggtcacttttaattggctggtttttagtcaacaagggtattattaggccgctcagtgaaagtattttggatagtcttagcactagcttagtacgttatttactcaatggcattcccatgtcttgttatttggtgatcccccatttagctccttgtgtgatatggctttgaaccttctctaaaccgtaagattctgcgagaaaacaaaacatgtggagattctagcaaaagtctctgtctctgcgtggcttgattttatgtgaagaaagttgcataaacaattactgactgtgtctgttattctgtttgatatatacagaggagaaggcaggcgaagaaacaagaacagccaactgagactgaaggaaatggtgagtctgatgttggttccgaaggaacaaatgactctaatggagaagatgatgtagctccagaggaagaaaacaacaaaagtgaagatactgaaactgaagatgagaaagataaagccaaggagaagactaagtcaaccgataagaaacgcttgtcaaaaaggactaagaaggagaaaccagcagctgaagaggagaaatctattaaaggttctgcaaaatctagtcgaaagtccttcagacaagtcgataaatcaactacatcatcaagcaagaagcaaaaggttgataaagacgattcctctaaagagaaaggcaagacacagacaagtaaaccacaggcaaaaggatccaaagatcaaggtttgtttcgaaagcttaaatatcacacattttcatagtgtattgaatctctctatttctttgattgtggccggcacaggacaatcccgaaagaaaggtaaaaaagaacccacaagaaaagaactgcatgtagtggtgaccaaaattctgaaggaagtagacttcaatacggtgagacttcaaaagtttgagaatttacagattataaagcgtatacaaaacctttgaactcaaagacattttgaattttgtttccaaacaggcaactctatctgatattctacggaagcttggtatgtttctgtaaagcttttctcttattctcaatccataatagttatcgtcttccaaatcttcaggaaacgtttatcattgaaacattcttttcctgcttgtgataatactagggagccattttggaattgatcttatgcatagaaaagcagaggtgaaggatatcattacagatgccattaacgaaatgagtgatgatgatgatgagaaagaggaagacacagaggatgaaggtgagaaagagggaaaggactagttttgtctttcttctctttcctacaataagaaaaagaaaacataaccgaagagacggtttaacttaaccttccatgtgtgaatcataggattgtttgtatgtttggtgtaatgtgtaatctgttaggctcatgtagtatcaggtaatgtggttggatactttctggattagaattaatttgagatgtatttgtaaggacttgcaatctttcttcactttagcagcacacaagtgacatggataaatattgttgtgtttcaaaagaggaaaagaagggtcgtccaagagatcagctccaagtcgatcagagagccaataattcctctcaagacacgcccacgaatgaattcacaagtaatctctcgtgttatgggatctattgcacttatttttgattttaagagtcatgttaacttttgtgtcatgtttattttaccaccctataattagcatgttcgtttcgtcaccactggcggttgcggcagcacaccattgacggttcagcaaaacgtttatcataaacattttatttagctcctcaagaagttaaaacgtttatcatgaacatttcagtccctgatcttcttctccatctccaacccatgtttggaaaccatgtgtgcggttctctcaagcttagttctgcactcttctcacgcatttaaaaagttaaaacttcttgaggagctaaataacacaataaaaccacacaatcgacggttcagcagcacaaacaaatagttgaagcgtatgtgacaacaaatatgcttcatatagtgtgcatggtttggttttattgtgttacttattattatacccttattgaacacccgtattttttttttattaataattttgaattgtaacgcttatatctttaagattcttatttttatcatttatacagttttatattatcactttaaataaatctaaataatttttatgtaagttttgaattgatttgagttggagtcgaacaaaaaatcatttgtattaattaaacaaactttattaagtcaattctgaacatttacaaataagccccagttttatagtttgtcatattacctgatgcaattttggtgatgaactaaatgcacgataataagcttttcaccatgaatttttatttttattttagtactttaattgtgtttttaatttattaatcatgtttaaattttatattttatcagatgattattgtgttacttgatttacaagatatttattagtttagaatgccaaagttttttaaattgttttaataattattaatttatgattcataattaatcttatggtcatcattcaataatttgtcttgaaccacatgttttttttacaccgatcaacattatcttgaaccgtttgtaagtttagcgtcttcctatttgtgtagctgttaagtttccaacttttcttaatatatactaattgtacgactggatactttttggatttgagttcatttttgtagatgtctttgtaaggatttttgagcttgcttcttttttggggtctctctatactagtttacaattccacttaaaagagacacaatgatagaaagtaaacagagaagacagtttatcctgcatggaaagtaaacaatgacaacaaacaaaattggatgaaaccactgatttatattatgagatcatctaaaaataaagaaactattttgacccaaaaaaaagttctactaaaattgtaattcatacttataagtgagatcacctgatgtcattgtttccagctatgcttacccgtgtttcaccttcattgtttctagctttgatttccaagtgaatcacctgatgtcatttacagatcccgagtctttctttatactctaccctgcaagtgcaaatctcacacatataatatattaccaattgaaacttcatactccgacgtccgaatatgtgatcaaattattagaggaatgatcaaaaaatgatttttgaacctaatattaaaatttctcttacatatagaaaacatccaactttgacaaatccatgtaatggacccgtaggccgtaacatcaaatatggttagatatcactcttatcgatcaaccaaccaattaccccataaatatatgtatttattcaatcagccgtccataccggtcttaaagtattgaagtagccagttctttagtggtccttattatgttttcgatcacctccttatctctgtagctacataatcttcccttgttaaatacctaaaccctattctccacttaacctccctaaagaacctatatttcacgttatattcttggctctttcacttttcccataaattctgtgcaaaaactcgagtgggccttaagctttatctaccttatctctccagctatacacttgctactcaagataccgctaaccctaatctctactagacccccttaggacttaaaaccctatatatcaaggtctactctctgttttctcgctttctttattcgagccattccatacgtttttcgatttctttcattgaaaaccattgaaatggtcgcctcatctgagttcatcgtcacaaggaaaaaccctgaactcatccctcccgtgtccgaaactccgaatggtcattactatctctcgaatctcgatcaaaacatcgccatcatcgtgaaaacattatattactacaaatcggagtcaagaaccaaccaagaatcctacaatgtgatcaagaaatctctctcagaggttcttgttcattactaccctgtcgccggaaggctgacgatcagtccggaagggaagatcgccgtcaattgcaccggagaaggtgtagtggttgtggaagctgaggctaactgtgggatagatacgatcaaagaggccatctcagagaatagaatggagacgctcgagaaacttgtttacgacgttccaggtgcccggaatattcttgagattccaccggtagtagttcaggtgaggttttgatcgatctcttgcgtactaattactatatttttcgattagcttttacataaacttaggttttgcgggaaaataatgtatttacaatgacggcgacatgcttatagacagcagcaaactagagtagcaaatatcctacataatgttcgggagtaatttgcttattttagccacttgataattgatataaatgatcgcatttaatgtcagaaatgagtttaactttttgagtatcaatcacatgtgattgtccaaaatgtagatttatgggagttttgcttgagaaattcaattatacttatttatatgatatatgacaaaatacttttttgtttgtaatagtaaaatcttaatataaaaaaaaaaatcttaatataaaaatataatccaaaaaaatacaactatatatgtaaatatctaaatcatagtttattttaataacaatctccctgaatatcattgggaaaaatgtcaaaaaaatcacgaactttcaaatttgggatgatttaatcttgaactccacggaagacaaataaatcgtaaagtttttgttgactttcaaaataaataacaaagtttttgttgacttgccatttgagtcatgtcgttaaataggttaacagaattattttacggcgttaatatctcgtgtatctgctctgttagaacaaaacgacatcgtttattgcagagacaaaggaacgtcgttttgtttgttgaaacaaatttaaaccctaaatccccaaatcgatttattatctgcgattttgaggtcaaggtgggtctgtgattttgagataatgaaatcgatttggggatttagggtttaaatttgtttcaagacaaaacgacgatgttttgtctctgcaataaacgacgttgttttgttctaacagagcaaataaacgagacattaacgccgtaaattttttctgttaacctatttaacgacatgactcaaatggcaagtcaacaaacactttgtcatttatttcgaaagtcaacaaaaactttacgatttatttatcttccgtgaagttcaaaattaaatcgtcccaaatttgaaagacatttttcccgaatatcatttatgaattatgatacaatgttactaaaaaaatcatttttatgtctcatgcatgtagtaacgaacacacactaatatagtaacaaatgatcagacgttactcttaaaaactagagtggtcatcatgttcaaactttaaggtacattagaccatctaattagaaccatgcgtaattagtattgttaagtaaccaaaagaaataacgacgatcaatagtaagttttttttttttgtgtgtgtaaccaataggtagtacttaagttaaatgtatattatttcattcctatttctttaaattggtatcgattcattctaaaatgttgcatggattttttttaacatctttagataaagttttatgttccgttttttttttcaggtgacaaatttcaaatgtgggggttttgtcctaggactaggcatgagccacaacatgttcgatggagtcgccgctgcggagttcctcaactcgtggtgcgagatggccaagggtcttcctttatccgtcccaccattcttggaccgtacgattctccggtcacgaaaccctcccaaaatcgagttcccacacaatgaattcgacgaaattgaagatatttccgacaccggaaaaatctacgatgaagaaaaactcatctacaaatcatttcttttcgaacccgaaaagcttgagaagctcaagatcatggcgattgaagaaaataacaataataaggtatcaacatttcaagccttaaccgggtttctttggaaatcaagatgcgaagctctacggtttaaaccggaccaacgggttaagcttctgtttgcggcggatggacggtcaagattcatcccacgtctcccgcaaggatattgcgggaacgggattgtgttaaccggtttggtgacatcatcgggagaattagttgggaaccctctttctcactcggtgggtttggtcaagagactggtggagctggttacggacggcttcatgcggtcggctatggactacttcgaggtgaaccggacacggccgagtatgaacgcgacacttttgattacatcctggtcaaaattgacattgcataaactggatttcggttggggagaaccggttttctctggaccggttggtttaccagggagggaagtgatcttgttcttaccaagtggtgatgatatgaagagtatcaatgtgtttcttggccttcctacttcagctatggaagtgtttgaagagcttatgaagatctgaaaaagaacatacattttcataatcaaattatgatatattctaccaaattataagcaaaggaaaattataatctagtcattatttatacatgttatatttgaattcacgtttgtatccattacaaaaatttatgtaattcgcagaaaatatatatatgtcaaattaagttatcggaccggatcgggtcaaagaaaccggattggttaacaaagtcaaacaaacaaatattgacttgagtttcagattccagtaaaatcaaaccggatcgggtctgaatttaaaccaccgggtcggctccatctaaaatctgaagatcatctccgccttatcttgttgactatctctgtactacttacgagcgcaagtgagagagtaacagagaaacgtagagatatagcaaaatggctgcgacgcttactggatcagggattgctctagggttttcgtgctccgcaaagttctctaagagagcttcttcgtcgtccaaccgtcgctgcatcaagatgtcggtttcggtagaggagaagacgaagaaattcactcttcagaaatctgaggaagctttcaatgctgcgaaggttaggcttttcaatttccatgaattcagtcaataagaaatgtttcttcagattgattacgccttgatgttctgttgctttggttttgtgggatttgatcatatttttggttaaagtgattatctttgttacccttcaaggaacattgctaacaaaataagattacttgagatagaatcataatctgagataaagtttttgtttttattggtttcattctgttctgattattgaaattggtttggttcctttgtgtagaacttaatgcctggaggtgtgaactcacctgtacgtgctttcaaatctgttggtggacaaccagtggtgatggattctgcaaagggctcacgaataagagacattgatggaaatgaatacattgactatgttggatcttggggacctgctataattggtcatgctgatgatgaggtttgtttctttccagttttgatgatttttagatagctgaaagtttagtagttgatacggtgatgtgtctagtgcaggttcttgctgctttggctgagacaatgaagaaaggaacaagctttggtgctccttgtctcttagagaatgttcttgctgagatggtgatttcagctgttccaagtattgaaatggttcggtttgttaactccggtacagaggcatgtatgggtgtgctacgtcttgctcgtgccttcacagggaaacaaaagttcatcaagtttgaaggttgttatcatggtcatgcaaactctttccttgtcaaagcaggtagtggtgtagctactttgggtctacctgactcgcctggggtccccaaagcagctacttcagatactttaacagctccatacaatgatattgctgctgttgagaagctttttgaggcaaacaaaggagagattgctgccatcattcttgaacctgttgttggtaactcgggttttattacacctaaaccagagttcattgagggaatacgccggatcactaaagacaatggtgctcttcttattttcgatgaagtcatgactggttttcgtttagcctatggtggagctcaagaatactttggaatcacacctgacttaacaactcttgggaaaatcatcggtggtggtcttcctgtgggagcatacggtggaagaagagacatcatggaaatggtaaagctagagttgttaacaattgaaccgaataatcttttgaatttgctgcaagagattgagaaagtcctgatcctttatcactcatgtctttttgcaggttgcacccgcaggaccgatgtatcaagctggtacgctaagtggtaatccgttggctatgacagcgggtatacacacgctgaagcggttaagtcagccagggacatatgaatacttagacaagatcacaaaagagcttacaaatgggatactagaagccgggaagaaaaccgggcatgcgatgtgtggcggttacataagcgggatgttcggtttcttcttcacggaaggacccgtctatgatttctcggatgcaaagaagagtgatacagagaagtttggaaagtttttcagaggaatgttggaagaaggtgtctacttggcaccttctcaattcgaggccggttttactagcttggctcacacttcagaagacatccaattcactatcgcagcggccgagaaggttctaagtcggctctaaaatgtctctggaagcttccagggaaccatgaatgtatttgaaattttttgatgtagagaaaattagattcaattgagagcaagcaagcaatctcacaaaatttaactgtggtaagaaaagtcaaaatgtctatgaagatttgttgactttttaaaaagagttcttgctttgcgttaacgtcttacaaatcacacagaatgatttctattgcaacacactttttcatcatgtagccaacatcataatctgagtcataagacgatatatttctccacggaacaagggaagtgcatctgcaaagttaagcttccatattcagttttcttcacatttctatagattcccttgcccatttatgtctttgtccgacctaagacgacctagaaagtggatacacagtccatccaacgagaaagtttcactagtctcctacttcccaaggttacgtctttcatatgtttagttgcatttttctttcttcacatctttgcttctagctgtagtttgttcaatccaaccgaccgagctgcttttcattgtcttaaagaatgaacaagaaacatcctgatgattatgtgaagatgttttggagaccaagctgattcgaactttctttctaattcggacacaattgagttggaattatttgaaattggaaaggcccagtaaggaagtgatccaatattacttgccttagacaaagacttggcccactcagtccatacaaaatattcctttttatttatttaaaaatatgaatactccttgacttaggccaatcaaaatttataattgatattttttgttaaaagaatttatgattgataatgccaatattttctgtattgaaacattttttaaatttttctattttttgttttttttggttatatccgaagagtaatgtgaccacgttaattctcaagtcaaatattatctttcataattagaaaactttatcgtatattattaatattatgtccttaaaataaacagaaaacattaagtatgaccaaaaaaaaaaaagacagaatcatgatggatattttaaatagttttcgttaaatcagaaaataggaaatatacattatccccaatagataattacacaaatttttataaagaagtagagaaactaactccggaaaattaatcctctacttcgcacacttgataaactcagaaaaatacgacagcgtaacggggtacacgtggtggttggtatatcaagttggggtaaagtcaacattaacgtatttttattcatgtagctgctgcggaagaggactgcttgccatgtttaggggtttgtccatcttcaatctcagcccttcgatcatttccgcaggtacacttgttcgcttgacgaaccactgagattggctcaggggatgaaactgtgcctagcttcaacatatcgaggctcacctccggtaacttagcagcttcgacttctttctctcctagatgcggcgacgttttacagtatttgtagacaacgtagagtatcatttggagtgcaccgagagcaaaaccaagcacattcgggaactgcacgaaaaacatttgttgtagtggcaataacataataacattttaatatactcacttttccactttctagcttgtgaataaagtacgttaaaaacgaaataaagtaaagtttatggcaaacttgtgcggcatcgatagaagttacgtacaaaatataatttctatgtaacaataaagataaaaagaacttaatatattatgaacttcttttgcaaaagctaaatcttttaatgtttctgtggaacataaagcgagagtttctttataatttggtttatttttatcgtaaaggacgataccaaacaaaaggttttgctttcattaatcgttttttttatcttttgccaatccatatctctttttatctatgaatctatgattagaacctcaaagtctcaggttcattagaaacaaaagcacccacttcatgtaatatactgttatgataatgatagacatatgattatgatgcttgacgacatgataatcatgttaaaacatatatattcattatagcaaatagagagagatgaaatggcttacagcaacatagatgtccttgagagcaagaccataaaggagccatatgacagcactgatggtaagggttaaggataagctaaagggcatgtactccacacttcttgtctttattaccgtcctctatatataattaaacaaaaatatatatgttaattattattgttaccaaatcataatttaatcacttggtaaattagctatttcgtagtacttacgattatgcttagaggagcagcgaaaacacaaacagagaatccgacacagattcctccgataatcttagcacgtgtggctccttttaccaagaattggcaaagaaggagaatcgcacagaatcctccaaagttcataagaagtagcatcttcactgtcaacatctgcatccattaagaaatgttttatttagcaacttcatttgaataatgttatgaacaacgtaacatgcatgtcatatgaactgaggattaattattagttacccgagctggcttgggagcgtaggcaaggaacatagagatgtagatggtttcgatgaagcaaccaaaggcgttaatggttacgaggaggaagacatctttcttctgtgtcgcatagtaaagccaaagcgtcgcactgaagagcgccacaacataaggaatagactgaaacccttctgttgtcttcttcttccaaatcctatagaacgttggcctgcgtccaaaaaaaaactgaatattagttactcaattatatcggagaatattgatgtaacgtagtcatatatattctgatttgttgcatatatattacttacacaggagataggaacacggcaaaggagataaggttgcctgaaaattatacaagaatatagcaaaaatatgatattaagaaatcgatattaaatctctagaatttagatattagggttgcagaacttgatcaaaaatattcataagaaatgaacacaacgttagtatcataccgagcaagccaaagacaaaggcccatgtgttttcagtgttgaagagactcatggtatataagttgttaggagaaggaagaagaagagagatagcacttagttttgcaagtgttttctcttaatgtaaaagctaatggcacgagcttagtgtttcggggacttcacgtatatataggggttagggctaaagggaggaatggggtttgtgtgggagatggaaaaaggagaaatgtttgtgtgaacaataatattttgaataatgtttgaatttcttatttattttaaaaagcgttaatgtcattgtagttgtataacaaaaaaagacccgcaacaataattcacacgctaaaccattaccaaatcatatacattttgacgtacaaataacaattctgttaccaaataaccttttttaggttttggcttaagaaataaaacataattagttatgttaataatgcttgtcaatctcagctgtttaggcaagctattttcttaaggattatgtctagattctacgtatgcatctctaattctctatatatacaatgacataattatgacctaatcattttacgattttgagggttttcaccaatcctattatttaacttatttacacaacgtaataagtatatttgccaacttcggtttaaaccaatgttttgaaacccgacccggacgatgaaccggactatcttctgggtcactgggtcatcgggtcaaccgggttggaccacgggttaattagttaaaatttatttaataaatttaatactaatagaaattttagagtattttataataaaaaaaatttgtagtatttataaatataaaacaaaaataatcatatcatatttaatcaaatataaaattatattatatttaacaaaatataaaatcatttacacccaaatatatatatatatatatatatatatatatagaaaaaatcaaacaataataataaagtggttaaaaatttgaaatccaataaatgtctaacaccgtaacaaatatattaggagatcatcaatgacagaaataaattaataaaacatcgtgaattaaaacaactaatctcggttgtctctctcaccattcgattcaattttaaggcggtattgtaaagtcatcaacaaaatctaaaacatcaaatgaatttaagaactgaaaaaacttctaaaaataattgaataaagtctaaaatcccatattttattgtaaaatcaagagaactttttaaaacccacacccgaccggttcaactggttcaccgggtcacgggttaattgcgagtttttgtgggttttttcggttttgaacttgttgggttttagcactaaacccaaaccggaaaaatgttcggattacgggttaaccggtcggaccggacggttcgggtcgggcgtgaaaacactggtttaaactaatattttttcttaattagtgattagttcattcacttttattctacatgtttccttatgttgacgcttacgtgatttcgttgctaatttaaaaccaaccaagtaactacaaatgatcaatctgaatgactatataccttgcaaaatcaatttgcatgtgtagcgaaaaattatattttaagttattgtgcgtttagttatatatagatatacaagtaatataaatcgatacaccatataaatatgatgtaatgaattgagaattccactagttctctatcattaaaatatgacgacattctggaatttgctttaataagatatttaaagaaagtgagatttgcaaagtgatctcacttaatttacgttaccaagcaaattagttcacgtgacattgtatgtcaaattattatgccgttttcactttagctctttttaatcctgatattcatgtttctttatagaacaaaacaataattagccgtttctcaatcattattcttttttccgtaccatcgcaataaataacaggatttttcttaaattacacatatataggagttcatagttctttttttttgttgagtgcatagtatagtttgtcaaagtctttttatctatgaaaatcatatgaagttcatgttttatataaaagatagttaaatcttgtcgcaaagttttaatcttttcaagtcattttttcattacgaaaaagtaacatctttcgcgatttatatattataggaaaaagtaaatagctgttggataaaccagaaatacaaaattatagttttgtaaagtatctaatttttagtgtcaaattcagacgagtatgaaaaatgctacgtagggacattaaaatttgatcatttacaaaactataataacatattgtcctagcacatattgtacatatctaaataagaaatacaatgtttagatactaaataatcttaataaatacctaaaataaccaatcattagcgtaataaaaataaactctacttgttattgcatcaatatatatgtctcacatggttatcattttgtaaagtgttcaggttttaggttagttcaattaatatagagcatacactttttcttattgtttttttaaattgctataatatttttcgtcttttcctacaaaacaaccattacttgtttagttatataaaaaaagattagtttttcaataatgtaattatcaacagacaacagacctaaattgatagtatatctcttattacatgtgcataactgtataagactttatgttatgtacatttgattcgttgaagtcgtaactaatctgagaggcaataaaatagtaaacgaatccatttatatagttacccttaactaaatgtgaatcacaatttctcttgtaataaacaaatcctgtaactaattgtatatctttttcgggatcccattttaccttattttaatgttctcttacagtaaatagtttgaacaaagcttaatcaaatattttgtcgggaaacaaaaagtaaatcattttcattaagtcaggcctctccgatccgatgcgtgtggacgtcacgcgcgcattagagatagaaaagctctgttagcgttccaagtggcaaactttaagacagagagtgccaataatacgtataaaccttttcctgttttgccagtagagagatatgtacgtaaccacctttgctttgtcgtcgactcgtcgtacttgtacctgcactgatgcgcacacacatggaaggttttttaatcgcactgatttaaggctcccaagtcaaaaacatatgatcattgccaaattggcaagattatcgaatcaaccaatatagctgattagttaggtttttgtttgttttgtttttataaaaataaatggctaataagttagtttgggagtttgattaattaacttaagtaactggtttaattgggttatgtgactcaaatttgttttgccggtctgtattttagacgtgaatcagaatagtaatatatataacgatgacatttatacgaaaactagactacgtgtttaatttgatcgatgatataagtattagaatataagaaactaataaaatttatcaaaaaacacagtagtaaatcaaggttaatacatatcctatttagcaataattaagcaattttttatagaatgaatgttaaatttattcataaaaaaaaaagttagtgtcacatcgagttcatcattttattttattttgtctctagttttacaatggaaacctaaaatatgaatagtttttcatgttttgttttttcctgagtttcgaagcaaagtgatatataagcaattttcagtattctaattaacacccaacaatgaaattttaaacatcatatatacatagtagtaattatattcttattgaaaatctctttgaggttgtaattcttccattagaggccaaatattttgcaaatgagaaacattatgtggtagcggaaaagaaatgtagtagttttggagcatcggtataatatctataaaacaattaaaaaaatacatttttaccttaacaaaaactatctcatcacttacaatgtaacatttatatatatataatacttgtttgttatatgattcaactccatatagagtatatactgtttctctctaccattttaaccggaaaagatatgtgtcatttatcccgaataggtaattatatgtatgttttgcctaaagttaattttaatctgattcgatatgtatgtattaattggtaacacaaactatataaatttttagtttttagctaaaaaggtaaacttttttaatatagtgcaaaactgtacaaaataataatacataaaaattgtacaattgttttttgaaaataacgtttttaatatcaattctgtgattgtaattatcaaagcgtacacctcatattaaaactatataagattaccattcagacccacactatatattatcagttatcaatgcatttattttcttaattgagcatactgaaatattatatgatgggtacgcttacatagaaatatatattaaatgcattagttatagacttatacttaaattgattgaggccaatgttttgaaacccgacccggacgatgaaccggactatcttctgggttactgggtcatcgggtcaaccgggttggaccacgggttaattagttaaaatttatttaataaatttaatactaatagaaattttagaatattttataataaaaaaaatttgtagtatttataaatataaaacaaaaataatcatatcatatttaatcaaatataaaattatattatatttaacaaaatataaaatcatttacacccaaatatatatatatatatatatatagaaaaaatcaaacaataataataaagtggttaaaaatttgaaatccaataaatgtctaacaccgtaacaaatatattaggagatcatcaatgacagaaataaattaataaaacatcgtgaattaaaacaactaatctcggttgtctctctcaccattcgattcaattttaaggcggtattgtaaagtcatcaacaaaatctaaaacatcaaatgaatttaagaactgaaaaaacttctaaaaataattgaataaagtctaaaatcccatattttattgtaaaatcaagagaactttttaaaacccacacccgaccggttcaactggttcaccgggtcacgggttaattgcgagtttttgtgggttttttcggttttgaacttgttgggttttagcactaaacccaaaccggaaaaatgttcggattacgggttaaccggtcggaccggacggttcgggtcgggcgtgaaaacactgattgaggccatagctatgtctttaaaatttattcggccactaaatagcttttaattcatttgaaatatacagtatgcttttctagacttaacatttttgattatccccttttttgttagtgtcaacaacagttttgattacccccctttttttttgctagtactgtcaacttcagttttgattatctgaatatgtattgaatcaaataatcatgatgattgtctagtccggccgttggagtttatttttaagaaaattatatcaatttaaaaaaattaggatattaaagatgagcatgttcttatttttggtaaatttcatctattcacatgtgtttttaattaactgaataaataaaataccaaattataattgattatatttataatatttgggttggttaatttgattgttcagtttaatccatttggaagcttgtaatctgcgattattttttattttctgaattatttgagattaggtttacgtaatggcttcttgtgattactctgatgtcatgactactttttgttgttggtgttgttaagaatttagtttttgaagatagatccctgaaaatattatgagtgtataaaacacaaatgatagaatatatagtggtgacctctaatataatctcattgtttgttttatggcttaaccattcaatcgatattttacacacatatattaaaatctaaggtttaatattctattcttatttaatactagtagtcactgacttactgtgacgactgacgacaaatgtataagattctatatctaattatctcacgttcccactacaaacaataattgacaacaactccgttatttctacataaatattgtttcatagttttagattcatttagagaaaagctaaaaacaaattcttatttgtcttttcctttctgtggttaaccacctgagtcacgagactcgagtcaaatctcatagctaataagtcaacaactaaatcaagttatctaaaaactaagtcgcttacaattaacatacaaaaacaagtcaattaacataaactactaatataaatacatacaaataatttatattatataaagaaattcatccaaaatataacaataaaaagtctgattgagactttgagaggtattcataattggctacaaatgtaataacgaattaacataaactactacaatacataaaaagcatttctattatagaaaaacaattattctgataaagctt

SEQ ID NO: 86 - DNA, 82912 bp, Arabidopsis thaliana
aagcttccagggaaccatgaatgtatttgaaattttttgatgtagagaaaattagattcaattgagagcaagcaagcaatctcacaaaatttaactgtggtaagaaaagtcaaaatgtctatgaagatttgttgactttttaaaaagagttcttgctttgcgttaacgtcttacaaatcacacagaatgatttctattgcaacacactttttcatcatgtagccaacatcataatctgagtcataagacgatatatttctccacggaacaagggaagtgcatctgcaaagttaagcttccatattcagttttcttcacatttctatagattcccttgcccatttatgtctttgtccgacctaagacgacctagaaagtggatacacagtccatccaacgagaaagtttcactagtctcctacttcccaaggttacgtctttcatatgtttagttgcatttttctttcttcacatctttgcttctagctgtagtttgttcaatccaaccgaccgagctgcttttcattgtcttaaagaatgaacaagaaacatcctgatgattatgtgaagatgttttggagaccaagctgattcgaactttctttctaattcggacacaattgagttggaattatttgaaattggaaaggcccagtaaggaagtgatccaatattacttgccttagacaaagacttggcccactcagtccatacaaaatattcctttttatttatttaaaaatatgaatactccttgacttaggccaatcaaaatttataattgatattttttgttaaaagaatttatgattgataatgccaatattttctgtattgaaacattttttaaatttttctattttttgttttttttggttatatccgaagagtaatgtgaccacgttaattctcaagtcaaatattatctttcataattagaaaactttatcgtatattattaatattatgtccttaaaataaacagaaaacattaagtatgaccaaaaaaaaaaaagacagaatcatgatggatattttaaatagttttcgttaaatcagaaaataggaaatatacattatccccaatagataattacacaaatttttataaagaagtagagaaactaactccggaaaattaatcctctacttcgcacacttgataaactcagaaaaatacgacagcgtaacggggtacacgtggtggttggtatatcaagttggggtaaagtcaacattaacgtatttttattcatgtagctgctgcggaagaggactgcttgccatgtttaggggtttgtccatcttcaatctcagcccttcgatcatttccgcaggtacacttgttcgcttgacgaaccactgagattggctcaggggatgaaactgtgcctagcttcaacatatcgaggctcacctccggtaacttagcagcttcgacttctttctctcctagatgcggcgacgttttacagtatttgtagacaacgtagagtatcatttggagtgcaccgagagcaaaaccaagcacattcgggaactgcacgaaaaacatttgttgtagtggcaataacataataacattttaatatactcacttttccactttctagcttgtgaataaagtacgttaaaaacgaaataaagtaaagtttatggcaaacttgtgcggcatcgatagaagttacgtacaaaatataatttctatgtaacaataaagataaaaagaacttaatatattatgaacttcttttgcaaaagctaaatcttttaatgtttctgtggaacataaagcgagagtttctttataatttggtttatttttatcgtaaaggacgataccaaacaaaaggttttgctttcattaatcgttttttttatcttttgccaatccatatctctttttatctatgaatctatgattagaacctcaaagtctcaggttcattagaaacaaaagcacccacttcatgtaatatactgttatgataatgatagacatatgattatgatgcttgacgacatgataatcatgttaaaacatatatattcattatagcaaatagagagagatgaaatggcttacagcaacatagatgtccttgagagcaagaccataaaggagccatatgacagcactgatggtaagggttaaggataagctaaagggcatgtactccacacttcttgtctttattaccgtcctctatatataattaaacaaaaatatatatgttaattattattgttaccaaatcataatttaatcacttggtaaattagctatttcgtagtacttacgattatgcttagaggagcagcgaaaacacaaacagagaatccgacacagattcctccgataatcttagcacgtgtggctccttttaccaagaattggcaaagaaggagaatcgcacagaatcctccaaagttcataagaagtagcatcttcactgtcaacatctgcatccattaagaaatgttttatttagcaacttcatttgaataatgttatgaacaacgtaacatgcatgtcatatgaactgaggattaattattagttacccgagctggcttgggagcgtaggcaaggaacatagagatgtagatggtttcgatgaagcaaccaaaggcgttaatggttacgaggaggaagacatctttcttctgtgtcgcatagtaaagccaaagcgtcgcactgaagagcgccacaacataaggaatagactgaaacccttctgttgtcttcttcttccaaatcctatagaacgttggcctgcgtccaaaaaaaaactgaatattagttactcaattatatcggagaatattgatgtaacgtagtcatatatattctgatttgttgcatatatattacttacacaggagataggaacacggcaaaggagataaggttgcctgaaaattatacaagaatatagcaaaaatatgatattaagaaatcgatattaaatctctagaatttagatattagggttgcagaacttgatcaaaaatattcataagaaatgaacacaacgttagtatcataccgagcaagccaaagacaaaggcccatgtgttttcagtgttgaagagactcatggtatataagttgttaggagaaggaagaagaagagagatagcacttagttttgcaagtgttttctcttaatgtaaaagctaatggcacgagcttagtgtttcggggacttcacgtatatataggggttagggctaaagggaggaatggggtttgtgtgggagatggaaaaaggagaaatgtttgtgtgaacaataatattttgaataatgtttgaatttcttatttattttaaaaagcgttaatgtcattgtagttgtataacaaaaaaagacccgcaacaataattcacacgctaaaccattaccaaatcatatacattttgacgtacaaataacaattctgttaccaaataaccttttttaggttttggcttaagaaataaaacataattagttatgttaataatgcttgtcaatctcagctgtttaggcaagctattttcttaaggattatgtctagattctacgtatgcatctctaattctctatatatacaatgacataattatgacctaatcattttacgattttgagggttttcaccaatcctattatttaacttatttacacaacgtaataagtatatttgccaacttcggtttaaaccaatgttttgaaacccgacccggacgatgaaccggactatcttctgggtcactgggtcatcgggtcaaccgggttggaccacgggttaattagttaaaatttatttaataaatttaatactaatagaaattttagagtattttataataaaaaaaatttgtagtatttataaatataaaacaaaaataatcatatcatatttaatcaaatataaaattatattatatttaacaaaatataaaatcatttacacccaaatatatatatatatatatatatatatatatagaaaaaatcaaacaataataataaagtggttaaaaatttgaaatccaataaatgtctaacaccgtaacaaatatattaggagatcatcaatgacagaaataaattaataaaacatcgtgaattaaaacaactaatctcggttgtctctctcaccattcgattcaattttaaggcggtattgtaaagtcatcaacaaaatctaaaacatcaaatgaatttaagaactgaaaaaacttctaaaaataattgaataaagtctaaaatcccatattttattgtaaaatcaagagaactttttaaaacccacacccgaccggttcaactggttcaccgggtcacgggttaattgcgagtttttgtgggttttttcggttttgaacttgttgggttttagcactaaacccaaaccggaaaaatgttcggattacgggttaaccggtcggaccggacggttcgggtcgggcgtgaaaacactggtttaaactaatattttttcttaattagtgattagttcattcacttttattctacatgtttccttatgttgacgcttacgtgatttcgttgctaatttaaaaccaaccaagtaactacaaatgatcaatctgaatgactatataccttgcaaaatcaatttgcatgtgtagcgaaaaattatattttaagttattgtgcgtttagttatatatagatatacaagtaatataaatcgatacaccatataaatatgatgtaatgaattgagaattccactagttctctatcattaaaatatgacgacattctggaatttgctttaataagatatttaaagaaagtgagatttgcaaagtgatctcacttaatttacgttaccaagcaaattagttcacgtgacattgtatgtcaaattattatgccgttttcactttagctctttttaatcctgatattcatgtttctttatagaacaaaacaataattagccgtttctcaatcattattcttttttccgtaccatcgcaataaataacaggatttttcttaaattacacatatataggagttcatagttctttttttttgttgagtgcatagtatagtttgtcaaagtctttttatctatgaaaatcatatgaagttcatgttttatataaaagatagttaaatcttgtcgcaaagttttaatcttttcaagtcattttttcattacgaaaaagtaacatctttcgcgatttatatattataggaaaaagtaaatagctgttggataaaccagaaatacaaaattatagttttgtaaagtatctaatttttagtgtcaaattcagacgagtatgaaaaatgctacgtagggacattaaaatttgatcatttacaaaactataataacatattgtcctagcacatattgtacatatctaaataagaaatacaatgtttagatactaaataatcttaataaatacctaaaataaccaatcattagcgtaataaaaataaactctacttgttattgcatcaatatatatgtctcacatggttatcattttgtaaagtgttcaggttttaggttagttcaattaatatagagcatacactttttcttattgtttttttaaattgctataatatttttcgtcttttcctacaaaacaaccattacttgtttagttatataaaaaaagattagtttttcaataatgtaattatcaacagacaacagacctaaattgatagtatatctcttattacatgtgcataactgtataagactttatgttatgtacatttgattcgttgaagtcgtaactaatctgagaggcaataaaatagtaaacgaatccatttatatagttacccttaactaaatgtgaatcacaatttctcttgtaataaacaaatcctgtaactaattgtatatctttttcgggatcccattttaccttattttaatgttctcttacagtaaatagtttgaacaaagcttaatcaaatattttgtcgggaaacaaaaagtaaatcattttcattaagtcaggcctctccgatccgatgcgtgtggacgtcacgcgcgcattagagatagaaaagctctgttagcgttccaagtggcaaactttaagacagagagtgccaataatacgtataaaccttttcctgttttgccagtagagagatatgtacgtaaccacctttgctttgtcgtcgactcgtcgtacttgtacctgcactgatgcgcacacacatggaaggttttttaatcgcactgatttaaggctcccaagtcaaaaacatatgatcattgccaaattggcaagattatcgaatcaaccaatatagctgattagttaggtttttgtttgttttgtttttataaaaataaatggctaataagttagtttgggagtttgattaattaacttaagtaactggtttaattgggttatgtgactcaaatttgttttgccggtctgtattttagacgtgaatcagaatagtaatatatataacgatgacatttatacgaaaactagactacgtgtttaatttgatcgatgatataagtattagaatataagaaactaataaaatttatcaaaaaacacagtagtaaatcaaggttaatacatatcctatttagcaataattaagcaattttttatagaatgaatgttaaatttattcataaaaaaaaaagttagtgtcacatcgagttcatcattttattttattttgtctctagttttacaatggaaacctaaaatatgaatagtttttcatgttttgttttttcctgagtttcgaagcaaagtgatatataagcaattttcagtattctaattaacacccaacaatgaaattttaaacatcatatatacatagtagtaattatattcttattgaaaatctctttgaggttgtaattcttccattagaggccaaatattttgcaaatgagaaacattatgtggtagcggaaaagaaatgtagtagttttggagcatcggtataatatctataaaacaattaaaaaaatacatttttaccttaacaaaaactatctcatcacttacaatgtaacatttatatatatataatacttgtttgttatatgattcaactccatatagagtatatactgtttctctctaccattttaaccggaaaagatatgtgtcatttatcccgaataggtaattatatgtatgttttgcctaaagttaattttaatctgattcgatatgtatgtattaattggtaacacaaactatataaatttttagtttttagctaaaaaggtaaacttttttaatatagtgcaaaactgtacaaaataataatacataaaaattgtacaattgttttttgaaaataacgtttttaatatcaattctgtgattgtaattatcaaagcgtacacctcatattaaaactatataagattaccattcagacccacactatatattatcagttatcaatgcatttattttcttaattgagcatactgaaatattatatgatgggtacgcttacatagaaatatatattaaatgcattagttatagacttatacttaaattgattgaggccaatgttttgaaacccgacccggacgatgaaccggactatcttctgggttactgggtcatcgggtcaaccgggttggaccacgggttaattagttaaaatttatttaataaatttaatactaatagaaattttagaatattttataataaaaaaaatttgtagtatttataaatataaaacaaaaataatcatatcatatttaatcaaatataaaattatattatatttaacaaaatataaaatcatttacacccaaatatatatatatatatatatatagaaaaaatcaaacaataataataaagtggttaaaaatttgaaatccaataaatgtctaacaccgtaacaaatatattaggagatcatcaatgacagaaataaattaataaaacatcgtgaattaaaacaactaatctcggttgtctctctcaccattcgattcaattttaaggcggtattgtaaagtcatcaacaaaatctaaaacatcaaatgaatttaagaactgaaaaaacttctaaaaataattgaataaagtctaaaatcccatattttattgtaaaatcaagagaactttttaaaacccacacccgaccggttcaactggttcaccgggtcacgggttaattgcgagtttttgtgggttttttcggttttgaacttgttgggttttagcactaaacccaaaccggaaaaatgttcggattacgggttaaccggtcggaccggacggttcgggtcgggcgtgaaaacactgattgaggccatagctatgtctttaaaatttattcggccactaaatagcttttaattcatttgaaatatacagtatgcttttctagacttaacatttttgattatccccttttttgttagtgtcaacaacagttttgattacccccctttttttttgctagtactgtcaacttcagttttgattatctgaatatgtattgaatcaaataatcatgatgattgtctagtccggccgttggagtttatttttaagaaaattatatcaatttaaaaaaattaggatattaaagatgagcatgttcttatttttggtaaatttcatctattcacatgtgtttttaattaactgaataaataaaataccaaattataattgattatatttataatatttgggttggttaatttgattgttcagtttaatccatttggaagcttgtaatctgcgattattttttattttctgaattatttgagattaggtttacgtaatggcttcttgtgattactctgatgtcatgactactttttgttgttggtgttgttaagaatttagtttttgaagatagatccctgaaaatattatgagtgtataaaacacaaatgatagaatatatagtggtgacctctaatataatctcattgtttgttttatggcttaaccattcaatcgatattttacacacatatattaaaatctaaggtttaatattctattcttatttaatactagtagtcactgacttactgtgacgactgacgacaaatgtataagattctatatctaattatctcacgttcccactacaaacaataattgacaacaactccgttatttctacataaatattgtttcatagttttagattcatttagagaaaagctaaaaacaaattcttatttgtcttttcctttctgtggttaaccacctgagtcacgagactcgagtcaaatctcatagctaataagtcaacaactaaatcaagttatctaaaaactaagtcgcttacaattaacatacaaaaacaagtcaattaacataaactactaatataaatacatacaaataatttatattatataaagaaattcatccaaaatataacaataaaaagtctgattgagactttgagaggtattcataattggctacaaatgtaataacgaattaacataaactactacaatacataaaaagcatttctattatagaaaaacaattattctgataaagctttgacattttattttaaaataaagttatagaataactaattgaaatatatattttaggatatttaatttggagcattttttctacatacaatagtttgctcaatatatatttcatggacttaacaatatatacatatcagataatatttaactgaagatgctgaaatttcgtgttgatttttagatatatattctcattaattttaaagataagtttttaaattaattttcttttaactgcgtgctacagtgctactgcaaacgtttgagaaaccaaaacttttaatttagagcattttagaacaatatggaatgatacgaaccatttattatgattgaagtcaaaaaccttaaacatttgcaaatgattgcatgaaaaaccatgaaacccttacctctgaattaaataagttcaatgatgtgtcaattaatctcttactcactggtaaacttcggaaacagagatatatataaatcacaaataaaaagaaatttatgcaagaaatattgaaacaaaactatcaaaccgttttctctatcacttgtcaattccttaaaataataattccatatacagtttatttggactgaatctcagacaaccaaaattagtatcactagatccaaatttatggtaaaccaacttagattttaatattttatttaattagggttttaggcttttagcttgtcgccattagataatttttcaaaattgcataatttgacctatgaattacgtagaccaacttgtgcttcattaatatacacatgcaacacaaacatacgtatacatatcagatttatatgcaaaagttgattaagatgaaaaatcgttgtcccataattggttacgtttccaaattccaacctcctccaccatccaagcaccacttggaaagttcatacaacttgagccattgctttaaagaaaggccacacaccaaatttcctttaaaactctttttctattctaagataattcatagcaatattaagaattgttattatttgtgatgatagatattctgctaaattaattaaatgtagtggattagtcctcatctaataatatctttcaaatcatgatttatgtaaaatacatataaaaaatttaactacaagaaatataaaattgtgttctttagggggtgttattcgttaataaattttaatagaattgaaatccaacactaatccactgttattcaactaatgattctaaatccagctttaaaatctagtgttattggaactcatatttgtaaatcatgcttaatagattttaaagtttggtgttattcaattaagattttaaatatttcattaaaatctaatgttattcaaaattaaaagacttgtaaaatctttgtatattaattgatttgaaatgaaacctctttggagtttcatgagtaaatcattagaatcaaaaatccaagacatattgtagagattttgaaagtcatacaaacatattcttaaaagcaatatcagaaaacaaatctaaggtggtgttattcaattatggagttaaagtcaattctttaagctttagatttgttttctgatattgctttttaaaaaatgtttgtatgaatttcaaaatctctgcaatatgtcttggatttcaattctaataaaatactcgtgaaactctaaagaagtttcatttcaaatgaattaatatacaaggattttacaagtttttaagttttgaataacactggattttaatgaaatatttaaaatcttaattgaataacactaaactttaaaatctattaagcatgatttacaaagatgagttccaataacactagattttaaaactggatttagaatcattagttgaataacagtggattagtgttggatttcaattctattaaaatccattaactaataacaccccctaaaacttaaagaattgactttaactccataattgaataacaccaccttattcttgagatttttcataaaatattgtttatatgtattatttttcaaaactaccttaagtaaaaataagaaaacatgtagccttagctacaaatagcaatatatctgatcaataattatcctaaacctttcttattttttgttttatttattaaataaattaaaaactgaactgacaaaatggcaaaattaagagaaaacactaatttggaaacttaagaaacactaattttaaaaaaaaaaaaaaatcacaattttttattaagaattttatatgaaatctttctagatatagaagccatattaagttttttaaccccttttcataaggaaagctggctgtatgatttttttttttgtaacttatgaaagatttaaaacttctctattcgctctgcccaaaaacgttgtggtatttttttttgtggaaaaacatattttatgtaatatatattcttcaggaaaaactaatgcttccatgctgaaaaaaaaattaaaaaccacttgacaccgaacatcgtattgtaaaagcaagtaagcaacaacataatgaacaaaaagattcacccattgttatgtcaaaccgccacgttggtccaaacaatcatataattatatgtgacataaattaagtgagtaaaaaattagggtcatggccgaggtaagtaacacttttagagacaatttttccctgataatctactaacgagtaacaagaattttcaaatttgattgacggaaacagtttttaggtgagaaaactacggttcacaagtgataaaagttcatgttgctaagtattattcatcacgagtatgtggttatataaaatataaattcttgaacttattaaagagtcattaattatctaaaactattcaaaacattagaacctcttatcaattaattgtttgataagtttctaaaacattagaaatttttgttgatctatcttctttttttcaagcaaaaccgaaaatgattttcagaacaaaaatatataatacaactttgtgaaattaacataagtttgtaaattgtaacataaaattttacaaaatactagtattttagctgcaaaaatggtaagtatgattaataggactagttcgtcatagtatttactactagctctcttgatttcttttgtttcctcccctaattctgatgactaaatttttgtcaacgcatgggtaaacaaccatttgagccgtcaaacacaacaatgactcagataaattagtttaagaaataaaaaaatcagtaagccgtttatttagcatttgagttcgtaaattttaatgaaatttttcaaaacaggatatttccagctcgttatactagttattttgaagatttttctacgagatcatgtctcttttgtcaattttttttcttctaataaagacggaattcggattgccggatggccgaaaaataatgaatacaaatgataaattagttaaaagaaaaaaaaattaaaaaagcaaaagaagagaagaggagacacaacaacaaaaatgtggctcttctattgtacgtagttgctctcagcctcctccatccaatctccttcttgccatattttttccactttcggtatctaatttctctatctttccattttcatttttaaaaataaacatttatcaaccaacttgcatcctattcgtatgaagatacatacataagtggtgtcggtgttgtttgcattcataaaagaatatcaaaaaaaaaatgttgtctgaaattttaatccgtaattatcattttataaggttatttaggcatataaccaaaattctatatcataattatgtatatgatatgatgacaaaatatgtaaacagaacgaatataagtttttcgtggaaggtttttttcacttttgtgaaattgtttaattatgataaaagtgcattattgattaaattgcatgccataaaaagagattaatttctacaattacctgtaaaacgcttactgtcaattggtaattaaccaagacataattgtttacctttttaaaatggataaatttcatctacttaatttataagaatatctcgggtatcatatataatgtatgtatatatattctaagttttatatttaaaaatagtacacgaaaacatataaaccaaagcatattattgcaattgacttagtaaaattgattaggaatttttgaaaacaagatatttccatctcattatactagtgtgtatatatatatcctactgaaatttatgcaaattttgatacttgctagaatcaatctaatagttttccaacataatcccgcaagttacgttagacattgattgatcacattaacaaaatatatatatatatatatatatatatatatgtatatattaatgattgactcaatgtaaatcatacaattacttttcattccaatacaatggaaagaactactcgaaacagtgaaattccattaatttgttatagtgatgactgatgtcatcattggttttttactccaacctttttggcaaatcatggctaaccatgtccatcgagactcgtgatgtgcgagttcgtttcatggaaaaatcatatttttataagatacgaaaatgaaaaggaaaataagcaattatcaaacaaaaagagaaacaaacatccatgaagatagcgatcacgtcggctttatctagagatcgtataaaaagagaaagattaaaagagagattggagaggatatgatatgattggccacatttgttattgccacttaataaaatggattattttttcatctttaaaaatgagttgtgtcaagtttcttcttctttccatgcagcccctaacctcatatacgtagtcggataagaaaattcatttgattttatatcttgaacttacgaaaactttgttatctttgaatagaatcagtaatcacataagtggaaatgttgtactatagaacaagtttttgggtgcgagttagatatatattaatatatttttttaaaaacgtaatcgccataatagtttaaaagaccaattcatttttatatatttattcaaaaacaaagtattttcttaaactttaaaatcaagcaaagttattatatgaaaaagagttaaatcgaatgatatttttccattctttactacacgtacgtaccaatattgacttttacttcttcgtacatatattgagtcttttttatgatgacggcgtagatgtgagtcatgtgaccattgtcatccgtacactactagattccaatggaactgaagttgccattgaaggactttgcaatgaatgattataatttagaactaagaattaaactttggtagagaaaccacacaagtagaagtgtagaaccatcatgttcagcagttatttaatcgaatttgcaccaaactctagatacattcatgatcgataccgtaggtataagttcttataatatttttttcacgattacggtttcattagagggaaattactttgaaaagttgtgtattttagtacacattttgaactttacatatataattgatttagtgtgaagaataacagttgtgttaaatcaaactcaaaatgaaaaaaaggctttcggcttctttttgcaattcatttatacatgcaatgtatttttttcgttttaccccaacaaaaataaaaaatgtggctgcttcgatttgcacaagccaaatcgatcacaactataaactgacgtctgacccaaactcgtgccctatttgctatttgatactgttttcataggtatttgactgaaacaaaattaatttaaaatcattgttttccttattttaaaagaaatatgttaagagatttattaatcatcgtttgggataagactatacatataagtaccaagttgttgttttattttatttttatttaatcttatacttgttcgcatgatagagaaattattgaaggctttattagcctttctatgagtgaacattccactcttcttgaaagagaacaagatagataatatcacagctttgttttttttttctattcaattcttttctctcctttttcttttgtttttagtttttaatatttcttcttttcttattgcgttaagaagaacatatctgatttttatggtcttccccaaatttggtgcaacacttggcaacttgggtagttgcatactttttactcatctttcctaattttcaaatctttttttttgggtgtgcatataaacattgaataataatatataactgtgtatatttatttgctagaataaaataatatagatgactaattaagaaagaagacaattaacatttaaaattatttttgcctttttattattttaatcttcacaatttagtaatggaacatattacacaaaatttatatttatgcattatccagatatcatattgcctttaatgattaggaaattcttgttagaaacgaaattctaaaataaataaaacacactcgtcatccattaagggcaaaacgtttaaaagatttcttgtcttgtgtacagttggccggcagctttggtgcaccaatttttgtccctcttttttcccattgttattatgctattaatttatctcctaaaagattatgaaatcatacatatttacacgtaaaccacattctcttaatttagctagtattttagttaagagtgtaatctcttaaatgcattacgataatatttttctaagtgtgcagatagtatatatagaaacaaagtcttatctactcgtaaactaattcacattaactactacttgagattaaaccaatataagtttgcttcggtttgaaacaaaacaagagcttgccactttgttgcgttttgacagttcttctcatggttaatattttttgatcttaaatgaaaaagtatgatattgaataatccctatatcttagataaaccttaaaaaggtatagcttatgtagtcaacagtttatagtaagaggcctataggagtttatacaaaatttatacggattaatgtaactcactatctcatgtactatgaaatatcattaaggaaacaaacagttttcgatttttgttgttgatgttaatttgctcatttttcatactaaaaacgactttgcattgtatttagggatatttgagatattgaattattttttttcgtttccaaggagagtctctttttagtgttaataatgacatatcctattgcctaggggccttgcttggcaactagagaggaaatatcgaaatcttcttcttcctttcatttcccttttcttttttcttttttttctttctttgttttattttcccttttctttttcagtacagttgttttcgatatatatatatatatataattataatgatgtaatgagaaaattattgattttggtgaaatatcaaaatatctatatgattttcaaggttgacaagcgcatgagatttagttatgatattttagcagtaaagttatgtctacatttcataaatgtgtccgagtatttgctatttttagcatataagattaagccaaaaactcatatttttaaacgtaatacaaaaaatgacaataaagtgtatatatagatgtttatgtttttttttactaaacaataaaaataaatagaagggaaattaattaatactatattgtaattgttctcttatatcactttaaaaaatgaaaaaaatatggtcacggttaaaaaaatgagtttataggaagaaatggtaaatgttttttcaaaaactagttttatagattttagaaagaaattaaaaccaattttctaaaattgtaaatggatagttaagtaattaatttctacgaaaatataaaaccaatacactttaatttaaaactatactattcgtaaaagtgttatgtagtgtctcatttagctactctagatgaatttattttcttgttaatcgttttcagtaaccggtatataaataaaagtttcgtatgtgaaccactcggttctatggtgtagtggttagcactctggactttgaatccagcgacctgggttcgactcccggtaggacctttttttgctgattgactatttttttttgtcactgccatgtttcttttttctttgagactttgacgacatttcaattattttttttgtttgggccttcaacttctgttttttttttgtcaggacttacgacccaatacttacaagggtgatttgtagatatagcactttttcactaaataattaactaactaacaccataaatttaaaaatgtagtaaataaccttcaaggggtgtgaaaagacatcactgtcctgctgttacgtttggcagcgaagaaggagaatgtttagtgtgagctgacgtggctttattattggtgttgaggtgagaaaagaaatcaggtggtaggatagaagttccattttctcttacttttttctttaccccttcccaattgtaattcatattatctgatcttaaaaaatttaattcaagttcatgatatatcaattaaaaagttgtatagttttctacatatatcatgacttaaatttttgaaaacaaacataaaataatttagatgtgaatagtgttgtcaatgaataacataaagttctatatagataaacaatatttttttatagaaagatattaaaccctaaaggataatatatagagaacccaagagtttaaatctaaaccaataattaaatcacttaacatccttaatcaaaacaaataattcattttaaaacgtatataaaacaaagtatacgtaaatagtatatttacaaatagaatagtatctctcaaattgcaacaacgaaactcaatttcatcaccaagacaccaagcgcaacaacgaaagtcgattccctgaatccaaattgtgttcctccctctgtaattcgaaacccccaaatcaaatctcacccaaaagtaattaagagactctgatttgaaaacaaaaacaagtaacgaggtaggtgtaaagactttactgggagaaagagagagggagagggaaaaagaaagagagagaaagagagagggggagagagagaaagagggagggaagatagaagggaagagagaggtagacggaaagagaaatggagaaaaatagataaaggggtaaacttggaattaatatacaaaatatagaggatatcagttctttttccttttgatgttagtttcttaattataaactttttgttggttagttttgccaattcccttacttacaactgataaccgtatagctcttttatcagaaaaaactttatatatctaatctcccaaaatatacaaatgtgagaaatatctgaaaataaatcaattctcaccaattatatatatttgattacttaaaaatgttaatatatggcagttgcttgttcagagaataacttaaaaaattgatcacgagatcggcttatgtttaatatttttgaactcttgggataaaagttttgaagatatatatatcgtagaaaagttttgtgttctttaattagttacaaaattttgagttttttttttttctttcataaagtatcagaatatcagggtgatttattgaatagtttattttttctcgttctactcacgttattcttgcaagtattaattttggtttgtttataaaaaaagtatttggaaattttatgtgagcaagtgcgaaataaacgaggattttgggaagtatttttttttttgtaaaatcggttatattgaacgttatactatatatattattatataaatataactgctaaagactaaatttagatactaaaatcagcattgatgaagatccacatgaataagactcgtctcttaactcaacatttaacatatgattttcatattattgatcatttatctttgtgttggtccaaggtgccagactttattatttacattaaatgttgagttgtttactgacatattttttaattaaaacaactttcatattattgcccatttatattttggttggtcctccaaagacttacaggatacatatgtttctccattttcatttttatgatctaaaacgtctttttctaacttagattctaaatggttacagcaaaccggacatacaattttgcttgtcaaatggatcgttgagatagacaacaatccaatgtaaaaccaaaactcttgatttataattggtctgcaatgatttttttttggttcatataccattttataagatagcaaaccattttcatcataaaagatatatttttttatcattgaataccaatcaaacccggtataataaataaaattgtaccaaattaatgcggttaggtaaattcaatttattggaaattaaagaagagaaaaaaaaaataacgaacaaaatttccttgacacaaaaaaaaaaaaagaagaaagaaaaaacccttactctcaattagtcaatccccttccctagtcctcctctcttcaagcttttcacagaaaaccaccacccttctctctctactgcctttttaccacagagaagagagaggatccgtcggtgtgctagtctcactgacactacatccgatcgtcgccggtaagttgatttcgttactctccgatcaatttcttttccggaggaggaacttgttttccgtgcgaaattctgacttgaactttgttgtcaattcatcaaacgctttatcttttctccatcttcaattatcttactgcttcgtcgctgatctctacttgttttcctccgttttgcattttcagtggcgtttcttagtgtttcactagatttagactggttttgcttgtgtgcattttgtcatcagtgtttatgattgttcgctttagctctatgtttctatggatttgataatatatgagttcgctgctctggattcagctggcttgtttgattgttcattttcataattctgtccaaagaatcaaatccacagtagctcggatctgagattgatttgtttctttgcgtctttgtgtagatttgactttaattttgagattgttgtgtgctgatatacagcttaattaatatagcctctgatgtgttattatcgatgtgtcattatcaatctacaggtgacattttataagtgtggagtttacttcagctttattattcaggaattgatggatcaggttggtgtaaatagttgtttcagttcttactcttttgacgagagtctctgttaatgtgctcttattaatgcagtacgagaaagttgagaagattggtgaaggaacttacggtgtggtttataaggcacgtgacaaagtgactaatgagacaattgctttgaagaagatcaggctagagcaggaggatgaaggtgttcctagcacagcaatcagagaaatctccctcttgaaagaaatgcagcacagcaacattgtcaagtatgatgttaataccattgttgaaaactgattcagcatgatgactctggtaaacaattttgattgatgttttttgctacacagattgcaggatgtggtgcacagcgagaaacgtttgtatctggtttttgagtatcttgacttggatctcaaaaagcacatggattctactcctgatttctccaaggatctacatatgatcaaagtgagtgctaagaaactttaggcattgttttatatatgtgcttaaactcaatactcaatataagctgatcagagctgttcatccactattttcagacatatctttaccagattctccgtggaattgcgtattgccactctcatagggttctccatcgtgatctgaagccacagaatttgttgattgatcgccgcacaaactcactgaagcttgctgattttggactggccagagcattcggtatccctgtcaggacatttactcatgaggtaccaaagagctttattccttgttcatatgttcccgttatgaaatcttttggctggctgcattccttatgagtgtaatgtaaattaagtattataccacttatgtgtctgataaatgtgatgaaaaggactaagccatttcacatagacggttgaagtaagctagttcaagatactgtaaaatatttcaatgctacatccagatttcagatctcttcctggttattcacacaatttttgcatattgttcctttaggttgttactctctggtaccgagcaccagagatactcctaggatctcatcattactctacacctgttgatatttggtctgtggggtgcatatttgctgagatgatcagccaaaagcccttatttcctggagactccgagattgatcaactcttcaagattttcaggtttaattgctaacttccccagtccaatattcctctatatattacaagtgcaaagacttgtctgcaatgatatcacaagggattgtggaaacattttcaacttgatatcacattttggagaagtagtaaaggacacagaaattgaattgttaactgattataaatctgttactgccttgttttgttgtcttcttctagaatcatgggaactccgtacgaggatacatggcgtggggtaacttctctaccggattataaatctgctttccctaaatggaaaccaacggtacttcaaatgtctttattcgcttgtacatcttgtcttcagtagtcaagagttcacaacatatattaattcttgcccttgtttttttttcttataccacaggacctagaaacttttgtccccaatctagatcccgatggagtcgatctcctttctgtaagttcactgagctagatatatacacacacatatatagacacactacttctgctattagagacctgtatgcttgattgtgatggatctggtctcatgtttcttactaaaaaccttttaaccatttgaggttttagatgtcttataaagtcatcaagagccggcgtactaaaaccaattcgattaggcttcatagtttcaaaaccacatgaagccaaaaccaaacttgtttgaaatatgaacaatcttcaaaaaccaggattcttgaaattcctaaccaaaccagacatctggatagaaatctaagattttgagctcctgtgaaagcaaagatgataatatatctctctgcttgatttgtttcagaaaatgctgttaatggatccgaccaaaagaatcaacgcaagagccgccctggagcatgaatacttcaaggatcttggaggcatgccttagaaaggcataaaaccagtaatctccttcattctatatataattatcaatcctaagaaaatgaagaacaatattaatgggttttgtttattctttttctgagttcgtttcctacttatattctattacgaaaaaaaagaaagaagaagatttcgagtgtgtttttttttacttctaagcttttgagatcagtttcttgtatcttattttacccagaatatagtatttccctatatgaaatatggtttttgttttgcaaaatgaccatattatgcaacttctcagcttcttgattgtgccttgatagtgatcttttgaaatatatcccaaaaaacatcacttttttcgatttcattagtacttatttacgagttacgacgtcatttgataactagtatatatggtccgtcgatcttaatttcctatttataaagggtgcaccgtttttaatgagacaagagggtccaagtagccaatcattaatgagaccaaagttgaccagaaaaagctgacaaataaattgacgagaagaacaattcaacacgtattcgatagtttggattacattttacagttggtcgaaattcgaagtagatcaaatgtcaataatctaattcgaaactaaatgaaggtacctgataaccatttcagtgttagttagcagtggtttcaatctattcactaagcaaagacgcttccattctgaaaatcaagtccaatgggaggcataaacttaagtgtctgaaaaactcaaaaaagcatagcctcgtgtaaaatagaccgatctatttattcatgaatatatgtatgattatcaaagtgcatttatactttttacgttttaaaatttcgtatataaactttccttagtgaatattataacataatttctaatgaaaacttgttatatattattattttatatatatttttgccaagagttattatcattttaaagttttagacatttttacttattgttgcagagcgcattttctcttacaatttatctattaatcaataaaataattatagacctttttaaaagataaatagtaattagtatataaagttatatttaacaatagtgtattaatcataaaatcaaaatactaaaaaaaaaaatcaaattcaacagaaataaatagcacattaatgataaaatcagaataattttattaaatcaaattcaacagcaatatgtcaccccaaaaactatatacttattaatttcaatcagtttcattgtcatttacctaattagtttaaaatatatagaaaattataaacgtgtaatgtcaagactgattcctcaaaaaaaaaaacccttactgaatctattacacatcaattattctgtaacagaaagaaaaaaaaatcattaactaattaccataaactccattagaaactgatatctttgaaattagttgactcgtaaaaagggaaagctgcattattaagaaacaaaaaacataattctctttctctgttccctcaagtcaataattccttttttgatttttattttctaaaccaaatttattgctctgaagactttgtttgtgtagcaaaaaaaaacgcgattttttttctgggtttcttccgatgttagatttgcagccgtcagatcggcgtcatggagctccgagtagtagcggcggtgttagtggtggtgatgagctgatcagaacttataaaggctggaaaggcaataacgtgagcttcttcttcttcttcttctttatctcttttatgattggtttttgtttttctgggtcagatttaatgtctttgaataagatctgaatcaaaaatcctaagcctttttggtggaattactcagaagttgtggaataatcattctctctgtttttttgctgggtttggtcatattttcagaagtttagagtaataagtttgacttgtatgtataccctaattttgagatttggtcttgtttacgctgtcaaagatgctggtctctttcaaaattagagctttttgatgtttaacacaagtttgagtaaagatttacctagatgtgtgatcacatagttacaagagtctttaagttgttaattcaactagatttgtaacatttgtcaatatgttactgatctttgatttattcttttttgtgtctccaggtgttcttccttggaggaaggctcgtgtttggacctgatgctcgatctattctcatcaccgtcttcttaattacagctcctgtcattgtattctgtatttttgttggcagaaaatttatcgatgattttcctcaccatagaggagtatcagttttagctgttgctgttggtctgattttattagtgagttcctttttctcatgaatgtttgttcccttctgattctgattcagctctctactgcaacctttttactcttggcatcttgataataaaggtttagtatttgtttgtctacaggatctagtatttcttcttctaacctccgcgagagacccagggataataccacgtaatctgtatcctcctgaaccagagagtaatgaaggcaatggagaaccacgtcttgctcatactcctcagagtcggttgcctcggacaaaggatatgattgtaaatggaattactgtcaagatcaaatactgtgacacatgcatgctttacagaccgccccgtgcttctcattgttcgatttgcaacaactgcgtcgagaagtttgatcaccactgtccttggcttggtcagtgcattggattggtaatggatattttttttcctcatcaaaaaccaattacaattgcatatacctagacgattcaagagtaactaacagttatttgggggttttgattgcagagaaactataggttctacttcatgtttgtgttgtgctcaactcttctctgcatttatgtccatgtgttctgctggatctacgtcaagcggataatggatagtgagaacataaacatctggaaatcgtttctcaagactcctgcttccattgcactaataatctacactttcatttgcgtctggtttgttggtgggcttacctgtttccacttgtacctaatgagtaccaatcaggtaaaaatcattactctctaaaagctccttgttttgaaactgttggataatttagctacttgttaacattgtttctctgttgtttattatgttgtgatttggcagtcaacttacgaaaactttaggtatcggtatgatagacatgagaaccccttcaacaaaggaatagtggggaactttatggaagttttctgcacaaatgttgccgtatctcagaacagtttcagagaaaaggtttcaaaggagccagcaataccaccaaggacagtaaatggagggatgtcaagcccgagcttacagaaagtttccaacgacatagagatggggagaaaaccagtgtggcacgagacagtagaagaagagctcggtgacatcgaaaaggacatggaagcaggggttgcatcacgggatttgagcagaatgcttcctccagaagaatctgaaggacgagggattatgcattcaagagagtcaagcaggggacgcgggattatgcattcaagagagtcaagcaggggaagaagaggagggagctgggaattgtcaagccgtgtaaacgaagatttaagaaccagagatgagtctgtgtcaagagtcggtgaagacagctcagagtcttcagacaatgatgcttcaagagatttacatgttgagatatatgatgcagtaacaagtagaggaagaaccggaactggtatagggcggttatagtctccggtttaaagccaattacactaagaaaaaaggttactgaaaaaagtaaggagattcaagattgtgattcaggtttgtttgtttatttacgacattgtaacgtgtttgtgtaaagtatttgttcaaaggataaaagctttcaaaattgctggaaaatgaaacaactcaaatatttcattttgaaatagaaactttaaaagagtcattatgttgaggtgggtaaaagagcctaatgcagcctgaaaccaaattgagctgctgcccacatgaagtccgaatttgaaaaatatgatgtgtttcgagttctagtgggttaaacccgataaatagaacgatattttttgatgtaaactacctaaaatatgctaacaatcaagagtttttatggcactgatcaaaatgattacattatattggttacagttattaactagccatactataatctccgaaaatgttactaaatggaaacaccaaaagccaaacgcaaattgatcaaagttttctactgttcttcattacttcaaattattcaacataagacataagttcgcaagaaaacttctacactcttcacatactcagcaatagatgatagatacctggatgaacctgcaacatacaaaaaagttaaaatgaaagtcagatacatcaacaaaaaccagtactaatcgagttgtcattctcagtccagttttcagaattgtcttacatgatataatgctagaatctcatactcctgacctccttgctccttgctatcgtatcctcatcatcaccaaacttgaagataaatgtactagctattactgcaaacaccaaatgcaaaactttatttctgagactaataaaacctgagatatcaaactttgttgcactaaaagagtaacaatttcaactactagagctatgcattttactatttgtgctaagacaaaagaacagagttttaatcacagagaggcagaggaaacatacttgatcaagaccaaactccaagaaacgttgcaggttatgtcttgagtagacaaaataaatagagactagccatagagaatacttgtgatagaagaagaaatctgcaaaagagaagataaaatattcttacttttacagaagcagaataaattaacagaggacaagtaccaaaacactgaaccatatcgacataccttagtttacttgagagaactcatctgagattagtttctcatcttcttcatagacctgaaggttcttagacttcataagaaactctaaagcctcttcatcaaactcaaccaagtaagccatcttcacaagctctgataaccgtccgatcagatcctctctctcccacatcacacccttagcaatcacctcagcgaaacacgtggcgtactccaaaagctttcttttaccacaagttttctccatcttctctgcataaaccactcctttctccctttcccatcttatcatcctcttagcctttgcaatcagcttctctccctttgaaggtagactcagagtatactccgttgtgatagtctccgaagtttctttaacgtcgatgtcaacaaggctatgtatgattcttaaacgttcagcagtttctaccttgagagatggatcagagaggaacgcgagaatgagcttcactagccccggtccaatcaggttcttctttggatcaacaacctcttgcagctcggttttgaatccggttagatcagcttctgcgatctcgacgcatttggagacctctttgacaccgatgtttcgataaatctcaataagtctggttcgggacaatgtaggaatgcttggagttggataccaaacgaaaacaggagaatcaataaacatatctttcaagagcaagtcatcagctatgaacacgtcgcttatgctagataacatgactccgtcgttgttgttgcaatccggtgagtgtacaggcaaacgcgaaaaggactcagagaggagcttctctgctttcaccgtgtcaccatgtcgcacaacaaagctccagaacgcacaacactcatgactagacaatctgttcttagttttctcccaatatttccacaactcgcagtaatcttcaatagacggattaattctcacgccaaatgcagatgagaagaaaccaagaaggttatgatccttaccactacaatagtggttttcaagaacgttaaactttgatccaaagagcttatctttgtcaaagagcacacaactagaaatatcagcccatttctcatcacttggtatccaaatccgacctgaagaggcacctttctcaggtttccattcagcttcactaagaaatctataaacccgggaaatagcatcagtttctgagagtttatagacatttcttgcaagcaactggcaagctttgtctgaatcatgaccaactcctatcgcaataagctcttctctaaacgaattaatatctgagccataatactcttcgtcgatgaagggaccatcacacggctctaacttccaggtcctatcaaacaagagacactcctcgggactgcggtaacctgcatgtgtcttcaaccattttactgagaccttatcaagaagctctttagggagttgctgaaatctgtcttcacgcaagaacttgatgcacctaaaaagagacaaggcgcttgaaggagcgatgcgagatggatcagggagacttaaggagctgatcacatggctcatgcctttcctcagctcaactgtaactcccaaactctcgagctcttttctgaactcgtgtatgctcttgccataccagttcggaccatcatcgataaagggaagattcgctatgaggcggagaggttcccattctgaatcaaagagaatacagtcctttggtgcacgaaaatcaccaagtttggtatgcagccattgaaactgtttgaagcttttcataagttcttcaggatatttgtacaaacttcccatcagcttcttgtagcaagataaaagagacgatgcggtacatcgtgttagcccagaggagatagctttctgtttaaatgtactcacaaacattttcacagcttcttcaagctgaagcttaacaccaatctgcttcagttctcctttgtaggcaaagattctgctgccatagaaatcatcatcgatcaaagggaagcaatcaaaaacagaaagaagacaagtccactctggatcaggtatgaaacattcagcaggagatttatagccattcttctttgtcttgaagcactgagaagaattccacagggcattgatcagcctatgtggactcagttgacgcatgcagtcaagtactaggaacattgcatcaggtgtcaagtaagtcagctttgcagtattcaaatgtgaaacgatgaggctgtagttatcaggaaacttaactacaacgccaagcaactcaagctcttccttataaccattgaggctaactacaccatagaaacctctgtcaatgaatgggatgtcactgatcaacgacgcagctttccattcctcgctgaacaaaacagctccatctggagatcggtaaccagaaatagtcttcagccaaggaccatttttgacagcagtgatgaaatcagctggtgagaggcgcttctctctcaagtacctgatgaatttcagtattgagaacacgtttgcgcttgactgtgttgacgtctcagctaaactcatcaggtggttgccaacaaatctacatacttcactgaactcaaacatgacaccagcaattttcaactcttctttgtacttctcaatctcgttgccatagtagcttcgatcaacgagcggaatatcaacaagaattgaaccgttctgaagaatacttccccatgatgaagtatgataaaacgactgagaaggcggccgataatcagaaaccccattcattgttgttctcagccaacttcctcctctaacagaattcaaaaagttggaacgaagagaatgtctgttacacttattaatccactctaacagcaacaaaacattctcctttgtaagaggccctgacaatgcaggtatagcaacattaggaggttctatgtcaggtatatctccagcctcaacagaagatttcaagaacccgagaaggtctttcttgttagaccgaagaccagcgaacctgttcgacaacaaatactcttctgaaagttcaatgtagccactatgtctccacggattggaaccaactaagctaacccatttacctgcactagctggaacaagaaccccattcctgcttatgtttacattcccatagttgtccacaagcggcatgtctttgcagcatttacccgcttcttcttttgataaaaaatcctttgagattgagtgatgcagaaagtgtgcatatgcaacaacaagcctcttatctccattaagattctcacggagatgttttgcatagtcagagacactaagagtaatgactttaacgttctctttgagccaagtatgaattatctccttcttggagcacactttcaacgctgtccgggttgttggtggcatgaagacgaagttagacatacatctgaactcatcgttccaatcaagtagccatgcctggttcttctctgtggacaagcataaagtcctaggactgaaaccacccaaactgctgagagaactcactcccttttggacaacatacttgataaggggaactttccccatatttgtattctgaaacctgcactgccaattctcagcgatgaagagtagaacctccacatacgtagcttctgacacacttgtcacgagatcacagccctgaatgcattttacataccattcgttgcttacttgcttcagacccaagaagttcaaaacgttgtcatattctgttctgtcaaaagcggaattcaaaatgtagatgccatgtgatgatatgttctgcagactcgcaccttcacttcctgctttctctaagatgtcccagaaagtaggtatgagacgaccaacttcacacggcttgtaaaagaacttctgtccttgatgagatatgcttggtacaatttcctctgcacaaacccttgccctgatagattctcggaccacattcagctttgcatagttagattcttttacaggcaagaacctaaaagcaggcagcaaactagacactggagcatcagtcgttttgaccaaagacgtgaatgcattcaaaaatgctagaggtacacagttgagaatcccttggttccatatatcatctaaaaggatcatttctctagacgatgctagaatgaaatcggcttgaatgatgaagggaaagtttgttaccatttctgtgggaagaaacgcatagataccaggagagttatttccatggccaagacgctctccgaatggaaacgctaaagtgatcacccactcctcaacttcgcttctcctgtccacacggttctcatgtttcactggaaacttttgcctccacatatagtaggagcattcttgttcagagtttttccctttctcagaagctgagagatgtatcgtgtatgactccgcatcaatgctcttcctcgtcacaaagttagtctcactaacaatccctattgagttcacagtactgagcttaggatctaggcaatgttctctgatagagagacgtttgatctttgacaaaaacaacagaacctcaggatgaacattggaaagctgttctttcaccggctttactttgtcactcttcaaaggcaagataatggttgtggtcggaagagcagaacccgaaccatacatcctttgtatatcaacaagagaaggatgttggtcaacccactcaggaacaatgtagccaaggctgcagtggctgcaaggtgcctcattgaagcgaatctgatagccattgctgaagatataaggctgcgacgtaatcagaaacacactcttgaaaccgattcctatcaagattgaaacagaacacacaagtaagaacaagaagtgtctttgacatttgagttcgtcttgaggtcacacaagcaaatgcgtgtacctttctctccgatgtaaccgcattttcgattgcctttctttgtagaccgtccaacactgcagatggactcaatgtttttctcagagaaacctttctcattgttgaaaataagaagagtggctggagctccggtgtttgtgatatcctcagatgttatcacaaattcaagagatggatccacaccttctggatactcgttatcttccgcattctgaaaaccagaggaaaaatacgaatgcttagcattagcataatgctaaaactgtaggaggaagccaaaaaaccataacaacatgttctatgtatcaatctcaagcacaatataattcgatttaagagcaaacatgattctgactgtatgcatgaaaactaggtaacatcatatgaaaacacttgaatacatgaaaatgaagcagaatagaaacggtttggttcggttttgttctggttctggttcaacattcgattacattattaatttattacacatcaacgcaaacaaacatatctaacacaaactacagaggaaaatagtgcgggaaaaaagtagatattcaaaatgggttacagattttctcgggaacagagcacaaaaccctagagaagacagagcaaaatctcacagaaaaaacacagaaacagtgacatataagtgataggggcagtaagagaggagaacttacttggataagttccataagaaagtgaacatcctttgcatagagctcagcggagagattcttcacagcttgatgaagatcctccgtcaacggattctcagctccaccgattgaaaacttagtccgacgaattcgttcaatgtgttgcttagccgattccgtcattgtctctattattactggttttgttttggtttctctctgcaaaagtgaagcgacagacaagagagtgaggaatttaaagagaagaagaaggaaacttcatggggaaggtaaaacttgagaattaagtataacgatgatgtgacattagtacgggaaaaaccaaaagactagaatttaattggctaaccaaaagacaaatcttcttgtactgtgtagtttactttacaagaaaaaaaagttatgtagcttcgtaaatgcaagtatcttttaaatcttcatcttcaacgtttgttattgagataactccaaattagatttagataatgatgtaatatatctttatataattaaatcttgtgtggtttgaatttgtgtttcttttagttcatcaataatgtaattcaaaagtcataacataaatagcaaatacaaaacaaatttaagatataacttactcagttactttgagatagaaatttagataaaattttaaaaacagaaaaattctatcaaaatattatttgttatatttgatgaaaaagtatataactattttggtttggggaaaaaactaaaaaaaatccccgtttatttttaagttgtccgtttaatacatgcattattaaattttcccgaacaatacatgagttaatttttatgtcctttaaaaaccttcgtttgtttaaattttggtaaaatcagatatccgagttaacgtctgttaagttttaacataggttaagtttaaacagccgttaactcggatatctgattttaccaaaatttaaacaaacgaaagtttttaaagaacataaaaattaactcatgtattgttcggaaaaatttaataatgcaggtattaaacggacaaattaaaaataaacggggattttttcgggttttttcccttttggtttgtgtatttagttgtatatttttacatatataacattttaattctaaaaacggtctagctcaactcatgagcaagctcattttcattaaagctcgctcatatatcccgcgatctaaattaaattcgatcatataactcatttattaaataagccttaaaaacagaattagcgctaataaaaaatttgagtcagattttgacaccctttgataaatttaatcttctaaactctactagaaatacaaatgtaagttgatatattaacctttctttttcgatttgaagaactgaatgattgaagagaactttgaccaacatttacttcattgtcttgcatatcaagatcaacaacaattatttgcttcagtttctcttcggtttcttccaatgattttctcatcgaatgttgaaccttggaagaaaccttttgaccattataaaactaatgcaattttcataccgttccataaatcatctcttgataattgctatacataattgatcatgtaatgcatattgtgtttaatctttctaaagtacaaatgtaagtcgatactaacctttctttttcgacttgaagaactgcaagattgatgagaactttgaccaacatttacttcatcgtcttgcatatcaagatccacaacgattattttcttcggtttctctttgttttcttccaatgattttctcatcgaatgttgaacctcggaagaaaccttttggcatgcacttctattattcaatccagccaagtgatgtttcattctatttatttcacttccaacgtattgtttaccacaaaagccacaagttataacttttctccgtcttgaatcaatagcttctctaacatagttccaagccaaatcttgtttgtgatgactggaacggttcgacgatttctcttgctttatattgcttgtatttggtgaaaaagccttctccattgatgagtaaactacaaaaaaagaagaagtaaaaacctctacacaattaacatatgtatactctttaccaataaaaaatgtatataactcttacaaggattaaattaaacgaacaaaacaaaagtattcgaatcactcaaagttatattttcatttgtatatattagctagcgataagaagactaggccaaacgaataaacacataaggattggaagaaactcgacataatctaattatactaaatcaacagtcaattttataaaaactgcaagcttctctttctgccacgtatgcttaagtctaaaattttgctctttcaaaatcgtaaaccaattcacttctttttactattcaataaaattcttgtttgacaaaaaatgaaaataatttttttttaccactttttcagcaactgcttcttccacgttcttaagattcttcagtttctctcccatctttcaaaaaccctctgccagttaatttacgatctcaatggcaaccgtataagccattctcagaaagataaaaacaggttcaaattcttcttcttctctcctttctcataaccttaaatcctccattctttcatctaaatacgtctaacagagaaacgaaagtatgacgtaaataatgaaagttgagacttttgtgatgcctaatgtgatggacgctgttaactcctcacgacacactgagtttggtccacctaatcgctggtatgaatatcactaaacctttggccattttgttgcgttttacttggtcttatcttcttacattttccatgcacaccagctgctcgacaaaatgaccacataagtttacgagaatcgtatagaaacaaaatggatgcaaatgttttggggctttcaattcaaaagaagaagaagataaccaatttgagagatgggtggcatgacatggcatcttcttctacggtttagtgtgtaaaataatttaaatgtgaaagcatcttatatatttcgagttaaaaaaagcgttttgattagaaggtaattcatttctccattattattattgttaagcttttggagaagaaaaaacggttctatatattttttcttttcttcatctattccttctctttttctctatgtctatgagagaagtttatgtatttatgtaagatcatttgatgtttccaataaaagttttctccaattttgacacatatagatattacaatttgagtaaagttgaagaggatttctattgagagttatagagcaatgatacacattgtattttgtgaggttgtgatattcatcatttgtgtatagttgcagatttcaaagaaacaaaatgtattattggtattgttgttttcccgtgcaaggcacggcacgggctgcctactagttaagatatgaatttggaagatgtcaatgagagttattttccatttccaaaaagaaaagaaagaaaagcatatgaaactgacggataacgaatggtgataactatttaaaattatggcatacccataaactcgtgacgaagaagatgacaacatagaattggtgaagacaaagacatgcttaataatattataaaacgaaaagtgagtttggtcgttgtcttacgggttttgaaatcgaagaacacaagttgactgattgactctacgttgaagtgaaaattatattgctatatcacatctcctatactcgctacattttatttttctctccctacttctctcaattgcaaaggatacaaggaaacagtgtgtaactaaattgaaatacaaagagcccatacctctagttattgttacgaatccctatttcactggttaacagtttgaatctgctttgaatctaaagctgtgaatggtaaacaaaaccgcactcaaaaccgcaccgcaacagtgctgtaacagtatcaaaatctctacatatacatatgtatctatgtattttcgttactatttgaatcgcaccgcacttctcgcgtaccgcaaaacgcagttattattcggagctaagagtcactcaaacccaaaaattgtggagaaacaatgtcatgaaaaaaaaaccaaatgcgttaaagaaccctaatcaattgtttttctattcatttttaaataaggaaaagatgacagcacagtaattaataaaatcttccatatctctattttaagctatatataaatattcatttttgatattgtatagtatatagtattaattagatctttactcttcatagtcatcgatcaatacacataacattccctaataagttaaattagtggctacgtttgacgaaaagccctcgtttaaaaaaaaaaaaagagaagaaggaaatcaggaatgatctgattcttcgacgaaaggggaagaggttgttgaattcaaaatctctctctcttctctgtctctctcgcgtgagctagttgcagatttttccagatctcaacattgaaattcaaactcaaagctagagagggagagagatagatagatagagggagaagaagaagacgaacacggagctgaaacaatgattacgatcccataccttaccgctgtatcaacgtatttcagctacggcttgcttttcgcgtttggtcagcttcgcgattactctcgcctaatcttcgattggtggcgcaccaacaatctccaggttttgtttgtctcccacatgattctcgatttgatgatgtttgtgaaaatctcttttaacgttgttttctaatttcgcttctgatttcacatttcgtttagggatacgctccgatctgcttggcgcatgaggatttctacatccgacgattgtatcatcggattcaggtaccttctcaattcggcgtttgttccttttgtgaagtctttgtttcaatgatttggtgtttgattcttaaatttatgtgtgaaggactgttttggacgtcccatttcaagtgcacctgatgcttggattgatgtggttgagagagtctctgacgataacaacaagacgttaaagtgagtctgtcttcctctgcttttttttctgttgaacaattataatttctttggtcacattaagagaatatgaaaccaaatgtaaaggttggattcatacggttgagaattggtttatcacttaggatgtcaaagaataaacctttggttgcaactctgtgcaggcgaactacaaagactagcaggtgccttaatttgggttcctacaattatcttggatttggttctttcgatgaatattgcacgcctcgtgtcattgagtctctgaagaaattttcagcaagtacatgtagctctcgcgttgatgcaggtacagggtcgtctttgtgtattaggtctcgaacaatctcttctctttgtggttgcctgacactagttgtttctgttatcaggaactacatctgtgcatgcagaacttgaggattgtgttgctaaatatgtcggacaacctgctgctgttatttttggcatgggttatgcaacaaactcggctatcattcccgtcttgattggaaaggtaagtatatgctgctacatcttgtgatggacacttatgttactcccaaaacctatgtttttgtagctttatgtgctgccatctgtacagggagggttgataataagcgattctttgaaccatacttcgattgtcaacggcgctcgaggttcaggagctactatccgtgttttccaacacaacagtaagcatttcttatgcttcattttccataattttttgctagtaaattgggtgacatgtcatctttatgctcttttgttaaattcttcgcagcacctggtcatctggaaaaagtattgaaagaacaaatcgccgagggacaacccaggacgcatagaccgtggaagaaaattattgttgttgttgagggtatttacagcatggaaggggaaatttgtcatctgcccgagattgtttcaatatgcaagaagtataaggtgaggcaacataataaatcatcttttatgttcaacattgatgagagattaagaaactcaatcaactaaactatcatttgcaacatcaaagttgtctagactaatttgattgtctgatgcgtaacttaacttcttcaatattcttgtttcaggcatatgtttacttggacgaagctcacagcattggagcaattggcaagacaggaagaggtgtttgtgaactccttggagttgacacttctgatgtggacataatgatgggaactttcacgaaatcttttgggtcttgtggtggctatattgcgggatcaaaggttggcaattttatacttcttttgcatttactgatcttttgtttgcattccttggtttatttaattttggtaaatcagaatttgaacctttcagaaaaacttagaactagaaaaccaaattacttaatcataagagatctttcagaattgcacaagaaagatacggccagttttttcacagatgaataaagagctgatacactaaggcgcaactgtatctacaatagacatggtgattgtttaggctagtacacttcatttcgaaatcaaccaaaggcgttatagcatattgtgtttcattttttgtaggacctcatccaatatttgaagcaccaatgcccggctcacctttacgccacatcaatttcaactccttccgcgacacaaatcatatcggcgataaaggttatccttggagaggatggttcaaacagaggtatcttgatagcttatttttgctctttcagctgtaactcttttgctctatgagcttcgtaatctcaaacttttataatcacctgggcaggggcacaaaagttagcaagaataagggagaacagcaactttttcagggctgagttgcagaagatggggtttgaagttcttggagacaatgattcaccagtcatgccaataatgctttacaatccagcaaaaattccagcattctcaagggaatgtttgcgagaaaacgttagtttctcttgcttttcttaaaaaatatttttttttgcttccacacaagagactcacctcctatgttcaacggataatgaaatttgtgaacagttggcggtggtggtcgtcggtttcccagctacacccctattgctagccagggctcgtatttgcatatccgcatctcactcaagagaagatcttataaaagccctacaggtaaatgaaatcttgcattgagttcactggttctcactcccatatcatttaccacgaagagccctagtagtattagtataaaacacgagttctcgggtttctagataggtctatgtaaataaagcctttctcagaaagggaatctgcagttcatccacaagatggattcacacgttttaatattctccgtgttatgataggttataagcaaagcaggtgaccttaccgggatcaaatattttccggcagctccaaaaaagcaagaagtagagaaaaatggcatcaaattggattaaacccgtaaggcaacagtttctttccaagagatgtttggctagcaattagctgtagtgtacaattatctcgctgttcgtctttgtcttgtcgtgaaacatgtgattgttgtcattcttctctctttattatttttattgtttttgtcagagttaataattgtatagtgtccctctatatattgttgccccaaaatttttacaggtgttatcgcagtcatctttgctccacgaaattaggggcccaattcgttggaccaggtccagaagtatttatgaattgttttgttttggtcttccagaccacgaatgtgctagcagaagagtggttctcacagttaccaaataaacttctatcatgttggaattgcattcacaattatccttgaatttaaaagtttgtatatgcaattcaaggggacgttccataaagaggtttgtgaatactgatgcactcgttagtcatttcatgtcttcgtcccagcaaaccacatacaagtattgagtaattaataacttatgtcacactcctcttctgtaaaagctttgttgatggtactctgccattattgatcttgctaggagcatgaggctaaagcatatatccttgggaacctgagaagtgagaccaaccggctctcgatccacaacttcttcggtttgttctgctacgagatctcatgcttcttctcaaatttttgtccatacatgtaactatttaaaagattcgagttcaaatattttagaattttggatatggactaaacatgtaactaaaattagatttgaatataaagggattaaaatctttttcgaaaggttgccgtttttgtcatatacgaatactaaaaatagtaaggtccagtcaggggggccaagacttgagagttagaggtaatttctctctaaagtaacatccgagggaccaaactggtataaaccatcaggtgccttagtttgggttcctacaattatcttggattttgtcctttcgatgaatattgcacgcctcgtgttatcgagtccttaaagaaattttcagcaagtacatgcagctcttgcgttgatgcaggtacagtttcttttcttataaggtctcaaacaaactcttcccttttgtttcctgacatatgttgtttctgctatcaggaactacagctgtgcatggagaacttgaggaatgtgttgctaaatttgtgggaaaacctgctgctgttgtttttggcatgggctacttaacaaactcggctatcatttctgtcttgattggcaaggtaatgcatacaccttgtgatatgaacgcttatgttactaccaaaacatatgtttttagtagcttaattacacagccatgtatacagggagggttgataataagtgattctttgaaccatacttcaattatcaatggtgctcgaggttcaggagccactatccgcgttttccaacacaacagtaagcatttctatgcttcactctccatattttcatgacatacatatatatttatgccctcttgttgatggcttctcaacacctgctcatttggaaaagtattgaaagaacatatcattgagggacaaccaaggacacacagaccgtggaagaaaattatcgttgttgttgaaggtatttatagcatggaaggggaaatctgtgatctaccggagattgtttcagtatgcagtgagtataaggtaaggtaacatggtaaaccatctttcaagatcaacattgatgagtgattaaggtactctatcaactgaattatcattttgtttcaggcatatgtttatttggacgaagctcatagcattggagcaattggcaaaacaggacgaggtgtttgtgaactcctaggagttgacactactgaagtggacattatgatgggcactttcacgaaatctctcgggtcttgtggtggctacattgccggatccaaggttagcaatcctatacctttgttctcacttactgatattttgtttgcacatgagttaagtagaaagatgatgcactaaggcccttctgtatctaataatctacacaacagacacaagattgttgaggcaagttcacttcacctcaaaatcaaccaaatgctttatagcatttttgtgtttcgatctctgtaggaccttgtccaatatttgaagcaacattaccctgctcacctttacgcaacatcaatttcaactcctgctgcacaacaagtcatatcggccataaaagtcatctttggagtggacggttcaaacagaggtatctgctctttcagcatttcataatctcaagttatactctcaaacttttctaaaaaaatgggcaggggaactaaagttagcaagaataagggagaacagcaactttttcagggctgagttgcagaagatggggttcaaggtccttggagtttatgattccccaatcatgccaataatgctttacaatccagcaaaaatcgcagccttctcaagggaatgtttgcgagaaaacgtaagtctcttatttgttttccaatatctcacttgcttccgcgcaaaagagattcacctctatgtttcaatgaacattttaaactttgaacagttggcaatcgtggtagtcagtttcccacctatacctctattgctagccagggctcgtatttgcaattccgcatctcacttaagagaagatcttattaaagccctgcaggttgagttcactcgctttctcagcatagtagcaatgatttgaatctactccaaaaggtgcttatagttcatgcacaaatggattcaccgtgttatgacaggttataagcagagcaggtgaccttaccgggatcaaatattttacggcagctccaaagaagcaagaagagaaaaatggcaatacttcaaagttcaaactaagaatatagaattttgtttttctttcaaaaaccaagttagagcacaaattttctatgctccatggttgagtgcaccacttcaaacaaattgacagcattttgttacttatacaaaaaccttacaagtaacacatacgaaactttccctgtttccacatgaaaagtctaatttctttttctcaattgctcttgttactacttattgagatagctgaacacttcacactgtaaataaattgctagactaaacacatacgttttcttccctaggaacttctattgcaaatagctactacacctattcgattgcaaaatccttaacatcatcaagaaaagagagatcaaagagttttaaaaccttcttctctcttcttctactcttcttcatcatcctcttcctttcccacttctacttctactaatactactgttcctaacgcaacattcaaactacaaacatcaagataagaaacaatagagacgagacgaatgaaagatctatagcgttaaaaaaaaggctttcatggtttcagacattgcaagcttacactctgccatggctttcactatcatcaacaaaaaacaacaataacaaaaacaaaaaaaaccattttcttttcttcttaaccgatcaaaattctctcacacacgctcatgagaactccctaccaagcttttgaatagcacaaaacatcttcctcctcgatccaacagcattaatccccatatctttaagatcttccaatgtcaacaatggtaaaacctcttcatcaacctcatgtatctcaaacataggccaatatctccctaaccctaactcttgtagccaaatcttcaccccttcttttcctcctccatccatattcgattcgaattctctgttgccactactattgttactctcataccttcttctaccataaaacccaccaccatctctatccaaagactcttcctttatcggactctcagaatcttctctactaaaatccctaaacccaccttccaattcttcccctccactaattttctcatccccatcaccaactttcgatacccaattggatctaactctcttcgctgctgctgatgacccgacccgtttcttaacccgccaactcccaacaccaaaagaatccacatttccttctctttcatcatctagggttcctatattctcatacccagaactcaaattcgttagggttcgagtcctcgacgatttactcgtatcttttctattaccactcgtcgtcgtcggtgtccatttcgatttcctcccttgtgaatcatacgccgccgccgccgcgtggtgatgatgctgctgctggtactggtctccgccgatttcgcctaatctaacgcttggtcttctcaatcgtttcgatcccgcggctgcaatcgccgtcgcttcggctgaagttgacgcaggaatagtaacaacgccgccgtttgtttgctgaccatccactggttgcaattccgccatttttagaagttttttttatttcagattggaaccgccataggcaagtatggagctagtagagaagatgaaaggtcgaatcttttggcttaggctatttaggtttatctggaggaatcagaagtggatgtgagagaaagaagagagaatcgtcgtcatcaggagaatcgaagaaggaagaagaagagcgatgttcacttactgacacgtgtgtgtttctgcagtcactaacagtatttatacaataattgctcaacaagtccctcaatttccgtcagtttctttttaatgactcagggtaaaatggtcatttgctaatcatcttcatcctcatcagacctgcgattatttttcagaaccctagctttggcagaagattgttcgttgtcatgtacttgaaagaaggatgttcgttgctattgaaagttcaaaaacccttaatcccatttgtcctcaatacaaatctcaatgtgaatcatctcctcacagaatctccaaaccatgcggagatcaaagaattagatgtggtaaagaggctgagacaagagtcatgtgttccattagctttgcatttcttcaaatccattgcaaattctaatcttttcaagcacacgcctttaacattcgaggtaatgattagaaagcttgcaatggatggtcaggttgatagtgttcagtatcttttgcagcaaatgaaacttcaaggttttcattgttctgaagatttgtttatcagtgttattagtgtatataggcaagtgggtttagctgaaagagctgtggagatgttttataggattaaggagtttgggtgtgatccttctgtgaagatatataatcatgttttggatactttacttggtgagaataggattcagatgatttatatggtttatagagatatgaagagagatgggtttgagcctaatgtgtttacgtataatgttcttcttaaggcgttgtgtaagaataataaggtagatggtgcgaagaagctgctcgttgagatgtcgaataaagggtgttgtcctgatgctgtgagttatactacggtgatctcgtcgatgtgtgaggttggtttggttaaggaaggtagagaactcgcggaaagatttgaacctgttgtgagtgtttataatgctttgattaatgggttatgcaaagagcatgattacaaaggggcgtttgaactgatgagagaaatggtggagaaggggatatctcctaatgttatctcgtactctacacttatcaatgtgctttgtaattctggtcagattgagcttgctttctcgtttctgacgcagatgttgaaacgagggtgtcatccaaatatttatacattgagttctcttgtgaagggttgttttctaagaggtacgaccttcgatgctctagacttgtggaaccagatgatcagaggatttgggttacagccgaacgttgtagcgtataatactttggtacaagggttttgttcccatgggaatatagtcaaggctgtgtctgtcttttcacacatggaagaaatcggatgttctccaaacatcagaacctatggctcacttatcaacggttttgccaaaagaggtagcctggatggcgcagtttatatatggaacaagatgctgactagtggatgttgcccaaatgttgtagtctatacgaacatggtggaagctctttgtaggcactccaagtttaaagaagctgaatctcttatagagattatgtccaaagaaaactgtgctccttctgtgccaacgtttaacgcatttatcaaaggtttatgcgatgcagggaggcttgactgggctgagaaagtgttcagacaaatggagcagcaacacagatgccctcccaacattgtaacatacaacgagttactggatgggctcgcaaaggcaaaccgaatagaagaagcttatggtctaacccgagagatcttcatgagaggtgtggagtggagctcatcgacttacaacacgcttttacatggatcatgcaatgcaggtctcccggggatagctctgcagctagtaggaaaaatgatggtcgatggtaaatctccggatgagataactatgaatatgataatattagcatattgcaaacaaggcaaagctgagagggcagcccagatgttggatctagtttcatgtggaagaagaaagtggcggcctgatgtaatctcttacacaaacgtgatttggggtctatgcagatctaattgtagggaggatggagtgattcttcttgagaggatgataagtgcagggatcgtcccaagtattgctacatggagtgtattgattaattgttttattctcgatgacatcgtgagagcccatgatcagtttaccatatagcaaatcagacttgttcaattttgctgtgaatccatttgcttctctgtatgaatagaagaaggatcaactccggtgaatatacagaaattttgtgaacagatggaagcttggcttgtgggtcttcttcactggagccttctagaactcaaagaaaacattttaatccttgcaagaaaaatcagacgactggatttggtacctgacaatacattgctgagatattggtaagcaagagagatactctttagtcatgcttctgttgtagcatccatttaattttaattatatgtttggttacagactgatggttgtagactagaatcgttggacctttttctacaagaatctgctgaagctgctctgataactattcggttcctaacgatgttctctggccaaggttggagtttattatattcatttgtgtattgaagcactagatgatatttggaattaaaggtttggcctctaaaagttctaactgatccaagcttctaacgaacatataggaggggaatttcgagccgctgagagatgaaacatcctgcttcagctacctttctgtttcaaaaagatccttcaggtaatttctaagctcccttttccttgtcttttaggacttctcagatttcactgacagattccatttcgtttcctcttcatgcagctcgtagaaagtagaaacaaagagaggaccaactgctttacactattctgcttaatataattttgtgactagtacaaggtaagacatggactagaggaggcaagaaaagagaacaaagaacataacatttgcttatgtactaaaattagacataatcaatttctagctttgttctctttcagtcctctatgattttacctacatctctggtgaagaaaattccggaaaaatagataacaaaagaattaaacctaacctagagagattacgcatataactgtcaccttgatgatcttcaactcctaacaatggcgcaaaagcagagggacttgtttttgaaggaatgtatcgtcgtcctgttttgtgctttagtgtgtatggtgataaatcaattcctagatatgcagtttcttagtcagctggtgtaatgcaaagctgaccatgtcctggactgtgctccactgggtacatgctcgtgcttctcacaaatttttgatggtcgctcacaggttttctgaggtgtgagaccattggacgcttgtttttgtttctcttctttactatggagcatgaagctaatggatctgcagatcctgctccaactctcctgcacatagaatggtttttattattagagaattgatagattttggcaaagaaagaagatgaaactgtgttattgatgattaccttaagagcttttctgctgcaattcttgcagatctaattgtactgcggcttggcacccatttcacgacacggtttggatcagctctcatgggagagtgtattttaatgagctaaaaaagagagaaccaagttaaaaccaaaaaccttgaagagatctctgaatctctataataagccaatgcaaatctattaaacacatcaagtggttattgccatctaacaactagtattggataactggataataaagaatgatgggaaaccagagacttacacccaagcattccatcatctggtagtaagctcttccatgcaaaggagtatgtccttgtcgggattctgaaaaatatcttgtcctgaaagaatattacaagagattaaacgtaaaccatggttgataaacagaaataaacatggttagtaagtagacagcaagacaaaataaatataggtagactttataccactctttatagcctggatccactgtgaatccatacatatccactgaatcacacgtcgagagagcaaactcaagagccttgagcccagttcctttggctgctgagccaaatgaagcaccgagcattaagtacacaggattttttattgggacttcctgcatagaaagaaaaatcctcaaataagtttcaaagaccagggggagtgtacagatattcaaaaccaaaacagctaagagagaattaagtgcaataaacaaacccgaatcatcttgttcataatatcatgtattgttgttttgacgagcaggacctcttgctttttttctgcataatttcaaaggatcagagagattggattatctatttgcaagcataaaaaatgtgacacacacaaatgaatatatatatatatatatatatatagagagagagagagagagagagagagagagagagagagagagagagagagagagagagagagagagagagagagagagagaaacagtggtgatgataaccatgaaggagtgaaaacaagagaacagttatatagtaccatccaactccacgactttgtcaagggcttttgctgaccctctattaagaagacggaatgtacttttctctcccacatattccttgtagttctgcaagaagaaattccaaaaaacaaaaacaaaagtgaagatacgtgagtctacagcgggaacaaaagaactggaagttatataaaagaagtcattattaacctgaataggagcaccattttctcttagaaccgtatcataagtatctatctcctttccgaactttgtttttaagagatcaccagagttaccaataacagcacatcgcccaaactgccgggggaaatatggtggtgtttcaggaagcaccaatgaaagcttctcaatgcataaagatttattctggcaacgattactgcaccagaatgcgagtctcattaaggccagaaaaggaagaagacaacacagcattttacactacttggtatattgcgactgagaacaatcaactaagcaagtgttgagctgttgtctgtaaaaaacaataataataacaaccaatgatcatgcacttcatccttggtctaatgtgagtcaatacttacagttgaattcctttattgattctgcgccatgcataatcctcccatccatttggtaaggcatcaatgtattccttggtgagtattgtagagctattcctgacctagtcaaccaactcgccaattaacccatcactataaagactaaaacaaattatatgaaatcaaactttacacactttaagaactgcaaatacccacttgttcccatgtagctactgcttcacacaggtcaaactcatatgacaatccttcaagctctccagacttgggatctttctgttgttgtacataatccaagacataataataaggtagaccatatttgctagacactaagacaaggattatgacaagcttaactatgataaacaaatagtcagaagagagaatttacccatttggggacagtatccttagggaagtttatagaaactttgcaataatctctacccatagcagcttgtagtcccaaaccatttgcactctgcatcattagatcagttctaatcagctaagctccagattcagaggtacgatctataactccaaacggatcaagagggtataacacaagataaggaagctaacacagatttacttactacgcacttctggaatccgttctgcaaagactgcaacgcctctaaatcttcattggtaaaacgattagactcgtctaaatccacggaatcatcttctttatcattaatcatcttcatacttcagaaaaaatcacgaaatacaacactacaagcatgggacaatgatggagattacttacagagattagagacgccgataatgtagattagaacagcagagattccagtagtcaaagctaataagaatatcagatgcaagagcttcatcgattccccagtagaagcttcagcttcgtgatttccaggagaagacgatgtgaaattctcgatctttcaattcaaaagtatccaagttccgatctaagcgagtgagtatgaaaacagcatgtagttctcattctgaagcttaagacggcttacagttctttcactttataaaacgctgcgtagataacttaagacaagccagcgaacgccgaaatgttctagtgagtaacatgaaacggcatcgatttgacggaacggtatttcaaatgagaactggccacgtggctataaaccccttcattgttcatcttcaaaaaccctaacatttctgaaaaaatctctgcttcttcaaattccatcaaaagcagcttgataaagcttaaaagcccatgatgaaatggtgaaactttttgatttcaatggcggttttaagtgtgggtttcttcgcttgcagatcccattttcctgttcttcccctgttttactgtttctcgaaggtaacaactacgacagtataattctatgtaattcgttctcatatacttaaaattcttcttcttttttcttaaatttgttgtttagcttacaggttcagctcaacactgttgctgctgcaatggagactgtggatgacaaagacagtgatcatcatcatgacaagggttctaataagacgagtaagttactttaaacgaatttgatggatttaattgaaaactgtgcttctttttattcctatttatctttttaagtgattgcaactcatcaactagtttcaatttttgtcttttatctgttggcttaatttgatgttttagtaattttgggtaatttgtattgaaaggtaaagcaccagagtggaagaaattgaattcaaaagaccttgggataaccacttctatgatttcaaagcctacacgaatagtgctaaatggccttaagagtaaaggttgattctttttttaatcatttgattgaatctaacgatgaaattttatctcttgctggtttttgatagttgctttcttttttccgtgacctgtaggatatgatgtttaccttgtgggaggctgtgtacgcgatcttattttgaagcggacgccaaaagacttcgatatactcacttctgcggaacttagagaggttgctttccaatctaacaaagtcatctcttgaacattgtcttatgctgatttcaaaatggattttttgttgttgttggaatgtgtttaggttgttcggagtttctcaagatgtgaaataattggaaaaaaatttcctatatgtcatgtgcacattgggaatgatatgatagaggtttggctttttcttgtcgaggattttctttcatattaccaatataagcatagcaaatgcaaataagaacagtttcttagctttctcttataattcatttatatactttttgagtaggtttcgagttttagcacctctgctcaaaattctctaagaaacacaagaacgggttctggaaaatctaatggttcctatgacgaggacagtatccgtttcaataactgcttgcagcgtgatttcacaattaatgggtatcttattaatcccttgatgatatcctacactcctaagtattatggagatcccatagttttgttacttttcttcacatgtttatgttgtgttttcaatctcaggttgatgtttgatccatatgccaaagttatatatgactatcttgggggaatagaagacattaaaaaagctaaggtgtgaacatattctgttatacctttttcccccggtaaattattttcaaatatcgtttttctcattgtggttctttgctcacaggtacggacagtgtttcatgctggcacatcatttcaagaggacagtggtgagttttctggaaaaataatcatcttatgtaacatttcctccatggattcttttccaaaatcctgtagagtctagaaaaacaaattcttgtatgattaccattaagagtctagataatagaagcttatcagtgctttaccgattataacatatccagccaggattcttcgtggaacaagaattgctgcgcgtttaggttttacaatttccaaggaaacagctcatttcttaaagaacctttccttcctagtacaaagactccacagggtactactactgcttcacttcacaaagaaatattttctccacattatttttacaacagtgtgttcatgaatgattctgtattatacatgtagggaagaatcttgttggaaatgaattacatgttagcgtatggatcagcagaagcttctttacgattgttgtggaaatttgggatactagaaattcttttaccaattcaggtgagtgtttccactcatctattgttatgtcttaaatgtatctttgcgtctatctaacttcaatattcacaggcagcatatctcgttcgcactggtttcaagagacgcgacaaaaggagtaacttgcttctggtaatatgcagatgcgcattctgcaatattcgtcacagagaagtttctattgcttaaattattgagtacagaacttatagttaacatttcgtaatgcagtctctcttcggaaatttggataaattgttggctcctgataaaccttgccacagcagcttatggtacggtcctcatcttctataagttcctgaaaacacaatccttatcatatacagtggataaaattgtaagacgcaacactattgtattggaaatttgtaggctaacaatcttggctcttcacaaagcacttgctgatcaacctcgatatccttcagtggtagccgcgtttagccttgctgtccacaatggtggagatgttttagaagctgtaaaaaataccaggaaagtcacaaagccacataatagaagcttctttgagctactggagccagaggaaatggactcccaaaccttgttggatgaagtcatggattttgattcatctatcaaagaagccttgggacagatgactgatgggaggtttatttccaaggctatggcagcgtaccctcaggccccatattccgatatggtaaccgctcctatttttcttagcttcatataacaaagtttcagtgacacaaatgcaaatgcagattctcgggagtacgcctagactataggtggttatggagcttgatatatgttttgactgaagattagaaacaatatttcctcggtttagctgttgtcctaactctcttatatcctttgctgttttacaggttttcataccgttgcaattgtacctagatgcaagacgaatattcgagtgtgtgaaagaaaatgggcagaagggatttgtgcctaagcaagacagtaaaattgattatacctcattatcttcaggcaaccttccagaagttagacacgtatttgctagggttgttttcgacacagtgtttccgttaaacccacctcaagagttgtagtccctcttggattggttgggcttaaactgagatacggtagaaagcagaaatgatatttgccatacctttcttatgtaaaaacataatagctaggcgtcgtgaacaccatttttgtactcttacaagatagaaataaaataagaaaagttgggagtttttttcccttttatttctttaatgtgatggcattgtgaggaatgtccttgtacttttatgcacttacagatggagcaagcgcagtagctggagaagcaccaccagtggctggccttaagaaaatgagaaaattataggtaattgatggatgtcttgcatatgttggttctacaatggttcgagtattgattagactatctttaagtgcaggtgatgaaaactttaaagttacaatccagctaaaactttgacagcatcatagataacccacttcgctgcagttagtgttcctatcatgaaaatgcgaagaggaaggtcccgggtaaacatgtctctaacattttcttgactgagagtatatgtcttccctgctgtcagaaacgttatgttggatctgatttcctggttctgtttggcattcagctttagatttgagtttggtgatattcaggaaatgctctggttactatgccgatgctcaaactcatcagctgttaaaaaatattcatagtccatttgccaaggacaagtcctcaagcactaaagagcatacagttatttgccctatttggcaaggagatcctgctattccgtttattgctctgccttgccagcacaggtttgattacctctctctctcccccagatatgtagtaaaagtaattctactagaagctaagtaactgcacatgattgcttaaattgagtatatgaagttagacaagagagcagtgatgtcattggcaatggatgaagaattcagagtatatgatatagttgttacctgcgcttttaagaatgatttgtggcatgtattaaaaataaaaacatcgctttcttgttgatcaggtaatctggaatgatgtaatattgatattttgggttatttaaaaagtcaacagaaaaataaaattgggccgaagcttattaggccctaaaggcccacgaagaagagcgaaaccccttaacgtgtgaaaacccaaaatctcgctctcttcgtctcatcatatttctcttttttgcggctctcaacgtaaagaactcttcccggcaaataaaccgttcgctgttttcatcttctctatggccagttccgacaaagttaatttattgggtttgttttgggtggctctctctcttatctactgttttgtaaatagacatgtcttggctactctagctgaagagtttttttttttgttgttgctgctctgctttaaggtaagcgagagccagaagatgatttggagaccaaaccgattctgaagaaacataaggaaaattccgaggaggagaacaaggtaaccacttgattcttcttctttgggaacaagtttctttacacactttgttatagtagtggctactcatgtaacaggagcagatcaaaggaacggtcgagttgttggagacaaaatctgatcaggctccagtgaaggtatgatttttttaaaaatctaaaaatattgtacaagtttatgttcagttgttcttattgtctccaaactggctactcatgtaacaggagacagtggaaggacttgatgaaactcccgattctgttgaggtacctaagaagtatatgtctggtcttttgattcgttgctttccctcaagaaaaaagacgctctatgtttgctgtctccctcgcgacactaaaatgccagatatgtaagtagcacctttagtttcctctttcgttcttgtagcaaggttttcatgactcctccattttttacagcatcgatttcttcaaagatgttggacaagttgttagtgttcaacttactacaaaacgcaacggtttgcgtttgtccactggcttcgttgagtttgcttctgctaacgaagcaaagaaggtgagactagtttatagtttaatgatgaaatgtattttactagtcatttgaaaagtaccctatgcttatgatgcaaattgttattcgaaaatacctttgctaatcaaatcttttaattatactgtaggcgctggatatgaagaatggtgaatatttgtgtggtaataagcttattcttggcatggctagctgcgaaaatattgcacaacccaagtaaattaattttccctgttatagtgattttgtttctggcatggttgctaggttttttttatgccattacagattactaatgctattactttttgttaattaggtattgcatatatcacaaggtttggtaagggattcaactatttgcctcttgagtttgttaccatgagcacattaggtgaagtttttggtatagcaggtacgaagactacattcaacaagaaagccttccgattgaagaagaggagacacctcccaaaattgttcaggtacctttgttcttattatcttcgaaatctgtcaggctcagaagaaacgcttattctgtctcggggatgagtctacttttttgttgttatgcatatttaagcccttttctccttaagagtggcgctaacacacttggctgttccattcaggcagctgctgtaagaaaaaatacgctctttgttgccaatctctctccccaaactaaaatattacatatgtaagtagcacctttaatttttgctttcgttctcggaggaagttttccatgactgatattttatccttccacttttacagactcgatttcttcaatgatgttggagaagttgttagtgttcgacttattgtaagccccgagagtaagcatgtgggctatggctttgttgagtttgcttctccttgcttagcaaacatggtgagactagttttgtagtaatgatttaaaaattatcaaagtcatttgaaaattagtgtatacttatgatgaaaaacattcagcagttattcgaaagtaggataactgattaaatctcacacactgtaggcgctggaaaagaagaatggtgaatatttgcacgatcataagatttttcttggtgtggctaagacagctccgtaccctccacgaatcaagtaaattgattttccattttatggagatttaatttgtttcagtaacactagttgtaacttattgctagagttgtgatgccattaccgaagactaacgctattatttttgttaagtaggtacaaccttgcagagaagctttggtaagttcttttgcctttgagttttgttatcaagagcacattgggtgaaggttttggtatacatggagagatcacaagggtttttgatattccaggtacgaagactatcttctacgagatagccttctgatagaagaagatgagacagtggaaggacttgatgaaactcctagttgtgttgaggtacttgttcttattatcttcaaaatatttcattacccttaaaaaaaatgactttattctgaggatgaatctttagatgaggctacttcttgttatgcaattcaagtccttttctccttagactcgtgctaacacacttgactgttgaattcaggcagttgccttaagagaaaaggtgctcattattgcgcatgtccctcgccgaacaaaaatatcacatatgtaagtagcacctttaatctcctctttcgttcttggagcaaggctgatattttaccctccatttttacagcatcgatttcttcaaagatgctggacaagttgttaatgtccgacttattgtagaccaaaagggcaagccttttggccgtggctttgttgagtttacttctgctgacgaagcaaagaaggtcagattagtttatagtaatgatgaaaagtattttactagtcattagaaatttagtgtatacttatgaagaggaaataattactagaatatgtttatttttataatagaacacatcttttttttattattcgtatgttttcggtacttgtgtaattacacttaagacccttgattagttttaattaaatattattattaaattcgtttttaattaaaaaataaataaaaaaacagtgattatccatgtcatcagtccatgtcatttaccctaatccacgtcatccgaaaccaaaaattcctttaaaactttcagtttctcattttttcagcacatcttactattcatccgcgcaaaaaaaaaaaaaaaaaaaaaaatgtcgctctcttctctcgttcagtcgacggaaccctaatttcatcgccgttctctacttatctcgtctctttcggccgaaactctttcggtggtgtcgaatttcaagtcatcaaaaatcaaaacccaaatcaaagagatctgtggaattttatatgatttgttacaggttttagttgaatcaagaataactactcttttactttgatttaatatgtctatcgtttagttttcctctcaatcgatctatttagagatatttctacttctatcaatgttttgattcatatggtttcgtcttcctcctatgtatccctcaaacagattattacgttttttaatttgattgttgttatttggccaataaatttcatattgtcttccccagaaaaatgttgctttccgatctgtattataaatcagccgtaaagtgatgtaactcagccgtaacgtgatgtaactcagccgtaacatataatttatacaacctttcgtcttccctaaatgataactcagccgtgacatgtaatttaccgaacctttcgtcttccctgaagcatataactcagccgtaacatataatttacactcatctttcgtttgcccttgaacatataactcagccgtgacatgtaaatttatagatgtcttcccttaaacatataactcagtcgtaatgtaattttaccgaacctttcgtcttccctggaacatataactcagccgcgacatgtaaattgactgaacgtttcgttcttccttaagcatataactcaaccgtaatgtaattttatcgaacctttcgtctttcctggaacgtataactcagtcgtgacaagtaaattgactaaacctttcgtcttcccttaagcatataactcagccgtgacatgtaaatttgtcgtgaaacaataagagatacaacatttcgtctaactttatcatcgagcaccaacttcacaaatttgtcgtgcgttgttttcgcatctatctgcacaagtttacaccctctttcatcagtgttaaatatgtatttgtgtttctatacccaattcctggaaacaacaattaccaaaactagatcaaccatatcgggagaaagatgaaagaaattgaagaaaaatgaggaaaatgatgaggaattagaagttccggtgatgtgaaaaattcaagtgaagaagacgagttgaaaaaattttaccctatttttttatcctttgatgatgctgacatggaatgatgacatgaaatattacagccgacgtcgttttgaattgatgaggtagcaactaagccaccaaacgaacatttgataactcagccatcaagcaaatctataagtcagtcgcaacatgaatactattacagtaattaaaaaaggaaaaaaaaataaagttaagtcagccgtgtaatgtcgtaactcaactaactcaaccgtaacgttcaacaactcggccataactgcatgatattatagtaattaatcttttaaaaataagtcagccataacatggctgagttatatcgtaatccagctattggcggctgatttatatcactcgactataactcagccgtcacatctttccataactaagctaatcaaaactataactcggccgcgtcgaggaaataagtcagcctttttctcataactcagccatattgttggctgggttatcgtataacttcttataactcggccgaacatccttaactcaagcatactgttgcctgagttatagtataactcaggcaacatttttcaactcagccgtaacgtctggctgagttatactcatacttcgccgttttgttatgactcatatatttttgacgtaagtcagccgcaacataccgtaactcagccggctgagttcatttaatccacgtcagcaagttctgacgtggcagtggcattccctgtaattatgtttttttcggtaacgtttagtaggggcacgctgggtaataaaaaaactcgaaaatataacagtaattaaaaaaagttctgtcgtgttctggtaataacacctaatttcttacccacagttaatctccctacgaagaaaatgataaaagtagttattttgaaagttgattgctgactaaatctttaatactgtaggcgctggaaatgaagaacggcaaatatttactcgatcgcgagatttatcttaagactgctccataccgtccacgacccaagtaaattgattttccttgttatggagatttgtttctgtaacattgatttgtttctctttaatcttctttttcttctgtttgttctccaaatcatcagcttctatcaaaaggctttcttctcgaaggtagtcttcgtacctggaataacaaaaacccttgtcatctcttcatgtttaccaaaaatttcacccaatgtgctcttgataacaaaactcaaaaggcaatatagttaaatcccttaccaaagcttctctgcaaggttgtacctaattaacaagaaacaatagcattaaacttgtacaatgacatcaaaactctaataagcagttagagaaacaaatctcaataacatggaaaatcaatttacttgggtcggagagggtatggagctatctcagccacgtcaagaacaacataacgattccgcaatcttcttaggttcttcttttccagcggcgcctaatagtataaaagatttgattagcaatcgtgctttcaaataactacttgtaaatttgacatcatataagtatacaaaacttttcaaatggctacttatatacttttcatcattaaactagtctcaccttctttgctttgtaagcagaagcaaactcaacaaagccacagcccacatgcttacccctgtggtctacaataagtcgaacactaacaacttctccaacatctctgaagaaattgatgctgtagaaaatggaggataaaatatcagccatgaaaaacttgctacaggaacgaaagaggaaagtataggggctagttacatatgtggcatttcacttttcaaagggagattggcaataaagagcgtcttttttcttacagcaacttcctgaatttaacagccaactgtgttagcacgactctaaggaggacgagaagagaatttaaattaacaataagttgattcatccccatgaaaagtcatcttcgggatttgtggcaacagttctgttctttaaacgctaagcatttcttttggagcctagcatgttttgaagagaattaaaaaataaggtacctcaagataatcggaatcgggagtctcatcaagtccttccactgtctcatcttcttctatcagacggttttcttgtcgaaggtagtcttcgtacctagaataacaaaaaccctttacctaacgttttgtgaaatgtgctcttaaaagcaaacttatgaggcaaatagttaaatcccttaccaaaccttgtgatctatgcaatacctaattaacaaagataaccgtgttagtcttcttgcaaagaagctttggtaagggatttaactatttgcctcataagtttgttatcaagaggcacactgggtgaagtttttggtatacatggagagatcagaagggtttttgtgttattccaggtacgaagactaccttggacaagacagccttctgatagaaaaagatgatttggagacctaaccgaataagaaatgaagctctatggtgtttataagacggaaatcttcagggtatcttgcggtaagaagattaccttctctgacgacagttgatggaagaagatgaagcttttttgtgtttttaacttgtgatacaatgcaacttttttttgttacttcggttttcggaatatgtttaataaattggtagaagcctagcgcctagaacaatggatcagggcatgggcatatgtaaattatttacctttttatatcattttcataactttataagaaaatatgtattgcaaatgatggaatgctaaaaaagttacacaaatctttcaagtaagcccatctcaagagttgttgtccctcttagattggttctatacttgtattgcaaatgatattttaaatgacttccatattagctagatgtatgtagtgaacaccatttttgttctatactagacaacagaaacaaaataattaagaaaaataactggtagttctgtttcccttttattgctctaacgtgacggctacgcgaggaatattcttgtaattttatgcacttacagatggagcaagcgcagtagctggagaagcaccaccagtggttggcctaataaaatgataaaattatagttaactgatggagtgtctttcataattagttcttaaatgaattgagtattgatgatgaaaacttacaatccagctaaaactttgacagcatcatagataacccactgcgctccagtgagtgttcctatcatgaaaatgcgaagaggaaggccacgggttaacataccccataaccctagcctctttactgcctgtagcacatgaaagaatcaaaccaagtcagtagatcatataaaaagctctgtgttgtgtatccacaagtttgatgttgtggtgaagagtatggagcttttttacttacatcagcaacggttgctcctttagagttattgaggaaagacaccaaattatctgcaggatgtgagatgatggcgcagaatattccagcaatgtatccacctgcaaagctaactccgagctgaactggctttgagcactcttcttttggggtaggcatcactttcttgtatatgagctccacagtgttttcaaaagtagcaaatttcatcatcgtatctgcaaagaagtcgaattttcttttagtaactgaaatcatcatctcaatgactctactacattttcttgtgtatagagacttacatggaatctggcgtccccagagaggaacaagtcctttgtgtaacccgcggaagccttcggatttgatgatctttggtaaaccatcagataaaccgcgggcgaaaccaggctgagtctggaccctgactttgacagcttccattggacaaagagccacatcagcgacgatttctgcagaggctgagccagcgaggtaaatcaaggtcttgtatttagctgcgtattctggtccaacaatgtctgagtagtatttcttggcgtactcatagagaccgtatttaaaagctccttgggcactgtaaccaagaagcgttggtgaccagcctctggtgaaacccttaagcccttgctctttgattgttgtcttgaaagctgaagttatgttcttgtacttcagtggatcaatctgaaataacaacagaattaagggtcttttttggaaattcgtggaatattctctctgagtgaacatcaaaatcatgcatgagattgaaaagtcttcgacggcgttgaagagtcgatgccgtgtaaaacaagaaaacgtaaaagttgacaaaaacaaaaattgttattcgctgtttttttttccgctaataatttctatattcaagtttttctcactaaatattttacttatcacacacgtattaaaaatgttaactacaaatagagaagttggcttggaactttcacctgcatgttgcatttgatgacatcaagtggcgtaatcgccgtgtgggtgataccgcagctcagcatcccggcgaccgtacacgccgcgaaatacgccggcgagtacatttccactttttcattcggcgtcgcgatggcgaaactggtaccgttggatgagactgaagaattagtcggagaaatcaacggctgtgatttaaggtgagtactcatggtcgtcgcctgaaaaagacgatgatcggacgagtagagaaagctcgggatcagcgatctgcttgagtcagacatttcgagagaggagatgagaaattcaaattcttctgttggtttttcgacttttctcttcgagagaaaaaaatgtcaggttgagttttgctggaatctaatttgacgtttttataggtgctgagtttttggttatgaaatgtcatttttaccccctcactatttgcatattttaccattgactgacgacggcgatagaaacagtcaaatactgatttgtcacgactctttacttgtcaacagaccgaataaatcactgaaaagaaacatatatttctaataatactaacactgtatatagtaaagatatactgatctttgattgttggttagaataatcaaaattagtaaaccgtttctaccatgcgtaaatggtatttgtatgtaacaagttatctctccatacgtgaacttgtttaccattacccaaatttcgaaccttgagtgagcactttgttaattacctttgagaaaacttagccaagcatggctagaacttcatttgttgccactgccagctccaagaagattagacttggagtaacagtttcctttgtggattcttgtcaagaggtttgaggattttgaatcccataattagttctccaacattgttgggctagttatatatattatagtctttgataccaaaccatgtgcttttgaataattgaatttgtaaaattttcttccaaaataaaactaaacttggtcgaaaaaataacctggacaaaccacgaatcaggggggattttaatttactcatgtgatttgattaatatgtgtatataaattttctcttagaagagaaacaaatctctttataaactgtattaaaatatcacagataatatgattcagaacagatacaacataaacagttgtatatttttgtttttaaatggtacgcagattaagtgaaaatgattaaagattttgttaactataatcttatcattaatcacttacctttgaaagctcgcatgtgtttctcttctccgtgttaaacgctgtcgtttttggcgtcactgttatttcaacacttttctccaatctcaccgaacgtttattttcccttccgttttctcgagaaaatctacctttttccccgagaaatttcattttctctggttcacctgcttgttgctcgcttaaatacagcgatttcatccaaccaacaagtaccttcaccaacacactgatggatcggaggagggcgggtagcccagtgtatggtcgccagtggagcgaatcatcgaacagtacggaggcaacatcaccggcgatgtctcctgctcaccggaaacagctcggtggtatcggaggtttctccaccgttaaacggactcagaacgtagctgccaaagccgcggcacagcgattagctaaggtcatggccttacagaacaaagacaacggagacgaagatgatgaagatgaagatgaagatctaagtctcagattcgcatctgcttctttaaaacctgctcgtcatgcaccttcttctatctcctccaccggaagcaatagcagcaacggaaataataatttgccggctgtttcatttgctccccgaactagatcgccgtctcctgcggtgaattccgtttttctagctgattgaattagctcagattagcttgatttgattgtagttgtggtgaatttgattctttagggctaattagtctctctctttttttgtgctttgattagttaggcaggaacttcgccgagcaagtaccttcttcagtgcggtctgcttcagccggaaggccgtcaatgtctgctagatctacgactccgactccgattcctaatctaatgccgcctagtagggtgtcggtgaaaactccggtttctattcctccacttgatcctccaactcggagcagagataaaaggtgataacattttgaagttcttaaaaattgtgcttcttattatagttctcaaatcttggtagtcaagggaacgtgtgacttagtggaatatgtcaaaaccagtttggttgctctttggagttggtgtataatatgatttttcgttgactaaatatttatcctcaaagcctaataatagaggttgctataaaggttcatgagaaatgggatccttgctccaagaattagagatccctgctggtttttggttgtgcgtcttgcgtttgatttcggatatttgatgtttttaggttctttgctgatgtaccatcagtaaattcaaaagaaaagggtgatcagcgggaagcttcagctcttcgtgatgaagtatgtgattgtttcttttgaaccttttgcggtatctcgtcaatttagttattgtaaattttagtcaaattagaatttgtgtatgagtcataagagttgacttggggctgattcatttttatatgcagctggatatgctacaagaggagaatgagaatgtactggagaaggtttgatctctgcgattgaattttatattatgtaataaagctgtttacttctgttgttcataaaatttattcttgattacagcttcgtcgtgcggaagaaaaaagggtggaagcagaagctagggctaaggagctcgagaaacaggtttttgaactggttgtcttgagtagtccatttttcacttatgttgcgtcttgaaattctgactgaaaaaaatactccacttgtttaaatctctttgtatatcttgttgttatctttttgaaacagcatcccacctcgttgtttaaatttactttaaatcatatatttctaatgtattggcatctgttcaaggtttcatttgtttttatttttggttccaaaaggttgcctctcttggagaaggagtttccttggaggcgaaattgttaagcaggtgggagcctgtgccttctttagcttctcttttcttgctctctttttcagaaaccaaggtggtagtttttaatcgctcatgttgaatatgtctttgtataggaaagaagcagcattgcgtcaaagagaggttaataccctcaatctattttgctgctcagatgtagtcttcttttaatcgagtcattatgtaaaacatacaatttaagctgtgcagaaaatttgtacctgttacaggctgctctaaatgttgctaaacaaaaaaagagtggaaaggatgaggaaattgtttccctacgttcggagcttgaggtaaggttcactgatgtactgttttctatgagatgtaccacttttatttgcattatgaaaccatgtcttatttttctctgctatgttcagaacttgaaagatgaggctacaactgctgcagaacggcttcaagaagcagagtctgaagcgaagtctcttcgcacaatgactcagaggatgattttaacacaggatgaaatggtttgtcaaaaaatcttgggtctcgtaatgtaccaataattgataaggttctgaggttctgactttatgaatgattgaattatctaggaagaagtagttctgaagagatgctggcttgctcggtattggggcttggctgtgcaacatggtaggtgattcatccattcttaagaaaaagagtttatattctgaaccagagaaaatattatcataatattctttgtatcttccgtcaacatggcatatacttgtggtagtaataaatcaaatttacagatatttgcttttcctatggtgtgcttctgtaggcatttgtgcggatatagcaccatccaggcaagagcactggtcaaagttggctcctcttccatttgagctcgtcacttcagcagcacagaaggcgaaggagttatcttgggataaaggctcgtctattgtctgctatagtttaaaaaaattctttgcttgctgttgttgtaaatttttttacttatcaacatatgaaataatgcaggtgggaatgatcggagtaaggcggctagagatttgagtgatctaactggagaaggaaatattgaaagtatgctttcagttgagatgggtttgagagagctagcatcattaaaggtatccataattctttctgagttacctacaagtgttgtcacctagcagatatctccaaggactacgttttcaaatcttcttctctcttttgaatatcaggtggaggatgctgttgtgcttatattcgcccagcagagaaagttgagtttggttcgccacactgtttccggtatgtaatgtatttgcgagctataacaccacaatgacaaatatatgcttctttcgcttctattcttaaaagtttaaacgatggatgagtaatctgttttctgtttagatacttaacgcttataagctcttaataagaaggcataactaaaagcaatttaacttttgttttctctgtatcttacagactccaaaggtcatggagaatccagatttatcgatgcatatggtaacggaaaagtctcactaactcttttctctttgttttccacccttatgtagaggttcttggggtcgaaccctcaacaccttgaatgttgtggaagggtttcactagtatagccacatctttaacccaaaaaaagagtctagccacatcctctcggtctttgacatagtgcatgcgttgttgatttagtaggagtaaattgcatctatgtcccctaccttgaaggattttctgtggtttcaaattttacctttactcaacgcataaaatcatcttctgtagacgtaatcaaccatatcgtgaaatcttatacaatgttctcttgttgttataaatgcagaactgggtgaagcggaacaagaagatgttgcctttaagcaggtactttaacacttacactcatcatgatatacaccttccagctaaaagcctaaatcatccatcgagtgacttgattttgagacgaccacacattatcaatgttgtatatcatcacatagaaagaaaatatccgacaaaaagtaaccacaccgaaacatcttttgaaacgtgtctagatctatgtgctggatgacgaaacttatgaatccaaacactgtagaaccgttacttatcagtttaaatcaagatatcgtcttgattcctacaattacataatgcaggcatggctgatgtacttctggggaagagctaagttgcacggtgtggaagatgacatcgcagaggaacgtgtccagttatggatcagccgtagcagtgggaaatctcagacgacttctcatgatgccttggatggtaaaaccggacttaagccatttcgttataatatctgattcttttgctttaaagctttagcgaggagtagatttataatgatgataaaactaaagtttcccattttgcttgtcttcagtggaaagagggttgatagagctacgaaaactgggaatagagcaacagttgtgggaagcttctcgacgagaaatcgatcagcttccctcgcctacttcttcgaatcacgatctcgatgctgattcatagtaaagtctcttccttttctttgatagaagaaattttcgttttgtatatctctcgtcatgtaagtttcacgaagaatctgttgtgtcattgtattttttatgttttcccttttcacacttaagtgtgtaagcttttggtattcttatttttgcaatcaattccaaaaagttttggaggacgatactgggtaaaaaataggatatcgaaaacactgatcacgaaaaattcatgttacccttactgtttttataaaccatgttttgaggatgggatagaagaattgaacctcgttaatctgtgattagattctcaattttgacacttatatgactcgatgaaattctaaccaaatcctgctttctttttttttgtgggaaattctctgtggttcccgaacagtcattatccagaaacaaagagattagagtacaaaatacgaatcataagagactcaatagtcaattcaataacacttaaaagaaaatcactagaaaaccccttgtttccttctacaatattggaataggatcttccatggcttcttcagcagcaaaaccaccaacacgtccagtggtaccactcaacacaaccacacttccttcggcatcaacatcaacaatcacagaatctccttctttaatgtcccttgaaagcatcttctccgccatactatcctccaaaagcctcattattgcacgtctaagtggcctcgcaccataactcgggtcgaatccttcatccaccactctctctttaaacctctcagtcacctgaagctcaatctctttgacctcaagtctcgccaccacttctttaagcattatatcagcaatctccttgacttccagctttgttaactgtctgaaaacaatcatctcatctaacctgttcaagaactctggtctgaaatactgttttagttcctcagtcactaagctcttgattctgttgtaactgctgtctttctcgtcgtggtcaagatcaaacccaattcttctaccacctttttcgatcacgctgctccctacgtttgaagtcatgatcagaagcgtgttcttgaaatcgacagttcttcctttgctatcagttagtctaccgtcttctaggatctgaagcatcatgttgaaaacatcgggatgtgctttctcaatttcgtcaaagagaacaagagtgtagggcctgcgtcgaaccgcctctgttaactgacctccttctgtgtatcctacgtaaccaggaggtgaaccgatgagtttcgaaacagtgtgtcgttccatgaactcactcatgtcaagacggatcattgcttcttctgaaccgaagtagtaagcagccaaggccttagcaagctctgatttcccaacaccagttggaccagagaagatgaaactggcgataggacggtttgggtttttgagcccaacacgggcacggcggatagcccgactgattgctttaacggcttcatcttggccaatgactcttgtgtgaagggtctgctccatttggagaagacggctagattcatcagacgagactttctctaccgggattcctgtccaggtggcgacgatgtgttggatgtcagattctgtgacagtaggtcctccttcctcagcttcattctcggctttggccacttctttgcctcgagataaaacattagctatctcagccttgagctctatttcacggtcacgatgagaaccagcctgtcgaaagaagaactcaggaaatgtaaatattagtcttggatgtatagagagtaagaaatacttgaaatcgataccatctcgaagtcttggcttcgcacagcttcattcttctctttggtgatttgcctgagttgcttttcaagctctctagcttcctcaggaagctaagcaaacgaaactttctctgaatcagctcaagtagatataaacacacatagttctttggtagttgagatacatgcaaatattaaacctgagcatggcgtagtcgaacccgagacccagcttcatcaatcaagtcaatcgctttgtcgggaagaaaccgatcactgctcattcaagagaagaagctgggttgagataatgctgcaatttgtgtaaagacaatgttctgtgttggtgaaagactgaaattgaataaaataaaaacctgatgtactgatgtgacaattgtgcagcagcaaccaaggcttcatcagtgtatcgaagtttgtggtggatctcatagcgctcacgcagaccttgcaaaatctgtatagcttcttctacagttggttcaggtactttcacaggctggaaccgtctctccaatgcaggatctttctcaatgtgtttcctgtactcatcaattgttgttgcaccaatacactacaaccgtaaaaaaagaaaaaaaaaacatttcgtaaatcttgagtttacggttctaattgacatttcgacagcattagactgataaaaagaattgagaaaatttacctgcaattcacctcttgctagagctggctttaagatgttagcagcatcgatcgcaccttcagcggctcctgcaccgatgagcgtgtgcacttcatcaataaacagaattatctcatcactttgcctgatttcctccataagcttcttcaatctttcctcgaactctccacggtatttcgttccagccactagaagacccatatcaagggttataacctgacaaaaaaagtaaaagtaaatatttatacatatttatgcactctaactaagcctattaagttcattaaaaatgatccaacgggagaatatttaccgtcttcccctcgattgtttcaggaacatcaccactagctattcgctgtgcaagtccttctgctattgccgtcttaccaactccaggttctccaataagacatgggttgttcttggttcttcgagccaagatctggaccattcgttcgatctgtggctgccttccaacaaccggatccagtttaccctgccatagaaagagaaaaaccaaattttagtagaaaccttcaagcattaacatgacactctcttcaaaatgagtacacatttttagtacctcctctgctagtttagttaagttagtcccatactcttcaagtgttggcattttgctgtttccgctgcttcccccaccaacgcttgctgtgacttcattgttttccccgaccatacgtataacctaaaaatgatatatgtatctcaaaatgttataacgaaatggtttactaagacataacattaaccttagaatccagagttggtgcatttacctgtgtccgtatattactaggatctgcacccaaattctccaagacacgagctgccacaccctccccttcacgaagtagaccaagcaaaaggtgctctgaaccaatgtagttatgccctagatttcgaaatagcaaaacatttcccaaatggagaagaattagttagcttcatcagtcaagaaagcttatgtattgcacaacacataacaagctccaaggctaaatattcataatagaaatagacccataccaagttgtcgagcttcctctagtgacaactccagcacccgctttgcgcgaggagtaaatggaatctccactgccacgaatccactgcctctcccaattatcttttctacttccacgcgtgaatctttaagattgatccccatggatttaagaaccttggcggcaatcccagtcccttctccaattagacccaacagtatttgctcagtcccaacaaagttatggccaagtctccgagcttcctcttgagacagcattatgaccttaattgctttctcggtaaaacgctcaaacattgctttgggtacacatcggctagctttttctctcccagatgattttgcaagtttatacttaacaaggaaacctggactaggccttcccaaataatctaatgcactgggggcccttaaccctgagaagctctgaattgtcagaagaggtgcttgtaaactggacatcatcttcacacgccctcttggttctctgtattctgtggcctgaattctcagaacaggtgcttttaaactgctcatcttcatcacacaccctcttggttccctgtattctttggcctgcacatgccttccgggaccaaaaaaaggaggtgtaagaagagctatcgaccaagccatgatgcaatgttggaggctgcattgggtaatggtagaacatcagtattgctaattctcttaaacacgtatacagaaagagctcaggcacaaaaatacacaatttcaattcaccaactaagagcagaacaatgtcacaaaagcttgagctatgtttcttatctccaaactctccaaagcaaaacaagcaatcatctttgaacaaatcgaaacgcgaatacacaaccctaatctcaaagtaagcatttttgcatatcaataaaaccaaataaagagtacccagattcagaaaactcaaaatgaaaccaccaaaagaaacgaaaccaaacgccatgagaaatagaagaaaagaaaaactcaacctttaaaacagctcacacaacagagaagcagaaacctaaaagcttcttcaatgaaacacaacaacaacaaatgaaaaataaaaacagactgagaaagagagtgagtgtagcaaagaaaagggttttatgtgtagcaaagaaaagggttttataccgtcgacgcctttggatagcgaagttggagaaagcgagagactccttttattgggaaagagataggaaagtgaagaagaagatacccaagagacaagagatttctctattctctctctctttatcttctctcgcatcgccgcccttcatagattaaacacactcacctaccaaagttgcataccagccgttagattactcataagtgtattccaccgtcggatttaactactttttaaagagtcaacctcaataagaatcttgttcccaaagataagggtttgtgttgagtttaagaccggtttaatctgaaaactccgtcaaaccaaaaccaaaccgatttatcataaaaaaattcatatcatctacttccattggctagagacagattgtaacggtgtcgtcgtcgccaaacgatttgcctcttcctaaaggtaggttcttcatttctctcagtgcccctttgcgtgtttcagcttcttctttatgatctaattcatgtctatgtttcgtttgattctttgttcaattctgaattgagaaaatggcgattcgagatctgtctcttcggttttttagttcgactgatttgggaatgtgaagagatcagattgatttgttgacagagtcttgggggttttcaatcttattcctctagattttcgaaattcgattcctttacatcagatttcgcttaattctctgtcctagtgagttttacgatctttagtcttctggtttgtcaaattctatgtcttttcatgttcttctgagttttaatggttgatcttcaattacttggccacaatctctagagtttgagactcttgacttgtcttgcatatattcctctgtagattggttttatgtttggtttcaattccttgttgaactattctgatacggaagttttcctttctaaggtttggtgtttcctttttctgataaatagtgatgaagatcgattatgatgatcatgtaagaatataatctagctttggtgtttgtattggtttacctgagggaagaaaagtctttctctttgggactttaaactttgattacttaactccaacattatcatagttgggttctgtagttcatttcacttatagcagtaataactcattgattgatgcaatcaatcaatcctgtgatggaaatggaatcatggaaattgagggattcagggaggattgattgattagaatttcatatttatgagagaataagagaactgatgtgtgtttcttttcctacttcttaaagttgtgctctttcctatttctataagctcttgtggataacaacagttgattaacgttcttatgcttgtttagggtacaacaagaatggaagaagagtatgagagtcgtcgattgaggagatgggaagagttggacactgacatcttagtaagaattttccagaagtttagcgtctttgagttgacttcgggattagctcatgtttgtagaggatggagagctgcttgttgcgatccgattctttggaagacggtggatttgtcaaacatgagatctagtttcatcaagatcccattagagccttatgtctatgtggaacgccgatctgatgaggccctaacccgcatcctgaaactctccatgaaccttagcggaggaagcacgaggaccttgatttttcatttcaacttgttcttgagtgatgatcagcttacttacaccgcagaaaggtatgtccttttcgttcttccacttatttgtcttccaaattgtttcatcatggccgtaaactatggttttttagtcaaaagttggttcagtttttggtttggttaagttcatgtacccactttcagtcaaaattgctgaattacaattaagctgaatctcgcaaatgctaaaagttgaaaaatttgttgtactgaatattttgcaggtgtccagggttgagacgggtcgtcctaccggcttggaacagaataaagaagactggtatatgcaaagcgataagaatctggaaagatctagagtcactaacaatgccaagcatcgcaaacccgccttatctcttaacagaaattgccaagaactgcaagaattttaaagagctgaagatcatgggtccattcgaggtcttctttgcaaacacgctcatcacttgcctcccaaacatcaaaacactcagcatcagatgctcggcgataaagcgggaagcactgatgaaaatccttgacggattaccaagccttgaagtgctcaacatatcacactctcacctagtggagtacagcggttggcagcctcagcagaaggtgattgttagagagctcgataagacgataatggagaaaacagcaaggctaaagaaattcttgacttgcatggatcacaagacgtgtgtgatgtgtcagaggactgaaaacgatgaagggattgtgagatggtacaagtatgaggaaggagactggaaggttgatgaagtgagttctcttcatctttgatgtttctgctgtgatcattctctgtgaaggacttaacttgttattgttctcatctttgactgttgaattgtttatttctttgtgttgtttgttttgatttgaatcgtattatgtgtatatatctgtaggctatgccaatgaatgtctgtagtgatcaacttttgatcaccaccaaccttgcacaccaaataggaaaataaaacaatattgttacaattatttgtcttgatattagcattattagtcacatttgttttgcaaatcatctaccttttttttttggtctatatcttattcttcttagttcttacctaccagtcttctccggcggcattaacgacaccgttttatcgagctcagccaccactagttaggtaacgatatatattcttaaaaacgtttagaaaatttctatgtatgtttcacacgaacaaaaagaaaatatttttcagacatcaacggtcattatggacgacgactgttaaacaaaatcgtttaaaattcttgttgcgtaatttgaccattttattttattttataccaaaaattgaagatattatatatatgttttaattcgatcgcaaataaatctgaaaattaaaacacaaaacgttactcttctctctcattctctttcgcttctcgatagcttctcaaatcatggttcagcaaatatgggagacgttgaaggaaacaatcacagcttacactggactttctccagctgcgtttttcaccgtacttgctctcgctttcgccgtttaccaagtcgtctccggtttcttcgtttctcctgaagttcaccgacctcgttctttggaggttcagcctcaatcggagcctcttccaccgccggttcagctcggagaaatcactgaggaggagcttaagctttatgatggctccgattctaaaaagccccttcttatggcgatcaagggccagatctatgatgtttctcagagcaggtatttcttgtgaaatctttacttgttcattaaattatgattgaatccaaatgatcactagttaaattaccagtaataaacgattcaacccaatagtttcgagatttggggtttaggttagttaatcatggttgactgtttgatttataatccgaagtttccaattactatctatcttatgattctagtatatctactgatgctcgaactctagtttaagtgattctttattgtaaaactgaacacttttagtaaatctttttgatgaatattctctcctttttgttcataatcttatgatgctctttttattgctttttgcatcttagtgtttgttttttcacttcttttcttggaacaataccattagaagcactgatacaattgtattgtattcaagttatcggaaagatctctactttttcttatactagaaaaacctgtatttagattacatcttggattagtagagattgataacgtacaaactcgtcaaaggtttggcttctaatattgctattgtggcgaaagagatcgttcactgattaattatccacatttgcttgctatttgtgttccatgacgtttgtaaattaagttttggcgaacattgttggtatgtaaccatgctgcagttgtctagatccctgacttgtcaactagacagttcttttacattccagttaccgaaaacttcgttgtggtaattaggttttgtgctagatgaaataatcacttcagtgatcataccgttttgcttgttcatagtggcgacagacacagacacactcatcaacgcatatacatgtcgatgtatatgtatgcataacttttagtttttttcttgtacatagttcatcagctgtactacatatctagatgaatcatattcatatgtgccaagctgtagtttttcattcttcaaactctacttaactcttactggtcgctaatttgcatgaccatctgttctttttatgcaggatgttttatggaccaggtgggccatatgctctgtttgcagggaaagatgcaagccgagctctggcaaagatgtcatttgaggaccaagacttgactggagacatctcaggtctcggtgcatttgagctagaggcgttacaagactgggagtacaagttcatgagcaagtatgtcaaagtcggaaccattcaaaagaaggatggagaaggcaaagaaagttcagaaccttccgaagcaaagactgcctctgcggaaggtctttctacaaacactggagaagaagcttcagcaattacccatgatgaaacttctagaagcacaggcgagaaaatcgcggaaaccacggagaagaaagatgttgcaactgatgatgatgatgctgcaaaggagtaaagtcaatgtaatgagaggcacagtttctcttgagaaattagtgagatttttcagggtttaagtatgagtcgtatatagctcaataaaaatggtgaccttgtgtgtactttttggatcttgtataatgacatctaattctggttatggaagcttcaaaatacattatttctacagtattaatcgataaacagttctataattcagggtttgttcacttgttgtttatgcttagttcatatttgacatcctgctatgtgcctggtaattgaagatggttcaattcctaaaatcgaagcaccaacttacatttgatggtaggtctgttgccgaaccgaagtgaagaatttgcaataattttggtttcggtttggaaccttcaaaccgaccggtttcgaattattattgaaccaaattttcaaaattcaaatatcttgtcaaatcattttcttccctctttctgtctctgtctctctctctcgctcgatctcgaaggtgaagctatgggagtgaagtatctttgggatgtcttggagccttgtaagaagactttcccactcgatcatcttcagtgagttgtttcttcgtctcaatttctctttaatttttctgggtgtttaaaaagaccaagtctttacgagatcttcgtaatcgctgtagaaacaaaagggtatgcgtggatctttcgtgttggatggtggaattgcataaagtgaacaaatcttattgcgccactaaagaaaaagtttatcttcgaggattttttcatcgtctccgagccctaattgccctaaactgctccatcattttagtctcaggtaatttaattctaccctactgttgaaaattgccatcagaagagccaattagggtttatgtagtgttgtattgttgtcattgtgaattgatttgagtaatagaagcatgagtggtcaaatcagttcttatttattgatgctttgctctaaagtttagttttttcaatgctattgagcatacttgacttgttggaatgtggcatgtaattgtagatggtgcaattcctggaatcaaagtaccaacttacaagcgtcggttaaaagcaagattcgaggtacaatgatgtcaaatgtggcacttgtggtttcatccttgcatatgatggctagtttttggattgtttttttcgatttcgtgctatattggttcagccagatcgctgacgatggtgttgagcctagcaaagagacttcactcaaaagaaatatggggtctgagttctcgtgcatcataaaagaggcgaaagttattgcatcaacactagggatactttgtttagacgggtagggcttcaagacagttagcttagattgacaatgagactttggtttgagtgtttaactttgcttatgagactttggtttgaatgtttaactttgcttatgagaaactgattctgttctgtattttccatcaaatgcaggattgaggaggctgaggcgcaatgcgctctgctaaactcggaatccttatgtgtaagacgcatttttcagctttaatcagtttcttgttcgtcatgctgttaacccaatattcaatgatcatccataggacgcctgttttagctttgattcggatatcttcctttttggtgcaaagactgtatacagagaaatatgccttggtcagtggaaagagactctttagtgtgttggtttcttttaccgtctgatatggttaatagtattataagtcctaataaatttgccaatgaactaggtgaaggaggttatgttgtttgctacgagatggatgacatcaagaaaaagcttgggcttggacggaactcattggtaaattaacaaacctctttaagtgattagctttatatacttaaccctgatctttcgtttctataaagctgcaccacgttattataaaatgattagattggtagaagcatgaatgcaatgcttgcaaaaggtggcctttgatattttataaactcaggtgagatagatactatgtgtatgaatggttctactgcaacgttgtagctttaagggctcaattcctttgttagcatcagtagacaagaaaaccagctacacattgttgagtgttgactattattccatgcgtcaaagaactttaaaatcttagctatgtttcatcaaatggtaaggtcatgtatacaatgttttcttgggtgatgttacagatagctctagcgcttttgcttggcagtgactactctcagggagttcgtggtcttcgacaggtgtgtagataactcaagcttttaaacctccatctatcggggtcatatgttattcgaggttgtctgttttatttagaattggattacaaaagactcacgattaaacttcttctgtgtacaggagaaagcttgtgagcttgttaggtcgattggagacaatgttatccttgaaaaagttgcatcagaaggactttcctttgcggaaaagccgagaaagtctaagaagcaagttaggccttctgtgtgcagcaaaaaggggaccttacctttggtggttataaatggtaatgaaagcaacaacttctttgtgtttttgatatgacatgattttggtgttaccccaaacagaatgtttgtttatcattgaaaagctctttccataatttcaacttgttgcaggaaataatcgtgatccagaaagactggaagagatcaagcaggtgatcgatgcgttcatgaaccccaagtgccaccaagcagactctaatacagtttccaggttaacccttctttccatttctttgttgtcagtcctgtgatgataattcttctccagattatacctatttgtagagctagcacgtgcataagcccatcgttagtagcaatcatctgccacaaggaatcacatatttttgtcctgaattaagtcatggaataatatgcttccccaaatgcatgaaagaaatcaaggaatttctgatgagtaataagcttataataggaatgtctgttaagcctggagattggtgaacttgaaaaaaatttgaatgttattcagattttttataaaggaagtgctataatttatatactggttttgcagggccttagctgaattctctttccagcgcaccaagctt

SEQ ID NO: 87 - DNA, 85109 bp, Arabidopsis thaliana
aagcttcacaaagccgttatcactgtgtcgtaacaagactttattaagatatagagtcttgaggtttggaagaaaaacatcttccacatcaatgaaggcaccgtttccagtttctattctcagatgaaccagtgccttgctcacaaagatatctggaggcatggtaccattatcccaatacacaatacaacgtagatcaagatccgataccccgcgttccatcacatttgatatccaacgagatacacaagttggatcagtaaaatctcggcatgttagagagaacttgttgataggataatcaccctgcaaactcaatactctatcaacgaaattctcaaatattgtctcatttctttctccgtcaggattaagatatactacagcgtcatcaaactcaagatttggtctgaaagcaaatagatgctgccactttttcgaaagtactgaagtcaaagccgaatcttctatgggaaggaatgacaagatgtggcaaataagagcttctggtagatcactaattatatctttttttgaatgatcactaattatatctttgcaacatatatccatcctttttgaatctactttgacagatctcaaacagttacaacctgaaaaatgacatgatcttgagttatgtaatttattttaatctgagagttttagatgtatgttcgggaaaaaacacagttacgaatgaacagaagtcgttaaaatccgacacgacagaataacaaaaccatgaaggagaaaattgggaaactcacataggtagtaccccacggtattgagaactttgaacatcttttgtaatcgtggcggaacgggtgacttctggtttgtctaaatttctttctaaaggtcaatttttatgagaaaatgtcgatcatatatgtggaacaatgatcgatcgagactagtaactgatggatgaaaagaaggcaaggagacttggtctctctctctctctctctctctttatttattttactttactatgtagtgcaaaagaatgttctttgttctgatagacatgattgtcactttctcattttcatatggtgttacttaattttgatatcaacttttcaataagaagtacaaaaaaagatagacaatacttctatctttcttttttggggcaaaaagcaaaaagcaaaaaatacttcaatctatcaataaaagtcctcgatttatatttcaaaataaaacaattctgaaaattcttaaatatgtacttggtaaatttaatttttccccagaggaggagttttacataaacctcactgtcactgcaacttttactattaaccttgtgactgatttacaaagctcaaagatgacttatctaaaccaagttttaatgactcatatattattagatttatgttgttaaaaaatcagatatataaacccaattggtcatgtaagaccggtctgatccggttcaactatatatgatggttgaatctctataaccggcttacctacacatattgttaccgttgctatttgcgctcgctagtcgcgctatatatataaccgttgatgttagtgatgaggttcgatttcaaagctcatgaaacgcatcaatgtcgatctccatcttctccattttccgaaattcagaaaatttcaatcacgaaaagtatcttcgtccctacccaaattggaactcgatcagaaatcaccacaggagacagttttcttacttggtcaggtacttgacacttacccagatatcagaacacttagaacagtccactcaagaatcattttggaagatctacgttgtaattcttctttgggtgttaaacttatgagagcttatgcttctctaaaagatgtagcgtcagcacgcaaggtgttcgacgaaattcctgagagaaacgtaattatcattaatgttatgattagaagctatgtgaataatgggttttacggtgaaggtgttaaagtgtttgggacgatgtgtggttgtaatgttagacctgatcattatactttcccgtgtgttctaaaggcgtgttcttgctctgggactattgtcattgggaggaaaattcatgggtctgctacaaaagttgggctctcttcgactttgtttgttgggaatggtttagtttctatgtatggaaagtgtggatttttatctgaagcaaggcttgtacttgacgagatgtctaggagagatgtggtgtcttggaactcgttggttgttgggtatgcgcaaaatcagagatttgatgatgctttggaggtttgtagggaaatggagtctgtgaagataagccatgatgctggtacgatggctagtctgttaccagcagtgagtaacactacaactgaaaacgttatgtatgttaaagatatgttttttaaaatggggaaaaagagtttggtttcatggaatgtgatgatcggtgtgtatatgaaaaatgcgatgcctgttgaagctgtggaattgtattcccgaatggaggctgatgggtttgaacctgatgcagtctcaatcacaagtgtattacctgcttgtggagatacctctgctctgtctcttggtaagaaaatccatggatacattgagaggaagaagctgataccaaatctgttgttagagaatgcactgatcgacatgtatgcaaaatgcggatgtttagagaaagctagagatgtgtttgagaacatgaagtcacgtgatgttgtgtcttggacagctatgatttcagcttatggattcagcggacgaggctgtgacgcagtggcattgttttcgaaattgcaagattcgggtctcgtccctgattcaattgcgtttgtcacaacgcttgctgcttgtagccatgcggggttactagaagaaggtaggagttgtttcaaactcatgacagatcattacaagatcactcctaggttagagcatttggcttgtatggtggatcttcttggccgagccgggaaagtgaaagaagcttacagatttatacaagatatgtcaatggaaccaaacgagagagtttggggagcattattaggagcttgcagggtgcattctgatacagacatcggtctactagcagctgataaacttttccagttagcacccgagcaatcgggttactacgtattgctttctaacatatacgcaaaggctggaagatgggaagaagtgactaacatcagaaacataatgaagagcaaagggttaaagaagaatcccggagcaagcaatgttgaggtcaacagaataattcatacattcttagtaggcgacaggtcacacccgcaatccgatgagatatacagagagctggatgttctagtaaagaaaatgaaagagttaggttatgttcctgattcagagtcagcgcttcacgatgtggaagaggaagataaagagacgcatttagctgttcacagtgagaaattagccattgtgtttgctctgatgaacactaaggaggaagaagaagacagtaataataccataagaataacgaagaatcttaggatatgtggagactgtcatgttgcagctaagcttatctcacagataacttctcgagagataatcatcagagacactaatagatttcatgtgttccggttcggtgtttgctcttgtggtgactattggtgaaccaaaaattaataaatgttaactttacaaaaacgcagcgttttggtgaaagtgaaagttacactttttagacaatatctagttgggtttcgacgaatgagaatatgacacgtcatcaccggtaaggaaaattcaccaaatagatgatagcctaatctgcaaatctttgtccagcttctgagctcagagatagagagagcgagaggttagagataacagtagttttaccgatgattgagtcggttatggccgttcgtctctccaccggattttgctcgtcgacggcgttactccgtaagctctatttatgtctctgttcttcaattctatcttcattgagtttttgtttttcttaaagagtctttgttcattcgtctgaatcgtctcatgctaaatttgtagagtatcgtacagcaccgagctcggaggagggaggaaactgcttccattatgcgtcccgccgcgtttttcagcctcaacgtatccaccatattgatgggtaatgaaaaattcactttgttccgtcattaaattgtaaaatagttttgagagttttcgtttcaccaggaggatagattctagtatttgagtgctgagtgtataatacgagtgcaatatgtttcttgtcagctgtgaatattgaatttagtgtgaagcggatgttcctcgattatatgattatatggagatagagcactaagttagatgcttctttagtgagccgtggaaacattcaaagatcgattcttttgaaattacagattctgaatattttggttttctttatataatgtaaatctcacattcatatatgcacttttctaggagtgggtttctgaagtacaacagtgactatataacaagaaaacacctacggaagaatcgaactcaagccacagctgagtatgtagattcagcttcagatccagaaaagcaaactggcaagtcaaggtatcatccttcagaagaaatcagagcctctttgccacagaatgatggagattccaggctttcacctgcagaaactactagaaccatcattgaggtgttatattgcgtctttcaatcagcataagctatctttttggtgaaaatattgttagaccaatgccttatgttacatgcttgttgttgcagtcacatgttagtgcatttagtagttttgcttggtcctattataggttgcttcaacattcatctatcaattttcagtagtcctctaatcctcttctgtagagaatagtttttttttttttttttatcttctcaaagtctatgtaagtctgcattacatatattgcctttatgaatacatgttcctccattttcagttttcctgtcattatttttgtccatgatccgtttttgtgcatctaacatttcccgtagtgtgtcttgttcaggtgaacaataaaggaaccctgatgcttacaggttctattggtgatggagttcatgagaatattctctggccagatataccttatataacagatcaaaatggaagtaagataaaatttaattatccttagttccatgtcattgtttaatctacctaacatcgtcacgattaaagcgaatcaccctaatgccttgcagatttatactttcaagtaaaggaggatgaggacgtcatgcagtccgttacttctgaaaataattatgtggtatgttgcacaagacattgatatcctatttacattattatatgttccaagtgcttcaaatccaagctttgtctatgagagatctgttattttttctgttgcagttgctaaagcatgtatcttctgacggtttattttaaattgaaacgcacatccatacatcaatatgagccttctagcttcaatatgtttctcttgattataactgactatactgatctgtgtagtttttatcctctatcttattctgtactaacctttaagatgttatggatgcattgcagcaagttatagttggttttgatacgatggagatgatcaaggaaatggagctgatgggactttctgatagtgactttgaaactgaagatgatgaaagtggagatgatgacagtgaggatacaggagaagacgaagatgaggaggtttaacaaattttatttcttcttttatattaagtcactaaggaattctatgacaggaatactgttgccatgtcttagcatatttcactatttattcttgacttcaggaatgggttgctattttagaggatgaagatgaagacgatgatgatgatgatgatgatgatgaggatgatgatgattctgattctgatgaatcgctgggagactgggcaaatttggaaacaatgaggagttgtcatcccatgttttttgcaaagagaatgactgaggttgacttttagaattcattaaaaagaaagtgttttggttctttataaaaacgatatgcaagatcattttcaaacctgaggctaaaagagaatgactgaggttaacttttaacacatttgtttgttgtcaaatttaggttgcttcaaatgatcctgttgattggatggatcagccgtctgctggccttgctatccagggacttttgagtcatatcttagtggaagattattcagatatccaaaagaaacttgctgatagcaattctacaactaacggaaacaaggatgcagaaaacttagtggacaagcttgaagacaatagtaaggcaggtggtgacgaatctgagatagattcatcacaggatgaaaaagcaagaaatgtggtggcgttttacaagctggagatgataagaattcagcttatcacagcacaaggggatcaggtttggaacatagcctccatcttttctgtgtaaatttattcatgttcttgcaaaactctcgtctatctaaccattgtcgcatatctggaaaactgtgttacgcttgctcttgctttgtttcttgattggcaaatctcatgattctcgttttcaagcttcacttcttatgtaaactcttctttttgttgcaatcttatgcttactagtatcttttaaacttttgggaacagactgaagttgaggtggaagatgtcagaaaagcacaacctgatgctattgctcatgcatcagctgaaatcataagccgtttagaagaatctggtgataaaataactgaagcactcaaatctctgtgttggagacataacagtattcaagcagaggtaaatagcttcaacttaactctagaagctctggaatataacaggatatctctgtaggttttggctgtgtacgaatagatgatcgacgtcattcctttttgtttgcaggaagtgaagctgattgggatagattccctaggttttgacctcaggctttgcgcaggagcaaagattgagtcattgcgatttgcattctcgacaagggtacatccgttcttcctttcatgttttaagatcttgttcctgatctatgatattttaagaaaccgtgctgacataataattgatggtattaacatatcatgccaatcaaaactcttgcaggcaacatcagaagaaaacgcagagggacaaataagaaaactattattcccgaaaacgaaccagtcgacacaaccaaaaccaaaatgaacaagtcagagggaatgttgacgctgtagtaatcttctgtgaagctgcagagaacagttccatgaaccaaaatccaaacaagcaatgcatatgtttctggaacaaatatgaacaagttcttggagatctaagcaaaagagtaagatcagtgacttcaagcaatttttcaattgatttttgaacgctgtaatttcgtgttaaatattggtttcaagtttgtgggttactctgcacaaattgggcattgaagttccaacccattattggtttcaagtttgtgggttatcttctgtttgagttaatgtttttttcgtataacttacaaaggaattctaactataacacaaataactgttgtttctttatgaatgaaaacgcattcttataacatgcaagtgttaagcaaaagagctaatacaaacaaacaatcgaaactctgtgacaatttcttgtttgaatggaagtcaataaacctttcttattgccatcgactgtgacgccttcgaacagccccttctggattaagagctgactcgtcaaacttttgtctctttgcctctggttcctctggtcgtgcagtttgcatcatccccattgaagcgtctgcagactgaccataactataaagataaggaggatacatacgctgatattccagtggaagccgcataaagcatgcaaatcaaatcacagcttctcaaatcgaagacagcggaaaaaatccacaagaacggtctccgtacaagcatcatcagaaggctttactactctagaatacgcatcaacaacaacattatataaaccgaacacgctatttgttggctccatgaacttaaactgaggtttcataacaactttcttcatcaaatctcaaaaaaaatgcatcccgtaacacgccacaaacagagctgtgaacttcataataccaagctctttgagtgagatcccgccaccaaatgcataaggaaaattatagctacgttttagacacttctcatgaggagctggagcattacgttggatttgtgttagctggttaatcatcatcgaaggccgttcgggtggatccatgatagcagaatagttgtcatctgccatgtgagcaaaacagtcaactccatacacaaaaccatgcaaatcaatcatagcagtttccactccctcttccagcttaaacaggtgaagacggtggaaaaacccctcaagcacggtcgccgtacaagcatcaaacttcttcagctttttagaaggctttaacactctggaatacgcagcagtaaacccattgtaaaaatcggaacggctatcggaaggattcaagaactgaaacaatgggttcatatacactctcttccataaaccacaccaaaaatcaaacccatatcgcaccgaagactgcgctgtcagcttcataacaccaagctccttgagtgtaatcccctttgcagggactcttaatgttagtctttttagagtaggagacctaaaagaatcacctacactttatattcactagtaagctgagatcccagtggaagctgcaaaaccatatcaggctgtgtttgtgctactcggttcatgatcatcaccgaaaggcgttcaggtggtggcatggcagcagaataatcttcatcagcaatgtgagaaaaacggtcaacaccactcacaaaagcatgttaatcgatcgcagcagtctctactccctcctccaacaaagtcaaacaaatcaaccataaccgtatcccttccctcctccagcttctccaatcgaagatggtcgaaaatacgatcaagaaaggagggagaacccttggaatgttttaatactcgtgaatacgaagtaacaagggcattaaaaagaccgaagttgctattagttggcttcaaaaagtcaaactgctcatggctcttaacaattatcgccttcaaatcccgttgaaacaccttcccataccccgccacaaactgcgcaatgagcttaataatacaaatctgcttctccttgagtgagagacacctagtggtggcgtatatacacttctagaaaaggagagaactaaaataaatgttctcaagtaaacgtcttgagagttttattcattaatatatatgtattcttgtagccacatattgggtaaacaattctcacatagagctaacaaagtcaacgatatccaccacatcatggagcagagagttggagttcacaactctacagttcaatctgatttgtccttgagttcctgtagttggtgtaatgtttcccatcctattcattgcctccacaaatgcattgaagaatgtttgtgtgccatcagcatatgctctcaccaaggggattgtgtcagtggcattggggctagagaacaactcttggtcgctctggataagaccttttcgctctttgagattcacgtagtatttgttgtcgaaaaccgtaggcgtacgtagatcaaaatctaccaaggcacttcgattgccattaagggggcatagtccacgaagagtttggaggtaagtagtgttgagtgtagggtcgggtaaacctgtgttgctgaaattgtataatctgtcaagaataaactgacattgatttttaccaaatgtgtgaccacctaaacaaaacaaataccataattagattagtaataaactatcgctaattgatattgtatcaatggtgtttaattttcttttgttaattaccggagagagcaacgagatcagaaggacgatcgagaccaacatttctgaagctggctttaagttgtggaagtgtaaagaatggagctggaagatttgcattagcgagttccaggaatgcttgtaaactgtctctccttcccaaaggaaccctccaagaaggacctcctgcctatagtataataaccattatattacaataatattttcttgagattatttttaacatgtaaagagaaaaagagagtcatgtaatataaattcattgattagatatatatacacaaagtaaatttttatatatccactatttcttgagaaaaaagttgaatattattcttttgggttaatatgatatcaaagctagtgatatgagacctaattttgtcaaattttcttaacgggaccacgcgcttttttcaattaatattgaatacttttcatattgaaaacagtgtttgtaaatgaatatgggacaatggagcataccaaagtgacagattgttgagctgcaatggtgagcatatctgcgcatgaaacggttcttgggcatgccctctccaccgcagctttcattctatcaatcactggaaatccccgagccgaatttgcgtttccaaacgcatctttctctgttcgaaatgatgtcgtgttgtctaacaagatggatgcgtcacaaccctttcaaagtccaaaaatttatttaacaaatcattagtcatgaatgtattaaaaacttttttgccattcactaaaaccatttgttcctctgaagcaagtaatcagtgaaggtatatctgtaaatatctaaattataatgaaaacaaagtgatagagaaactcctttaaccaattttaactcaatagaaaataaaccataccgaaataatatttgtataccgaaatacttatatataatcacattaaaatatttaaattcatcaaaattttaattgaattataaaaattaataatcatgattttagaattattttttaaatatatatccctcaaccaaaaaagaaaaatgattgatggatcttaaatttctatcgtgtttggtacggcaccatgcaattccttagactgtaacacggatactttattttcgtgaatccgattgcataaatgttttggcatcatcattgtgtaagaaattaacaactaaccagtaacatcactgtcgatgagtaatattaattttcaatatagaaaaagaaaagcagttaacaactagtaacatctaactacgtgaaatttagtctttgagcaaaaagagtattaactaagacaattgcgtgtgctgaatctgctgatgacaaaatacacttgttatcacttttgtttcctactttttacactgctttactaatatttaaaagatggccctcagtaatccgcaacgctatagatatataaaaagtaatatcttacattaacaaagcagtcgtggaagtgaagacgaaggatgctcgcagcgatacgagggtccgaccttaactcatttacaatggtttctcgtacgatgttagtgacattaggacatgacctatcgtagaaggtaggggtgagttgagcagcggacaaagatgcatgaagcataagacatcccaatgtgattaagattgtccaagtggacgatgttgaagacgaagagaaatgcatttttgaaagaggaaaaacaaaactagttgattctgtttacccgagaagatgaggaaagtccatatcttagagaatccttttataggcaaaacgggtcaaagctggaggcattttctttttctcaattaaaggcttttatctagaacagcaaacgaatagtttccttttgtcaattatttcaactaacgatacatataaatgaggtattattccacgctatctacatggaaagtaaaaaaaaaaaaaactcaaatctaaaatgtcagtttatctattggtataaccgtataagttttttttttaacaactataaccgtataagttataatgtctttttgacaattgtttaaaatttatttatacatatttactatcaaaaacttaagtattcaatataaattgaagaataagggatgtatttttcggatgtcaaaattcgaccataaaatataaccaatatgaaaaatgcttaagattaatatctagagtatattcaaaatgcatatcttgtctttttaattatcacttaaatctttctcgctctttacaactaatgtggaacgctaacggaaaacacaaatcaagactcgtccaaatacgaatattctcttacaaaggaaaattattttttgacactcccatatataaatttttttaaaaaagaaatagaatttcaactcgtcttcaattttgataaagagaaataaaaatttcatagatgcaaaataatacaattttacagccaattgtctctttatttctgatagtttatatgaatttatataaattgtctgaaacaaagataattggttataaaattgtagtatatatatatatatatatatatcagattaaaatgacttaaaaacgtaagcgtgtctatttctagcgtaatagactcagaataccttacaaagttttagcctttggatgaatttcgaaaaatatataataactcagaaaactattgcactaaaactttagtcagaagaaatccataataattgtaagataataaactaactcctcgacgacctttcaaaatctcttggtcgtctccactaaaagacgaacaaatatcaacatcgccaatagcttttttttccttccattttctctctatctctctttatttgaaaatgagaccagcctcgtgtccgccacgttattcacctatactactaaacggtgccctcttcctttgctcaagttcctcatgatctctttggataaagacataagaatttaaagtggagattatatcattccactagaattattggttctgacattatgatgtaatgttagtatttacaaaatgtaaagtttcatacaccaactcttatataaagaaaataaaataaaaaattaaatatgtttgtacaagaatgcatggagatctatagactatttctttgttcatatatatgtgaaaattttagactttacgggttcacttatttatcgccttatcggatttaattataaccggcataaacgttatctttttgagacttccggttaggctactgcagaaactccatagctaataatgatattttgcttcaaaaacatattaataacgagatcgaatatgaacggtgtcgttttctgctgacatgcctgaggcaataattgtcgttgaagataaaaacaaaagaaagaaatatcaaacgagattttaagtatacacgtatatgacgtatagcgacttaatatcctcaccgcatgcacgtcaacaagattagttgtctaatctatctgaaatttaacaattcaaccacatgaaattgtccacatttgggcccaatatgcttctgaaaaaatctctcaagatctctgactattttgttttgtgaaaatatgaagaaagaaaaacaagaaaaaggccacgtgagttatcgtgagaggagagtagcagcaacacacaatcctcaattatagaagtgatcacgtcaagatcttccgaccacagatccaaccaaaagtagactttagcagccgtggtaccaaccctagccttcaagtcgtttgcatcacccatactaatttattaatatcaaatgaagtaataaaatcttaagtcatttgtccaaaaaaaaaaaaaacagatcgtaacgcaaaacacaattgaaataaagaaattaatttgcgttaacttctatctttgacataaaccagcataatataactgcatatacagtacattcttttctttcatataaacaaaatataatgtcctattaaaagataacgtataataatatatctctatgtatgcattaaagatacagcatatattaaatggatttgaatcaaataaactctatgtgatcatgtgaccgacgacagccaattattttcatacaacgtaaaaccgaaaagttagctagaattcacttgaacacggaaaattaaagaaaggcgaaaacacgtttgataaatgtgaccaaggaaagccactacttttacacattcaacataattgaatgcaacgaaaagtcctaaaaaagacaccaactttatataaaattccacaaaaatacacgaaatatttgagagcccaaaaaaagaatatacagacaacacaatttctgtttcagattctgcactaacaaattgaattctacggtagtcagatatgaataccaattcaaacaatggaaactaaaccaaggttattattgaaattttaaaaagtatttctacaacacatatgttacatatttgcaccctcaaaacttaatgttctagtatttttttttcccccgttttaaagctatactaacattgtcaaagcccaagtcacactcgttatatatataaatattacaagaaaaataaaaaaaacagaagaatagctagtgaccgatttgtttgtcaagaaatggttgtatagtaaatttgcgacgttatgtaatgagagtgtgaaggttttcaggatcattacaaccaaaatggttgtcggatcatgtgcatcgaaaacggctgtgacaattttgcgatatataacgagagtgtgaggttgttaggatcattacaatcttgtcactcatcacaaatgagtggcaaataagatagttgtcaagccttcagatgttagaattgatttagtgttatttgatatcaaatctttcgaatattgctaattcgttgctaatacatgcatgacgatataaaatgattctgaggtacattcgcaaggaacattagattaaaagcttttgttgtttgccaattatttgggtaccattatccttaaggaactaaaaaagatagcaagacttcctttgaggttaatgtgagatggttttataggcatggagatatatatttctttagagatatacatagtttgtacctcttggatgtctaaagcatatatatgccagcctagaaaaatcttgtcatgcttataaaactactcacattaacctaaaggaagctttactatttttttttgggcaaacaacaaaagcttctagcccaatgtgaccatccttagaaattgtatgttcttcttttacccttcttcaatccatctttagttatgtagttaggggactacatacacaaaatcctcagcagaatactccattacattggagaaaacgtttgtctttgtaacattttttgaatggtgattcaaacttgggaataaatgggtcaagtaacgtacttgtctagacatctgtttaattggttcaagctaagtaacgtatttgtctgttttagtttctatttaattaggattttaatttcaaattattattggacacaattgtatcataggttaatgggtttcaattacgttttcttttctataaataaattcatataaagttcacttgtttcacctacaaaatgatttttgatgaacttccgtagtatccagaaccaaattcttcttttccctattaaaattgtgcgcatgttccttttgacatgttagtcgtgagtttttttttttatgttatgcatttctaccaaatacaatatttgatctagatgtacttaattagcttctttgttataactcgtaccaatactcttcttctctcgcctctatatgctcaaaaaatttatatggattatttgttacaccattgagaatccttgttttattcaagttctccaaaagttcattctttgaacagcttaggtttttttcttttcagctacaagtttctttttaagctttgctacatacataataaactttgtgattatcatttttgaacacacatagactcttctaaattccagcaagctccatttgtaacttacgcgattcatctttctcatcagttaagtatttatgaagcttccatatctaagtttctagccgcatcctctcccctccaatgcttgagtttctcaactgatcttaatttaatcttcataaaggcctctcagcttgaaattagacctcttgataaccctatgaatcgcttctcgttccaccagaattattgtgtgttcggagagactcgccaggctcatatttgtcgcgtcctttttttacgtatcataaatcaatgcaaggccacaaagttagatacgttttattctttatatatctgactatgtatcacgacaatcttgaaccatattcatatttcaattttgctagatcacacattcttcttttatatacatcactagagaaatggaaacgtaggacaaaatattttcaaataacataaacgttttatcttgtcatatttattaggataaaacagtccaaaaccatagaagcttagaccgattaacaaaacgctatcaaaggccaatataaaaaaaaaacagagaactacttggatactataaacaccaatacaatctgctcctgctcaagtaacaacttgagatcccgcttatttatcttaacatatagtctggtcgccagatattgagtcaactattctcacatagaacttacaaagtcaacgatatccaccacatcatggagtagagagttggagttcaccactctacaattcaacctgatttgtccttgagttcctgtagttggtgtaatatttcccatcctattcattgcctccacgaatgcattgaagaatgtttgtgtgccatcagcatatgctctcaccaaggggattgtgtcagtggcattggggctagagaacaactcttggtcgctctggataagacctttttgctctttaagattcacatagtatttgttgtcgaaaaccaaaggcgtacgcagatcgaaatccactaagacgctttgattaccattgcgaggacattgaccacgaagagtttggaggtaagtagtgttgagtgtagggtcaggtaatccagtgttgctaaagttgtataatctgtccataatgaatcgacattgatttttaccaaatgtgtgagcccctaacaaaaggaagaccataattagatcaacgattaacttgctaaattacaactatatcaaacaaggtttcatttctttttaataattaccggagagcgcaacaagatcagaaggacgatcgaggccaacatttttgaagttggctttaagctgtggaagtgtgaagaatggagctggaagatttgcgttagcaagatctagaaatgcttgtaagctgtctcttctccctaaaggaaccttccaagaaggacctcctgcctatagtataataattaaccattatattcaaaataataattcttttcttagaaaatattattaccctgaaacatgttttataaatctattgattatatactcaaaactcaaaggtaatttccatggtctctttcttggatgaaaaggaattttcttctattttgttaactaaaaaggtacataaatcatagtgatgagaccttattttctcagtgatattaaaattatcaaaaaatatcaacgggagtgttttgaatgttttccgattaattttgaatacttgtctattttattctaaacatatattgggagtttgtgacattctaaaagacataaaatataccaacaattttattttcgaacttagactgtcatgtttaacatgtacgtaaagcgactacttgacatatttatatcgaacaatgtgtgtaatgaataaaagaatatgggacaatggagcataccaaagtgacagattgttgagcagcaatggtgagcatatctgcgcatgaaacggttcttgggcatgccctctccaccgcagctttcattctatcaatcactggaaatcctcgggctgaatttgcatttccaagtgcatctttctctgttcgaaatgatgtcgtgttgtctaacaagatcgaagcatcacaaccctttcaaaagtccaaaatattatttaacaaattattagttaatgtcatccatagtttacatctttaccaaaggtaacagtttaacgttgaacttttttcatccattaaaaccatttgttcctctgaagcaagtaactgagttaaggaaaacaatgtaaggaggaattaactcttctaagttctaacccattttaattcactaaaataaattcagtaaaagaaaaatttatattaccaaaatatggtggaaatttaataagttccattatactactacgtgattccaaaactaattgattctttgtctgtttgattaattttgacgtgatgttaaattactttttcctttaaaatttgcattcagaatccaaattttgaaacataaaagaaaagctaaaatgacattaaattgaaagcaactaagagtacacctaaaacaattgctaatgctgacaacaactataatcttttttacactgatttaatcaatatttaaaagatgaagagattaagtacagtaatttcataacgctatagatatatgaaaagtgatatcttacattaacaaagcagtcatggaagtgaagacgaaggatgctcccggcgatacgagggtccgatcttagctcgttgacaatggtatctcttacaatgttggtgacggtaggacatgaagtgtcgtaaaaagtaggggtaagttgagcatcggagaaagacgcacaaagcataagacatcccactgtgattaaaactgtccaagtgaaagaagtaatagaagatgaagagaattgcatttttcacaaggacaatgaaaactatttaaatgggtttaacggagaagatgagtaaggtccatatcttaaagaatccttttataggcaaaacgggtcaaacgtggaggccttttttctcaattgatggcttttcgctagaagtataatatctatgaaaaatacttgggttaccaccctagggaacattgtcgttgaaaataaatgaatattattacgtacatgtatagtgtcctttatttgtttagttgcgatctatgttatagtgactttttcttttcttttttcacaacgttatagcgacttaagatcctcaccgcacatcaaagaagactagatgtctaatctatctgaaatatacgattcaaaccacatgaagttgtctccaattgggcccaatttgctagtgaaaatctctgtttacttttgtgaaaatagggcaaaaaccaagaaacgggccacgtgagagttattgtaggagagtcgcaacaacagggtaatgcaacagaccctttttttttcttcttctaaaagtagactttagcagccataagataataccagctttcgccatcgagtcactcataataatatatttgattaactatttatcatcaaatgaattcataaaatcttagttgtttgtcagtaaacaaaaaaaactacagatggtaaaatgcaaccacaaacgaaataatcagcatgaggacatattctgttttcatagataaatcataaatggaatcaaacccaactgaagagtattattaaaataaaacgtgtgatataagaaagacacatcttagatcaattggatgatcttctcatctaggatttgaatcacacacaaactctacgtgatcatgtgaatcagtggccaaggcccaaggcatgccatttatttttgtatacaatgtaaaaaccgaaaacttagatagaaaaaaaatggaaacacgtgtgagatatgtgaccatataagctactactttaacacaacataattcagtgaggataaaagtcctaaaaacagaataactttacataaaattcaagaaaagtatactaaatgttttagacccaagaaaaaattattagtatagtcaacattattgttccagaatatgcatttacaagtggaattctaattggtctaatatgtatacccaataaattcaaacaatggaaaccaaaccaagcttattattgaaaataaaacaaacacatatttatacaacacaaaagaaacacaaccataaatgtattaatcttcgtcatattgaggattcgaaacagacaaaaaaaaacgcacattgtcacataagaaaaccgcttatttccacacaacataaaagattaaacggagaaactaaaaaaagaacttgcatagtcgtatagttctgatcaaaagagatgtattgttaaggaattaagaaacaacgtgatgtttcatcaactcaggatgtgtgaaaatgtcagtctctttgtagaaaacttctacgaccctcgagaggtttaggaatcacatgacgatagggaaaggaaaaggaaaagagtgatctctcgtcattagttctttgattaattaagactcttccttgaatcaaatgccatgattttgatctcttcttaagctttttccccatgaaataccatattgcttcatataacaatcaatggatgttcctacgtgctttctcttatgttcaaaatgtataagatagataccagatttaatattatattttgcactaacgttgtgacacaaaatgtatttgtatgtagggtgtcaactaaagcttaagttctaaggtctgatattattctcgaatcgtattgtatcgccccaaccgcccctaccagtgggtcccacaattcttacatttctaaatatacttaatttattttgtggaagtccccaaatcttgcgtgcatagtaacccatgacctcttcttgtgagtgtgtgtacatgacagtcatgaatgcgagttttgatggtactttggctggaatacggagaatcagcgagtgatttccattgcttgcaaactagtttggaagtggtgatgattctttgcggtaatctcgatatgatatttgctgatagatcatcggttaagaaaatcatctcgtttttcttctctgtctccatcataattgaccaggtgtttttctcttttcaaagactatctttagtcttcttactaatcaagctataaggagttggccaactttcaaaatccaagttaaaaaggttagcttttgggtttaggctaatccaaaagtgattaatcgatcaaagtgtaaaaaaaagtcgtaagctttagaacgaatcttgacaaccctaccatctcaaaatatcaaacaaaaatggatcaaaatcttgataccaagacaaacggaaaacaaatcttgagacttattgcttccttcctcttcctttcttggcaggctgtgtctccatctgttctttcccggtgacttctgagagatcgactgcattatacaaccaacataaataaacaaagtaagctataatacacccaatgttacacagcacaaaaggagctttccttttaaaggttgtgagatgatgcacattcaagttccattctttcaagattggtaggagaaaagcgatgttttgagaaaataatagccggtgacgatgtgatacattgtctcataatagaaataacctcatagctcaataaaacaaaggaggtttttttctcaaacactaagagatagatgatgcatgttctttctttaagttagatatgcagaaaatgaaatttttaccatcaggtcctctggccatgagggtgaaaaatatgttattcagtttctccatcttcttcgcttcttgtgcttggtctgtcttgaacttgagacactaagttaaaggaaaagtagaaataaatctatcatatatatacttcacataataagaatggacaagaatgaaaacaagaagactacaacaaggacatctagttaaccacagaagttgatacaatgatttacatcaaaactcagcccagcttaaagagttctaaagtatcacacttcaacctccaccaagaactattgctctgaagagaggactagatctgcttatctaacacatcgccatgcaagacatgttaaattcatcaagacgtacgaaaacataacctattagcaatcacattgaccaagccaaaacaaaagtaaccacataactacgacaaggtacgatgaaaactcaactaaaaaccaatatctctagtaatcaatcatcatggaaccctaaattacattctccaaaccaagcatcataccatcaaacctcgacgaatcagatatcaacttcaatagcaaatattgaattccatactattatataagataaactcaaaagaagcagtgatcatagagaaactagacacagtcaaattacctctttgttatcagtaaccttaagaaccaacttgccgtcacagtgtctatacttcatcacataccgagtctgcaccacaacaattgaaacattagattgcgaccaacacgacttgattcaaatcaattatcaaggttaccaaaattcccagtacaaaaatcgaggaactatgttcaattaccataaatcaatccaaatatctcaaaatcaaccgtaaatagtgaaatcgaaagaggagagcaaaaaaatagttaacctacagattccggatcagctcgaaaaagctgaacagatcgatcaacgaattcgtcccacgatgcgatataaaccatcttgattcaactagattagcgattcgatttgaggcgattggattctatgaaatctccgggagactcgacggagaaacagagaagcaaaaagacggctttttatttgtgttttcagaagaaagaaaaaaaatttgagtgatgatcaaaccggaataaaccgactaaaaccgaaccggttccttagtgttaagatttctaaaaagaaaaaccctaaccgttcttcttcgaacttctgcaactttgtttctcccaaatctgtgaatctcaagtgttcgtcttcaccatcatgctctctcgtttattccttagacattcgaatctccgtttcgtaaccctagtttcatcgaaatcaaattctcagatcttctcttcgtttattcgtccgctttcgactaacagtagcggcggcggaggaaatggtgacgggaatggtcgtaatcggaatgatgttccgtggagtttcactggagtaaacgatgataagtctggacctttctcttccgatgattcttttggttcttctggagttgcaggatctggtttacctggtggagaggggaaatggccggaggagcctaagagatggaatataaaggaggaagaggaaaaagttgtgtttgatactggtggtgaagtaggtcaagggattgagactagtcgcgagaggaggggtaatgaatgggaggagactaagagatgggatatgaaggagggagaggagaaagttgtgtttggtggcggaggagatgaggtggatgggtttggaatcaggggagaggtgaaatctaatgaatgggatgtgtcaaagccatggaatttgaaagaggaagaggagggagttgtgtttgatactggtggtgaagtgccgtttagctttgagaatagcttggaaatggcggaggaagagcgtgtgaagaaggagttgattgagaaggaagagaaggagcttcttgaggttatcaagggtgagacttttttaatttgttttgctgattcttaagttttgatcttatatgcaatgcaccagtagtttcgatatgtgtctagttttggaatgcagtgacaaatgggtagcaaatttgatctcatgactttccttgttaaggttagatttggatttgagggttaagtcaagtagcaaaggttgtgtaatcaatctatttataggcatgcttgctgagtggaggatatgatagtttttggagtaagctcggatgttgaagaggaataagcatttgggtagaaagacttgtgtttgaagtggatagttttgtgcttactgacgctaaggaacagtttagtgcttatgtgtttttgctattaacaatgttcagcacaataaattgaagaatttgttattttgatcacattggtaatggattctgctgctagtaaaacaagcgctagaagtagagtaattgatttgaaacttactattgcaggtcctgatcgagcatttggagaccttattgctaagtcaggtataacagatgaaatgctagatagtttaatagccttgaaagatttccaaggggtcgaaggattacctcctctgactgagattgaaaacctgcgtcgtgagaaaagttcaaagaagtcatcaagagctgagatagaactccagatgcaagaggacattgccaaagcacgggtgagacaagttgacgaaacaggtagagcctatggaactggaagaagaaaatgtagcattgcacgtgtttggattcaacctggggaaggaaaatttcaagttaatgaaaaagaatttgatgtctatttccctatgcttgatcatcgcgctgctcttctacgcccacttgctgaaaccaaaaccttgggtcgttgggatattaagtgcactgttaaaggcggtggtactacaggtaaaacctctccacaatcacttcgttttcttcgacgattagtcccaaagttctctatttacactagcaagtatgatttatgcttaagctagaggatttggtcataagttaacaaattagattgccatctctttacaaaaatcaacaattatccaagcatttccttctaatcgttgttaaccatgtactcaaatatttggtttaaaggtcaagtcggagctattcaattgggtatcagcagggcactgcaaaactgggaaccagatatgcggacatcacttcgagctggtaagcaagatactacaggcatcttagcgttattaaatctgtttagtcttattgatgttcattagcagagatacaacttattgtctgaccaacgttgtcatttgatagccggtatgtgtgttcatgtctgttgaatggattggtcttgatctcgatctttttcatcttcgatatgtttcagctggtttcttgacaagagactctcgagttgtggaaagaaagaaacctggaaaagccaaggcaagaaagagcttccaatgggtcaaacgttgaatccgaaaatgcgtactatatcttctcctttttgtctctgtcattttcattagttcgtctacttatcccgggtttagaagaatcaccggcaaataacttgttcttttggttcaatcccgtagttatctttttgtaccaacacattcttctcttacggctctactcttggaaacttgagtttcgttggtttctgagtcggacacatatttttgtatgtttttttccggcaaattgtcatgtttcttcaaaaggttcattgatgtttaaacataatgatcaactccttatatggattatattattaggtgaattttgattcttttgatcaaaatgttaaggaatgtccaattctcatagactttacaagagttggttacatttgctatatacaaaaatatctaattggataaactctattataccatccaaatatctaattacaagagtttgtgtaaagactttccataacagagcaatggatagattttgacgttatgttgataaattttattcacttgaaggttctattttgtgttacgtgcaagcatctactcattgaatttcttcactcctactacaagtactaacaaaattatcaatttcccaacaaatccatagatatcctttctctagcaatcgaagtaactattttagtttcattaaaataacatatcactcttaaggactatataataacaaattaccttcttgttgttctcagtttcttctcccaataccaaaaatattttgcttcatccaaggtcttgaagatgggtataaaagtttcatcaaagatcaaaagaattctcgcatccacaggttatattcctattttcatttttaaataccgctattatttttattttttctactgcaaatttgcaagaaaatttgtaaccaagaaaataataattttgaaactttcctcgattggtacagcttcaggtagttcaaatcccaaagatggtgctgacgtggatgtccgagaggaatatgcaaacgcctttcgtacggaatcatacaatcacttttggacacgtgtcgtacagctaagccgcaaaaagtccgcagtgtcttcttcttcttcttctccaccaatcgaatcatcctccacgtcagctcgtctcatgtcttatcgcctattcgcgcacaatcttctagacccggatctgaataccattactcggatactagatgtatcccgggtcgggcgacacacccgaactcttctctctgattacttcttggagacggcaaacgctttcttgctttgcacgcaattactaaaaaacattcatcatcttcgttctaaatacgagtctttgaaaccaaaatttcattcggaaaatcataattcattggctttaatagaccaattcacggagatatcaaaatggttcgacccgtttatctcgtcgggttctaggatccagctaatcagatccggctgtttatacttgctaaaacggctagagtcgagacgagacaagacacgagccaaacttaagcttatcaacggactaactcatagctcagggcttctcgttttggctctaaccactacattgattgtaaccatagcctctcacgcttttgctttgtttctagccgctccgactcttttagcctctcaatttaaaccagccggtttaaggaataagttaacaaaaacagcggctcggctcgacgttgctgccaaaggtacttacattttaagccgtgatttggacacgataagcagactagtgacacgaattaacgatgaagtgaaccatgttcgagccatggctgagttttgggttggtagagggtcgggtcgggttcgaggcagtgaagaagttgctcgagagttgaagagatgtgaagaaagctttagtgaagaacttgatgagcttgaagaacatatttacttgtgtttcatgactattaatcgggcaaggaatcttcttgttaaagagattttggattcggatgatccacctaattgttcattcgctcccaaatccaaaaaaaaattgtagtatttctttgtttcgttttttttctcatgtcaatttttattatttcttttgtttttgtctactacggtatgtatatatatttctttttaccctcaattatataatttttaattcctagaaatattagtgtcggaacatttttatttctatttggatgatattcggattctattagtagtcataaaaatgccaaatgcaagagtcttttatttttgggcaagccaaatacaagatagtctaaattatggaatttttaacatttgtcaaaagaaatcccaaaatccattacatatgtcggaaatgtaggaaaaccgattttaacaaatattttagacgacctctttgttttgggtaggagagactattcatcaaaaaatgaaccaaccataacatttttttttcctatatcttctaattaggtaaatcggttgactcataaaccgagtcagcaactcgtccgaaccataaaaaaacgattccaattcgacggaatctcacgagtttccacttttatataaagtcacttttgcaaatcgaacaaatgcttatagaagaaagttatcaaatctagagatagagagagtgaagagggcgaaaaatatgggagaaatcggtggagaagaactggtcttagatgtggatgagacgattttcgtcgcggtggcggaagatgtggagagaagcaaaaccacggtgttatgggcggcgcgtaacttttccggcaagaagatttgcttgctttatgttcatcgaactgctcgcgctgcctcctggagtgagatcttcttcttctctttctcactttctaaattagttctttgtgttgaattgtggtttttggtgtatagatctgtttattgaattgcaaaatttagaataaaatcgaattttgtttgtttagaatttattctgagaattctggaattttttaaaatttctgggagatattgattgtttctttgattgctaggaatatgttgagaaatgtgtaattttattctctatatgaactagaggaagataagccattgaaagtactataacattttcatgatcagtcatttaagagtttggaagaagtacacaaggagatgatgatgactataatttagttataatgtacattgtataaaacactgtaacatatgttggtttgcttggccaatctgtcttagagcttggaaattttaatttgtttgtggaagcaggacattgtgatgactttagctgctatgtatagggaaaaaaaattattgtccattgccaaggatgttaagacttgtttacctgcagcgcacaagaaacttgttggtggtagctttaaaaagcatgatgtcaaggtgattgagcgagttgagaaacccaaagtggatgaactgatgaattcttatctccaacttttatctgaaactgaggtatcaattctctcttttttcgtgtaaggttgttattgattgtaatctcacacaaactatcagttagctgttttggtgttcaagtttaattgaagtaaggcaactcattttgaatatacctgtgatcttggtggatataatttttgttcatataatgacataacctacatggaaaaaccttgtgccgtgtgcactcgtcataaatgtagagcttagaaatctttaaattattaggcattcttattcaggaatcgttcatatgataaccggattgacatagttctttttagattcaaacagataaactttgcattgcggggcaaaatatcgaggaatgtatcgtagaactaattgctcggcacaaaattaagtggttagtaatgggagctgcatcagataagcattactcatggtaagatatgattctatattttatcttatacttttcaaatgatttgacctctgaaatttagataagcaacttaaatatgtattgccaggaaaatgacggatctaaagtccaagaaagccatattcgtttgcaaaaaagctcctgattcctgccatatttggtttctctgtaaaggttaccttatctttacaaggtacgttctttttcctttcactgggttcagaaagagttgaatgagatgtctttatcaccatctttccaaagctaaacgataaagatatatctgtagaaactttgaaataatatatatcatgtcatggactttagttatcagatttagttagtctaccaccttcacttaaactgcttctattaattgtttttgttttctacttctattcgtttaactaaaagaaaaacactctaaaacagggcgtcaaatgacgatagtaataacagacaaacaatgccgcccctagtacagctggattcagataacgagacaaggaaatcagaaaaattggaatcttcttatatgaggagaagattaagatattggcgcagcctccttgaacaaggtagcggttaccttggattttgaaaggtcccaggctcccagcatatcatttcatttgccatcagttgtatctgtctttgtgagtaaatttgttacagaattgtgcagatggtgagaaagatacaggtcaactggagagagaaaaggtagaaccaagagcacctcctcttttttcatcaggttcgagttcttcctttggagagccggttggtccagagccggttagcccagaattggttgactcagatacactaaatacctcaaatgttgaggtaggaggagtttgcttcatctttacttttctactgatgatgctgattatacagtaactattagacgcataagaacgtctgttgcctgaaaagactttactttagcaaataattacagttgatggtttgttttcaaggtcttggtatagagatttatagaacatgactttgtggaaacaatttatgatagtaattttgtctgtgcaatatattgaaagatctacttaaagtgaacatggtactgtatactctccgtatgagcaagcatttgatccacctggtaatcagtgatcctgtcaaatttcaggaaaaagagcgtgaaggggatgtagcgcgcaaagttcataggtatgataaagccatgcatgatattggacaatcagatagaacggtttatggggaggctgggaaaaaatgggaagaggatgccagtacaacagaggctttatgcaaggtaatactcttattcgtttctcagttattataattgcaaaatagttctcaaagtgatagtcttggtccatttctgctagttgtaatcactaatcagtgcatcatgttaccacatgaaaaaataagctttacataaaagaaatatttcactggggatttgtagattgctagcattaggtactgaacttcttcagttgatagatcgatgtgtgtttgtggttatacattttgctgtcaaagagctttagttgaatacttgatgcctttgctggagaatcttaagctgctgcctgctggcatgtccaactcgtttctcccggcttgaatatttttttttgtcatgccacaggctaaagctttggaaggcttatgcattaaggagtcgagccaaagaaagagattggaggaattgctggaaaaggaaaagcttgaagtaaaaatggtaatagagcaaaacaatggattcatgaaagaacttcagatggttcagggtcggaatcttaagttggagagccagatgaggaaactacaagacttggaaaaagaacatggtgagaaatttgatacagctatggagctcttgaaaagtttcagacagaaaagggatgagatccggatcgatcacgagaacgcagtaaaggaagtgaacgcactgagaagactggttaaaggagagaccggagagtcttctgggtcggaaatgcttgactactcttttatggaaatcaatgaggctactaacgaatttgatccatcttggaaacttggagaaggcaaatacggaagtgtctataaagggaatcttcaacatcttcaagttgctgtaaagatgttaccctcatatggatccttgaatcactttgagtttgagcgtcgggtaaaggatcttatgtatatggaaaaataaaattgaatatagacatgtatacatgctcgagtttgttaacgaacaggttatgtgttttggatttcaggtggagattttaagcagggtaaggcatccaaatctggtaacactgatgggtgcttgtccagagtctcggtctctcatttatcaatatattcctaacggaagcctcgaagactgcttttcatctgaaaacaacgttcctgctctttcatgggaatctcggataaggattgcctctgagatatgctctgcccttctgtttcttcattcaaacattccgtgcatcattcatggaaacctaaagccgtctaagattctcctggattccaatctcgtcaccaaaatcaacgactacgggatctctcagctgatcccgattgacggattagacaaatcagatcctcatgtagatccacattacttcgtttcaagagaaatgacgctagaatcagatatatacgcgtttgggatcattctcctgcagcttctcaccagaaggcctgtatctggcatactgagagatgtcaaatgcgctctggagaacgataacatcagtgcggttctggataattcagcaggagactggccagtcgcacgaggtaaaaagctagctaatgtagccatccgttgctgtaagaaaaacccgatgaatcgaccagacttagcagtggttctacggtttatagatcgaatgaaagcaccagaagttccttcatcagagacatcatcatacgccaaccaaaacgttccacgccggcctccttctcattacctctgccccattttccaggtgagtttctatgcttaaacagagtttgatgatcatgattaaaacaaaactcaaaacatgttttgtttgttatcatcacaggaagtgatgaaagatcctctgatagcagcagacggattcacttacgaagcagaagcgattagagagtggttagcgaatggacacgatacgtcgccaatgacaaacctgaaaatggaagattgcaacctcatacctaatcacgctcttcatctagctatccaagattggcaaaaccaatggtgatttacttttgccttctttgaaagacaacaatattgctatttttaactcccaattattttagattgtcactttgtaaatttacccctaaaggtatgaaaaaatatataagcctgacgtacatgtcacagtaattattcgaaatgaagcttacttagtatccatttgtttaaacatgtttaaagttcttaccaatctttctcctttgttatacacataaattcataattgcgttatttatacgtaatacgatgtcgttccttttgcccgccaaaaaagtaaagcgttgaagatatgttttactcttttaacattgtcagttgactgttaggtaaatggcaaatcagagtcatcagacattctttgcgtcctcacctatggagaatttcatcaatcaccatcacatcatcatcacttctcatggatgttaaagataccggaatcaaccgctcggatactcctatctccgatcaagaccatgactttcgacaatggaatcactcttcgttagactctaactttctcagtctccgaagccagatattcgaagcgagttatcggagaactgatttgataagagtgaaccatgagttgttccacgagagagatgcacttaggcgaagaaatagtgagcttgaagctggaattttggaagaggttatgattagagaggaaatgaagagagatctggaagtttctaaagaaactgtcagtgaattggaaggagaggcgaaggagaaaaccaaattactatcggatattgcggattatgtacgatctatggaagatcgcttgtcgaaattaatccgatgtttaaacgaagagaatgttccagaagaggaaagagggagaaaactggaaacaaaggaatataattccaaatctattttggagttagtcaaggaggttgtaacgaagttagagacgttccaggaatctacgaagaagaagaagatggagctaagtagaagtgtggagttcttggaagaggagaatagagatatcaatgtcttgttaagagctgctttgtttgagaaacaaactgcagagaagcaattgaaagagatgaatgatcagaagggattggctttgctgcaaatcgcaggaagagggttgcagagaataggttttggttttgggttaggagaatcagtagaggagagctcagagacgggaaatatcgcgaatgaagaagaagagaatggtgtggtatgttcattactttattcacattcttgtgattctgcgttttagtatgatcaaacaaaggtttaactataatggactctatggcaagaacaggttatagcaatagagaaaacaatgaagaaactgcggcaagaggtttctcagctgaaaatatctttggaggaatcaaggtaagcttttttctcaaactcaatagatagctacgcttcgattttggtaaatgcaatcttcttattgttttgacaggttagaagaagtggggttgaggaaagttacagaggaacaagctcagaaattagcagagaacacggtgtatatcaacaagctgcaaaatcaagagaagtttcttgctcaaaacgtaatgtatttttggatcaatagcttctgtcttccactatatgtttctcaattttgtcacaaatctcttactcgagagaggcttttatactgaaccaaaggtcgaagagctagtgaaagcaataagagaagcagaatcagaagtaagtagatggagagaagcttgtgagctagaagttgaagcagggcagcgcgaagtcgaagtacgggatcagctcgtaagtttcattcactattccaaactagaacacttattatcaaaaccaatacaaacaaacataactaacaaaaggtattgtttacaatcagatagcggttctaaagtcagaggttgagaagctgagatcagcattagccagatcagaagggaaactaaaactgaaagaagaattggccaaagctgcaatggtagcagaagaagcagctgagaaatcgctgcgattggccgagagaagaatagctcaacttcttagccgtattgaacatctctaccgccaattggaagaagcagagtctacagaacgcagacgtggaaagttcaggtatgtttggtgttggccgatgtggcgttttcctaccgctgcttctactgctgcgaccgctactggaagttcttcatatacaagcaacagagcattgttacgatatgatgcgtgatctagtactgttagcacaagagttgtgtacactaaatatgaccatagaagctgaagctcaatacttatattaaaatagaaaatatatacataaatgcttgcggaaagaaaaaaatcattataaaaacactaagactttagattaaggaacaaacatcaaagagcaaatttaatatctgtagcctttatgttgttcttgctgtagaaactgtagcgtgcttaagaagtaatacggtattgttcagaaaatatagtccattttcctcacaatgtaaccaagatttagcatcctatcgataagtaaagttgaaaattttacatttcccattggccaacactacatcatagtaaagttcaagaccttacatggattcaaacacaaagtgacatggatttgaagccctgccagaactagccaactcgttgagcatctcacgtctattttctattattttgggcattaccggttcgatgggttttgtgagaaagttgctttcttcaaccgtcttgtgtttcttaggatgtatgtggccacttctttctcatctcttcgttgccattcgtatcctatccacatgaatgtctcaagatgcaacaacaaacatcccggtacacattttggtttactccatatttggtcgatcggaattcctttgtcggatatagagagctgaaaacaatgcaatttatgtaatatagatcaacaaagtacctgaaagtaaaacaaaaaaggacatgaacgactcaaagcaacaatttgctaagatgccttctcagtgctccaaacacaaacgcaggctatatcacacgaatccgactaaaagcttagagacgattttacgccataacgatgacgattcagcttctaatcgttagcaggtctgttttattctgggttcaagacaaaactgaatttcaataggatgctaaatcttggttacattatgaggaaatgtaggctgtggcgtgtttacgaagtaagaactaaagaagcttgatttatcggcgtttgtggaaacacagacgttgtcgttttcataaattagaaagtctcttcgtcagatctcagatgggcctcacgctgtacaagaagccttcaacgttacacgttctacttaatcaaacggtgtcgttttagcgaagcagaaactagaaagtgttttcttcttcttcggcggccagacacaagtccacgaacaaagacgacggcgacgacaatgaaagaagagaagaaacaagaaaactttacagtgacaacaaagaagatagcttcatcgtgcgatgtggaagcgttgaagaaatgcttagaagaaaacaaaggagatcattcaaagtgtaagtctcaggtagaagcttttagatcttcttgtgctcttcctcaacccaacaagaaataaaccctaaaattcgatttggaagtttatgagaattcctctgtaataaaactcagaccaatgtggtctgttgtatgatgattgtaatgaacaactgttttttttacacaatacaatatcattcacatatatggattgagtagagaacatgaatcttgatcattgaggtaaatctgatttctcgaatgtcaagttaccagactcgtctcgttcaaagagatgttcgattagttcgtcccaactaactctacggtttcgtcttatcctgtaagttggtttaacagaagatgatgatgatgattcacccaccattggtgcaatcgagtctgtgtcttcttcttcttcctctgtttctacttcttcttcttcggtttcgtcttcttgagttttgtcgaatgttccgtactcataggccattgactctgcgtgaggtacatctaacgttactgctcgtcttaacgctgctctgtactccaagttgtgctctctggctaatgattcttgcctctccatcctttgcttctccgggatctccattttcttctcattctccatcattagctgtagagatccgcagaagcaaattagtgtaatagtttaccggtaaggatttagcgtctagtgaggttggtgaatacttacgttgagagctctctgagcttctcgttcgatccagatgatggcgtggtctgaagttgcgttacaagaaagaacaatgtgttcgaatcttccatctaccggcactgctgtcttcacaaccggaggatatcttcctaatctgcaagaaccaattaccaaaacgtcatcttcacaacagatttagctctatcacacgatgatcacagagcaaaactatgatttgtcttcaatgtaatggcacataagacatttgatattgcaaactaagtgagattgtgggttgctttagaaccatggtcccttaagtaatatgtgtaaatctatagatttgtgtgttatgtacctgcaaggctttctttcgacgatgtgatacatgcgaccaggagcataaagccgtctaggatctttgagcatcttttgctctggaacacatgtatccttcatgcaccttatgcatagcaaacatggcaaactgtccacagacaaaaaaacaaaacccattacaaataagcagagttatggaaggtgttctacaaaacaaagtgaactaaccaaagctatgtatactaacagctgtgaaatgtgccataagagcattcaaaacatataaaggacagatgtttcgatttttttctactatactatacttagtagaccggagaatgtcgtgtgttattgctgaaagttttgaaaataacatactctgaaccctctggatagtataactgtccaaaaacacagatgattctttgagacatgtgtcacagtgattagtgagatagctttaccagaatacagacttgaatatgtcttctagaggtgtagctgtcctaggcaagaaatcatcctaaagcaaacagaaataaacaaatactttagattccacatatacaatagccaaaaacttgtatcataaagttagacacacctgaagtatgacagagttaatcacatctgcatatctaacagccaaattcaacgacatacacctcgcaggcgcaatagcgaaacacctaactctctttctatcaatattccccaatctttccggatgtcgaaccactaacaaagccaacattgtagctacaccagacccaagtgaatgtccagcaaaagtcagagtataactcggatactttttcaccaactctttcaaaactttacattcctcatctaacacataaccagcagacttcacaagcccgttgtgcacataaccaccatcaaacttcctttcaccaagcttattatccaaaagcattgcataatcactctccttagccaaattcaacccccggattgcaacaactatatcttgatgaacatgatcaagatacaatatataagctggagcacgaccctgagtgtcttcataagtcttctttagaagcaaccaatcagggttaatcccatatccttctggaggctcccacaaaggatttcgaatatcatcctcgtaaacagctaaaatataacgacaaaaccgaggaaccggttcgaattcatcagttgttgcaagtccccaatcttcactgtcgtgaccagcagtataaagacaacgtttataaccccaacgtgcacaaccaagacagtaaacacattctaaaagagggcaacaaccacatagaatcgacatgaacagatacagagttataacaacacattcatcatcatagaccaatgaagcagcacacctaacgatcaaaacataaacttttaatgtttaaacaaagaaatttcaaaactttagtacacccaactgaagaatcttgaactgaagctaaaaccaaagaaaaaaaagtcaactttgtgaatgggaaacaatgttaatggaaatgaaattgaagattgaagttctaattgctactttatagacaaaaacatgggaagaggattagatctcactacttattctatgttctcttatgaattttgttcttctcttctctaaagctcaaatcaagatcaatgatttcgagaaggaactgaagaatttgagagaagataaagaagagaagggaagtgtcttcccgtggaaaacggaagaggaaatggaaatcatgccatagaaggaagattcaaaactcgctggactcgtgttagctttgctttctttatttgtggcagtgactttggggttaaacttgcagttgcagagctactttggagcttgctgtgttgtgttgtgtgaagaagataaaatataaataatactattttcttacaaaattttggttattaatttaagagttaaatttcgagataattagtgttaatttttgtttaatttgtcccaagtttctagatttagactgaaaaagttcatcaacattacacaattacaattaaaaatgagaatttggtggttgtagtagttgtgtaacttgtttagtcaaaataaatagtggttgattttcattagtcatattattttattgaatagattccatatacagtagaaattctataaattaataatgttgggaccatgaaattttcttaatttatagtgaaattaatttattctataaattaataaatattattttacaggataaattaatatttattaatttatagaaatatttaagcaaaatataacactatcttctttcggaatagaataaatgtcaatagcctactcgaatatctaggtgcaaatgaagcatactcaaaaattcagagtttttcgaagaaattgtgatttctgtttataatgttggtgaagaacttgaagacgataatgtgaaactttcttaaatattgacacgtaaggaagcaattatcgcgtctaaaactcttcacaacttttggatgcatatcaaaaagacaacaccaagagtttttgatgcaataaagaaaattagagatgaacttcagaaagattcaaactttaagaaaaaacaaatataactaaagtcatattgtactagattacctttaaaagtatgtttaagattagtaattattgatttatgatattattgagaccatattttgacaaagagatttcaaaaaaaattattatcttattatcttatcgattttggttaatttttacattgacccgacttggaatcgacataatttattaatttatcgtgtttattaatttaccgaatattaatttatagagtttctactgtaactgtttgtaactgtaaattctgaacattaatgtagatttcaatctaaatttttatgtaggaaaaaaaattaaggaagtagtttttttcttgacaaacagaaaatcacaatggcttttgaataattctcaattaattttctttggctggttctaatttagtattatatattaaaaagaaaatcatatatagcaactgtaaattcatttaagttaggttggtagctgctaattccatctactggctttactattacctagaggtcaaaagagtcatggaaaggaaaacaagtttatacgcctttgggaccaattgcaattattttgtgatgtgtttcctattacagaacttgcaagttcagaattttcaagcactacaataaattatgcaatcaaattcatttaagtagcaaattgccaattcagcttttgttagaaaaagcctatgtgcaatcaattcatatcatttcttctagaaagtccatactattcaaaacctaagttcagcttttgttagaaaaatatatatctacaatagtataagttcaaaatgtaaccaagatttggcatcctatcgattgataaagttgagagttttacatttcccaatggtcaacaaaccatatataatatatatatgctcgagagattaaatagattcaaacacaaaatcacttggatttgaagccctgcccaaactagccaactcgttgaggatctcacgtctctttttaaaaactttgagctttaccggttcgatgggttttgtggagaaagttgctttcttcaaacttgttgtgtttcttaggatgtatctcgccacttctttctcatctcttcgttgccattcgtatcctgtccacacgaatgtctcaagatggaataacaaacattccggtacacatttaggctggatccatttttggcctatctgatttcctttggtagaagacatatttagctgagaacagtgcaatttatgtaatattagatcaacaaagtacctaaaagtgaagttttggaaaagacaaaaaaaggtagctgactagtgaaattgcttacgtcggtgagcttgaggatttgcaacttaggagaagcttcaagcatgaacgtaagtagattccaccacttccttttatctgtatgtagttacaaagataaaagctgatggaagatgctaccactaggatacttgatctgtgcatgaggtaacattaatcagtacacaaaacatttctggctcaattgcatagaaaatatgtcgaaaaactaaaatctaaaaattacctctaagggtgataagtgtatggaaagacgtttggctgaagttagagattccaaaatgttctcattttctatatcagaaacgtcactgacttttgcctcggccagttctggcgctttctcaatcagacaagagttaagatacttgaaccttcttatgttcaagtatttcaaagaaggggcatttatcacatagcagcatccatacccaaatccagaatcctctatggttaatctctctaatgatggcacggcgatagtgaaagtttccatacattctctgtatctatgtactatcaaatcccgaagactaggacaaccacataaaaggttgtaaacagagtctttgccataaaaatgtactttgtaaaggtggagctttctaagggacttcaaacaaacccgataaggaaaatataaaagaatggaatgcttgagtgttaaggtctcaagtgtcttattattatcatagatgcacaaaccactcggaaatctggctgcacataactgagaaaagttactgtaatagtccagatccaataccaaattacgcacatggcgtgcaaacgcaattccaaccaatattccaagatctgaagcatcaagttgattactaaattccaaatccaaactctctagaaacggagctttatgtaacataaaaaatctgtaaacatcctctgaaaatgtttggtgatacttagaaacaaatttgagattttgcaccgttttccaaacatgtctccaacgtttagacaaaacactcgtggctacgacagtttttgtcggaagtgaagacattatatgaacaagcaaagcttcatgcaattcactgattctgtcctcattctcaaaaagcctcaaacaatcaccaccgctttcgttgtaaaattagaacgaaagaaaaggagttttaaggttcaaagatttattagtgttagagcttacagctaaaataaaaccatagaaaggggttcgagaaaaaaaaggacataaacgaaagaaaacaacgtaccatagttgttccatcgtcgttaatagagcgagtaaaaatccttcagagtatgccttctcagtgctccaaatgccaacgcaaacgcataaaaacacactaaaaactgtagatatggtgacgccaaaacgttagcgagacagaaaacactaaaagagtatcaacagtgagttttattttttatttgggttcgatattaaactgaaatcacaagccagaaaggaaaaaaaaaaaaaaaacaaggaatgggtttatttggtctcgacccatgtgcccaatatatataagttgagatttttatgagtatttattattgtaatattttaaatgatttgagttttaaatgattatatatatgatgattttaggtgaattaaatgaagtttttattgatttgtaaaatcatgagatttagatttagggtgttattggtttgtgatttatataaactttaaatattaagaaaaaacttttgttattcaattaatatattttaagactcttttaaagtttggtgttattagtttctgatttgaaaacaaataatttaaaattttcataaatagggaattattggatttatactttaataaaactaaatcattgaaaatttgtattattcaactaaatcaaaagtatctcaaattgttgatgatttaaattattgtgttattattattcttaattttaatatttatttttagaaacccttagcgtcataacaaaattgtaacaataagaaaatatgagataatctatatcgaaattgtcttacttataaaaattatgagaaagaaagaaaatatgagataatctcctccaaagaaagaaacaatcttataaaaaaatttaaggaatatatactaacccaaggctgaaaaagaattaagaaaaacatccgactaaatcatgtctatatcctacatggcttttgtgatttggttgcccatattacccatttctaatatgttctctctctcttttccttcttcaagcaagcgataaagtctcaaaagcttagatatgataacaccaaaaccgtgaagactcagcttcaaaacgtcaaaaatccctaaaagagtaataacaaggggaatggatttgatagttaaaccctaacacaacatcacaagccgaacagaaaaaggagaatgggtgtctgtgggctcgacccaggtccaatatatatatttttgggtatttattatttaatgttcaagtttttttatttatttaatgttcaagtttctttgtttgtttgagttctttagatttttagattgtgtaaaaatgaattttcatcggtttaacagtgatacgcaaggattattgggactcaaagttaaaaggggtgtattcaatctaatattttaagtaatttgtgtaaaaaattacaaattatatgttatttaatcatgaattttaaaaactctaatgaaatacagtaattaaactaataatttaaaaatctaccttaaaattcactgttattgaaaacagtttgtggatttgattttgaaagatttgaaaggatttgaaaatacttctttagttaaaaacaatttgtagatttgatttttttttagcaccaacgaactgtcgatccactggtaaatttcaaaaacataaaataaaataataaaaattcaaatatcatagtcttagatagaatttgaaaagattttacaataaatcatcaaaatcatattaaaactcacccctccaaactagccaactcgttgagcatctcatgactcaagtcacttttccaacttttcgagcttttctataatgtatatacttcctcttcctcaaaatgtaaccaagatttagcatcctatcactaagtaaagttgagagttttacactgtccaaataccaaacatcatagtaaaaaaaaggtacaagagactagacagattccaaaactaatgcattagcaacaattagagaatagagatcacaatcaagcagatgatcaggagaagaaagaagacgaaaagtgaagtcgggacaaaatgtgaccgatggttcaaaatcgaatcccaatcccaacattattcacaaacagaagaagtcgtcctctaaatgggcttattaactcggccctttttaagtaaggctcaatctcaagcggacaacataatacttaagtagcaattgacatacccaatcaataacatcaccttgttgtgtttgactgttttcactgtctagaaaggcgttactattcaaaacctaagttcaacctttccggtttgatcaacgaagtggatggtggactagtgggttttgaaagtgaaaactcaagtttattagttcaactccatatagaagaggggtgatttacgctttaaacgcgatattatcaaccagagctccagaacttccaatatataagattgcgccattgcattttagattaatgtctatgaaatgcagaccatcttgcttttatcatttttgtgctttcttaagtagatactttggcttattcatgttacactctttttttctctgtatttggtgacaacttctatacaaaacaagttgtaagtaagcacagttttccttagctatattaattaccaccaaacaaaacttagattttatcaatatatacatttgtaactcatacaatatatataccaaaaacgaaatgaagaaaaaatcttaagataaaagtctactagatttgtaaaagttgaaacgaaagagaataaatattattcccctacaatttaactggttatgatctttttcttttgttctagcttgtttagtcattgttaagtctactccttgaattgtcttctgaatctcttcctcaaaatgtcaccaaatattagcatcctataaataggtagagctgataattatacattttccaatggccaaaacaacatagtaaaatttcaagagattatatagaatggaacacaagatgacatgaatctgaagctctggccacactagccaactcgttgagcatctcacgtctcttttcgagattttccagatcaatgcgttttgtggagaaagttgctttcttcaacagtcttgcgttttctagtatgtatgtggccacttctttctcatctcctcgttgccattcgtatcctgtccacaagaatttctcaagatggaacaacaaacattccggtacacattttggtggattccaattctgtccatctagacctttttcgatacaagatagctgagaacaaggcaatttatgtaatacaaaataaaaaaagtaccttaaagtggagttctggaaagaaagaaaaacagagttggctaataaacttgcttaccccggtgagcttgaggatttgcaatttaggagaactctcaagcattctcgaaagcagattccaccactctctttcttttgtaagcacatctaaataaactagctgatcgaagactttaccggtaggaaatttaatctgtgcatgaggcaggcaacaatagtacacaagacagtgttagtccaacagcagagataacctgcggtgaaaatcttcaaattttataatttacctttattggcgattctaaggacagacgtttcactgaagttagagattctagaatgttctcattagctatatgagaaacgtcactgatttctgcctccaccagctctggcgcattctcaatcaaacaaaaatcaagcccctcgaaccctacaatgttcaagtatttcaaagaaggagcatttatcacatagcctcccttacctcctcctatgcaaaaatcatatatggttagtctctgtaatgatggcaccacaatagtaaaagtctccacatcgacattgcgttctctatgcacggacaaaacttcaagactagggcagccgcataaaaggttgcaaacagatgcttcgtctttgaagtgtacttcgtataggcgcagctctctaagggacttcaagcaaaccggagaaggaaggtctaaaagaatataatcctggatttccaaaatgtcaagtgtatcattgaagttaaacaaagcactccgaaatctagccctcttatcacgcacatcaccgaaactaaccaataccaatttacgaacatgacgtacatatgcagttgcaatccacattccaatattcaaaccatcaattccacgtgtgaaattcaattgcaaactttctagaaccgaagcttcatgtgaagtcaaagacctgtaaagattctctgaaaatgtttggtgatactttggatcaaacgtaaaatcaaacgtgagatttggcaccatcttccaaagagatctccaacgtttagacaaaacactcgtggctatgacattttctgttggaatatcagacaatatctgtagaagcaaatcttcaggcaactcactgattcggtcctccttcacggcatctcgaatactcaaatttaaaccatcagtttttctgtcaaaaatcaaaggaaaaaatatatataagaaatttagggttgaaaaaattagggttggatctttcagctaaagaaaacattaacgaaacaaaagatatatacaattgctgttccattgttgttaatagagatttaaaaaaaaactctctagtctctaataatccttcagatttaatgccttcccagtgctatcggctatcgcagtacgacttcagcttcaaaagtaatgacttgtgttataaaccaaagtggaaaccctaacagagtatcaaaactaatgcattagcaacaacacttagacatcacactccagcacgtgatctggtgaaaaagaaggacgactatcgacgagtgactttacgtatgagagaccgatggctttttagggttgatttaaaaccaaatccaatccagcatattcagaagcagagtagtcttttctcatgggcttactacttggaatctatatatacatttttgcagccatttttggcttttaattattgatttttttcgaacaataaattgattaacaaactaaaaatattccaatctcatatgtcacgcacacagtattcagcaactatttaaaacaaaaaaatgtttgacaaacaaaaatataattgtaatcccttaaaatgagcaaaacacacctaaatacattctttatctatccaataaatcttttttctccaaaatttgaactagattttggcaactatttaaaacaaatatttgtttgacaaaccaaaatacaattgcaatcccgtaaaaatttattttaattatatatttaaattagcggtgtaccgcgggttttttttacaggacggatttgacgagacgggtttggcaggacgttacttaataacaattgtaaactatacaataaaaataaatagatttaatttgtaaacttttatatatactaatttaaaaaataaattgtccccgcgatataccgcggattaaaatctagttttaaagtaatgctcaaacccacaaaaagcttctaggactttgcttagtggtttaattatgtcatctgcaaaaattgacaatatttaataaaacaatttttgtttttaacttattaaaatttaatatttaaataactaattcaatatttaaataactaattcaatatttaaaatttacatctaaatattgttatgcttacatatatattaacttacataattttaataccaaagcagagcaacttgtatgtgtcttaatatgtaagttctttttttttttaatctgctctgttcttaactgatattcatttgtagttttttttttttgcttcgtagagttacggatatacgtattttttggatgaaatcgaatttgaccgtattttgccatgacctaaactactatatctagcaacttgaccttccgaaatgcatcattttgcagtaaaagtaacgacaaaattcatgttcacttgataacaaagttgattacttgacttaaaattaaaaatattaaaattttcaaaaaacaattttagtcgttaatcactgaaacaaataaccaaaaattgtgaaactcatcaacattttctataacagacttgctttcgtataaaatcaatcccttaaaattagcataaacgtattttgttaacaatattttaaaacaaagttttttgtttaaataaatattgttcttactaaacgtttgttgtttaaataaatagatcatgtatttgaacttatttacaatgtcatgttactaacattaattatttaagaataaaaatatttaattaaagatttaattcttctaaattcttgcttttagagttattatatcattacctaaaatgcaaaaaatattaatttttaaatattattatttatatatttaaacttcataaaacattattaatatttaaatttataaaaagtttaatatatcaaaaatatttaacatcattatataatatatagagttttaaaaaatctcaaaaaaaagttggtcatattttgtgattcgaaattttaaaaatgaacatatattaaccaattggcgaaaaatgtgtggatacaacgtcccggaacgactaaaatattttgacaatgattcataaacatattataaataagatcaacattaataaaataaatagttttttttgtggacggatttggcgggacgggtttggcaggacgttacttaataacaattgtaaactataaaataaaaatattatataattagatataatttacaaagttttatatatattaattttaaaaaatgaattgtctccgcggtgtacatctgaaactcatcaacattttctataacagacttgctttcgtctatcctaaaactatgcaacttttgtcttaagtaaaacctcttatgattccaaaacatttgagaaaaccaataagagatgttatttcttctcttaactgcttatgctctattcctcttgttctaccttttattttctttaaattatctttagaatctcttcctcatactgtaaccaagatccagcatcctatcgataggtaaagttgagttttacacttgccaattgccaaacattagaataaaaaagttcaataggttactcggattcgaacacgaggttacatgaatttgaagggctggcctgagtagccaactcgttaagcatctcacgtctctttcccaacttctcgagctcttcagatccgatgggttttgtggagagagttgctttcttcaagcatcttgcattcttaaggatgtatgtagccactgctttctcatcttctcgttgccactcatatcttgtccacacaaatgtctcaagatgaaacaacaaacattcaggaacacatttgggtcgactccattcccagcccaccgaacaatcttctttaggaaactgatatggctgagaacaatgcaattaaaatatttgaaagtagagctcactggaagaaaaacaaaatttagttgactaatgaaatggcttacatcgacgagcttaagaatttgtaatttgggagaactatcgagcatgaaccaaagtagattccaccactcatagctatatgcacgaagctccagcgataaaagctggtagaagattttaccagtaggatactttatctgtgcatgaggcaacacagaacattaatgttagcccaattacagataaaccccgtgaaaatcttaaatcttaagtttaccttgaaaggtgctaagtgtaaggaaagacatttggctgaagttagagagtccataatgttctcattggctatttcaaaaacggcactaattttagcctccactagctctggcgccttctcaatcaaacaaaactcaagaccattaaacccgtcgatgttcaagtatttcaaagaaggagcatttatcacatagcctccaacaccttctccatagtaatcatcatatatggttagtctctgtaatgatggcaccgcaatagtataactctccacatcggtcgtgctatgtctatgcacgaccaaatcttcaagactagggcagccacataaaaggttgcaaacggattcttcgtcgttaaatctcacatggtagagatacagctttctaagagacttcaaacaaaccagagaaggaaaatctaaaagaatgcaatacttgagttccaagatttcaagtgtatcattacaactacaccaagcactcggaaatcttacaaagctttcctccagcaatgtaattttcagtacaaatttacgcatatggcgggaaaatgcaattccaatcaatatcccaacatccaaagcatcatccttatcttcaactttcaaatgcaaactatctagaacaggagctttatgtgaaatcaaagacctgaaaacattatctgaaaacgtataatgataatgatacttagaatcaaacttgagatttggcaccaacttccaaagagatttccattgtttagacaaaacactagtggcaatcacagtttctgttggaagtgacgacaatatgagcagaagcaacgcttcaggcaactcactgatcctgtcctcctcattcactaaacctcgatttctcaaaccttcaccaccgattttgctgtgaaaaaaaaagtcagaagaaaacaatgaaagggattccgagaaaaaacatagacgaaacaaagaaacataccatttttgttccattttcgtttaacagagacatcaattttgctaaaaatccttgagattactaacacttcaacctcaaatgcaaacgcagccgaacacacagaatccagctagagcttagatatgataatggtgacgagattcatcttcaaaattatatccacttgtgtttgattagtaaaagaatcacctaggctagatacaaaaccctaacagaataaaaacagtgatcaaatccgagccggatcgtttttttccaatgaaaccaaaatccaaacccaagacatttacaagcccaaagaataaaaattgattttttttttttcggcccaccggcccaataacgaatagttaaactgagtttaggtcttcactatttaaagctcgtaaaccctagacttggatatacttcagtctagagccgcgcaagaagacgattctctctgtgagttttcgctcctctctacttgtcgtctctctgattatcttcgttgctactgtctcgttttgtgtataagtagggttcttgcttgttttctctcatcgtgtgttctgctgctagctcctgtagatttttctaagttccttgttttgttcatttcgagttttattgatctgatataaatcgtccgttgatttgttattttgttatgctttattgattttgcagaaagtatcgtccttggaatgagtaatattacactttcagtgatgaaacttttcgtttatttgattggttttgataacatccttactgtattacgactgttaatgtaatgtgcatacaaactctcgaaactttgattctttaagagtttgagattgtcacaagtctcacctttagtatagatttaataagagtgatctttgaaatacttcaagattcgtatctgttttactctatttatgttctctatatctttgagatggtcttttgtttttgaagtttgaggttttatcatttgatttccttgagctgtttaaagtttcatcatttgatttaaagtgtgtctgattgatgttttttggcagcttgagttgaagaaatgaagcacaacaatgttatccccaatggtcacttcaaaaagcactggcagaattatgtcaagacatggttcaaccagcctgccaggaaaaccagaagaagaattggttagtagtagtaatgtcaacacttctgatattgtcatgtttcgttttaagtttacactacaatctctttgggtcttattatgttatgttgtacacagcgaggcaaaagaaggctgtgaagatcttccctcgtccaacttctggacctctccgccctgttgtgcatggtcagactcttaagtacaacatgaaggtcagaaccggtaaaggattcactcttgaagagctcaaggtttgtaatttctatctctctttcatttattcatataactatcaagtttcatttcttgctatatatcgatgggattgttggttatgattattgaacttagttggttggattatctatttgtttacatatatagctatcgtgtttcatttcctgctgaacattgttgtgattgttgattgaaattggctggatttttctttactatcggtatcatgtttcatttcttgctgaacattgatctgattgtttgattaatataggctgctggtatcccaaagaagttggcgcctacaattggtattgctgttgaccatcgtcgcaagaaccgatctttggagggtcttcaaacaaatgtccagaggctgaaaacctacaagaccaagttagtcattttcccgcgtcgtgcccgcaaggtcaaggtaatcattataaacaattggtctatggttcagttgtttaatgaattgttggatttggtactgatttcgtacttgttctgttttcgtttgtgtgttaggctggtgactctacaccagaagagttggctaatgctacccaagttcaaggagactacttgcctattgtacgtgagaagcctaccatggaactcgtcaagctgacttcagaaatgaagtctttcaaggcttttgacaagatacgccttgagcgcactaacaagaggcatgccggagctagagccaagagagccgcagaggctgagaaagaagagaagaagtgaggtcgttcttcttaggtagaagaaacttttatcttatcaacttttggaactgaattttgtgtatcagactgtcttttctttcatcagtttttatccttaaatctttgattttgctgctaccttgcttctcttgatttatggaaaagaccgtatctcacatctctacttgctatagtttcctcttatttcgtatgtttttttctctatagtctaaaaatttaagcctaaattgacacaatcgaaaagcatctctttaacctgcaaaatagacatagcagttcgtctgcatttgagcagttcaacccgttatcatcttccaaccttacgctgtcttttgtaatcatgattccttatggtcacaattgacgcttctggttgcttcctttataactctgcaatttcaaacttactaggggtagatttaacttcatgttcatggtttggagtaattcttccttgttgacttgtgggattggtgcagcaacctgagtaaagaaacctttgtatagaagattgaacatattgaaggggagtagccaactgctatttgctcatagttgagtggaggagtatcaggcaggggaggttgggaaagagatgtcagaattctgagattgagagttctcaacatgtctatgatgtttacatcaatattatttcatatcttccggattattgaaaacccatcgatctctcctttggacagatagaagagaacacttttccatgaactgtctgaagctgttgcactgaaggattgagaggtcaggcaatcagacttaaacgactcttttttttttttttttttttttttttttttttttcaaactcagacttggacgactattaggcttcattagactctgtatcaccaaaacccgattttgcaattcatcccaaagctcatcagccatagaccatagtaaaggaaaagaaggttttctgatagagattaagagtttgaaaacttaatctgaagtatataataaacaacatttctctcgaaacagtatcaattaccttcaaagttacaacttctcattatgtcaaaaaaaaaaaaaaaaatgctagaagacaatgtgaactaaatcgaccaaaagaaattagtttttgaatgtatgagtttaaaagtcatgaaaaagcataatggcatcatcaagtttaaacatagtggaagagagtaacagcctcttggctttgacctttttcagtctctcctttaatggtccttccagtttatctaatggcaacaacagcaactgccacaaaagcaataacagtttttttagtatctggaccatcttgaaacacatttgggttaatcgatttgcagtgtgactaacctctttttcggcttctaactcatgggccaacctaagactcaagttaagggacgcatggtacatctcatccaacatttgagttgtcacaatcaacttgtttaccttccacaacagaaacggtgtatacatacccggagctgtgaccgccaatttctacaaaaatgaacagaagataacaacaatgaatctcgtaacaaccaattcgttttacttttgataatgatttggtttccaaactgtgaatacctgcatatgtaagtatccgtctttccacatctttaaaaggaattgcggtgtatctttcttttcagtcagcgcggcatcagcaatcttacagagagaaaaaaatgatgaagttaagaaatcattatgacttaagatgtttctatatgaatcataaagaacagtcattaaccttatcggtctcaacaaaacgcccttcctgtgataagtatctgaacattctgaaagcttctttcccatatcttctcatcactactgcctctatctggaaacatctcaaagataccgtttttagtttcagaaatatatcaagaaaagaaaaatatgaaacgcacctcatctttctgtgctacgctgataatggatttataatctgcaaaaccaaataacaaaataatattattttgaatacaagaatcatttgactagattttgaatggagttactataccaactatgtatgaatcattcacttcgttcacaaatgctggtagataagaagacgtagcactcaattggtcaaggcatgcttcaactcgctcttgtaacatagtgcgacctgcttctgtcttaataacttcttcataaatggaaccaactgacattggagctgtttcaaagattatagcaaattcagttaacagaacttcataggtggacttttggtggagagtgcaaaataattcacaccaaatacaattttaacttcagcatattatgattatgttaagatattgaatgaaaatgagtgagaaactcaaatattacccgaattgtctgttttcaccttcttctcttgcgatcttcctacttctaacattgccctcaagacaatggcacatccttcatcccggcgctctttcactatctccacacacgccttaaacaaagaaacaagtggttaatagattggaacagtaagacattcggaaagcaaaatttgaaatgccaatgagcttttttcctcatcaaacaacctcaaaagagaaacacggataactaaccttatgtctaaggcggtggatgaactcctcaaaattaggacgccaaattactccactgctcgaatctgatgtgtccacatcacgttgtttacgctaaaatattcggttcaatgagaaacatcaacaaaggtattcagagctacatcattgaaaaatgtatgattacaagattggttatggtacgaatgttgataccttcccctcagtgatgttgctattgtcatctgctaaagatgaattggaatcttcttcgaatataagtggaaaccttattgcgtcaactggagttgctgcttcaacaacttgttcctccaaggtttctggttctttaagaatctacaccgttccaagagatttattaatatcgaacagaatagaaataatatcaaaactgagagtcatgtctctgcaatttgtaggtctgatatatcagaccatgtataggtataccaaacaccagaaagaaattatcaattaccttggcagctttagcgcctcttctctttgccggctctttttctttgtttccaagaacaggttcgggagaaggaatgcgctcaacaaaacgggcagcaaccaatttctgaagagaatctctgattgcttcagaacctatcgtatttcctgaatctgatcatgtatgaagaaaacatatataacagcatggaatccattccgctcgaagcattactgtaatcaaaacgagatacacaaaggccaaaagccaatgcctacgatgacgagtgtaaactgtggtaacataacataagaggtacatatgatatcacgactcacctctatctctttcaataaactgtcccaaggtaagcctaccgttactaagtaaaccatcaagaactgcaccgcactaaacatataaatcaaacaaaagtataagattagcattagagtcttgaagcataaaccaactaatcaaaacactgaacagagagaagaagaagcacgattaaaccttggagtcaagttcttcgtttacaatcctcgaaaacttgttatacctcacacgatgcagaatgttgttaaacaacacaatatactgtacaatagctttgctctcagaaccatctacaaagtaaaaaaaaaaaacatacaaaattactttcattgagttctctatttctgtgtgttgctactaatcaaacaatatagagactaaccaggaggttcaatggagaaagcttgaacacaattgtgctgaatcaagagatagagaatatctttaactttgttatggttgatatctgattcagctaaacgagagatgtctcgtgaggaaagaggtcctttacgtagaagacattcacaaactttctgcaaccaaaaccaaattcgttatacagagattataaattcaacacaagtctcagaagggtttctcaatttaccgagacgacggagccgaattggacggtgatgatatggatggcgtagacaatgccaaactcagacatagacatgagaatcaatcaccaggaagtctctcaatactgatgaagcagcctctgcagagcttgacggagttatggccgatatagagatgtttgccaatcgattgtagcctactactactaaaaagcgaagcaatcgtaatctagcgaccctaaagtttaatttttccagcgatccacacgttcgaatccaaaatttcgataatctaacatgaacccaccaatataagtataagaaaacaccaacccagggctagggcttttgttttttataaggactcgggccggccttaaatatttagcccattttaacatccctaattgtaggttattaattgttggcctagagaagtttgggcctatcaggccctaataaattgaatgtatggtttgacccaagaaaaaaaattagtgatggaacgaaatgtacttgagaattttcaatgattgggccagatgacaatgctctacttaagaagaacaaacacaaaccaaattcttctattgtatttgtatgtgacggcttacatgaagaccatgtttttacttagttaggagaatggaaaatgactttttcagcttcatgaatatgacttatattttaaaacactgtcgttttcatctatacgagatttttgtatttctattcataatcatatacataattttaatctttaacaaataacaaggtaaactaaatctttgattagtaaattctactctgactctcttctaagctacgcatgtttagtggtttaaattagtttcattgttgaataattatccaaatccactattgtttagttagatagtgtgcatgtatcaaaccaaataaaataatataataatttgtatgtatagacaaaacaaaattgattacttcaaaaagatatatgtctcattatatttagtcttctactttttttctataaataatatatttattcttatcattcaaagtcatttttaccatttcttattttaattttacatttttaccttggtcaatttaatttattaacaatcaaaataaggacgttatcttctatttataatataaagtataaacaacgtcaagcatcttcgaaacgtgataatcctagtcaaagacacatgtgcaaaggccctaaaagtgattaaacactcataggctatttttttaatgaaactattcttttgtttgataatacatacacaaactatttcaaattcctatgaaataattcataaaccgtaaattactatcgcatgcttgccgaaaaaaaatattttcaaaagttaattaactagccgtttcggttcagtgtttgtaccggaatcgaaattaaaaaaaccacctcttcaaaaaccgaaacgtcggtctaatcgtaaggatatatatcagcgactcccaccgttaacaaaataattaaaaatgaaaacattatgaccacacgatcaatagaaaatccgctacgatgataacacgtggcatcatcttttagccattttttgcttccacagatactgtagtaattgaatataaatttataaatatcgcatttgctctcttctctgctttcacattctctccttcctcatcatcgttactctcgtgtttatctctccgacgtaaccatggatagcgatactctctcaggattattggaaaacgtcgccaaaaaattccccgatcgccgagctctctccgtttctggaaaattcaatctcactcacgcgcgtcttcacgatctaatcgaacgcgccgcttcacgccttgtctccgacgctggaatcaaacccggcgatgtcgttgctctcaccttccctaacaccgtcgaggtattttaagaggttttcatatatttcgatttaaaagcttcgtttctggttttgttttgcgtgctgaagaatcacatgggaagcagaatttatgaatatctgtaaatcgcttcttaattgagaaattttgatttccggattcagatgatttttttggatgaatttggttttgattttttttttttgttttcagtttgttataatgtttttagcggtgataagagctagagccacggcggcgccgttgaacgcagcgtacacggcggaggaatttgagttttacctctccgattcagattcaaagctattgttaacctctaaagaaggaaacgcaccggctcaagaagcagcttcaaagctgaaaatctctcacgtcaccgctacgctgcttgacgctggctcggaccttgtactatccgttgcggattcagattccgtcgttgactcagcgacggaactcgttaatcacccggacgacggtgctctcttcctccacacttctggcactacgagccgtccaaagggtgtaccgcttacgcagctcaatctagcttcatccgtcaagaacattaaagctgtgtacaagcttactgagtctgattctacggtgattgttctccctctgttccatgttcatggattgttagctgggttgcttagctcgcttggagctggtgctgctgtaactcttccagctgctggtagattctcagcaacaacattttggccagatatgaagaagtataacgctacatggtatactgctgtgccgaccattcatcagatcatattggaccgccacgcgagccaccctgagacggaatatcctaaactccggttcatcaggagttgcagtgcttctttggctccggtaatgctcttgtttccagtcaattgttgaggcgtttgtaatgcacagtgttttgtaaaacgttggattgctttggctttcaataacttaatgacttattttgtcttggtttttgttaggtgatattgtccaggcttgaggaagcgtttggagcaccggtgctcgaggcctatgcaatgacagaggcaacacatttgatgagctcaaaccccttaccagaggaaggtccacacaagcctgggtctgttgggaaaccggtaggtcaagaaatggcgatccttaatgagaaaggcgagatccaagagccaaataacaaaggagaggtttgtataagaggtccaaatgtgaccaagggttacaagaataacccagaagccaacaaggcaggtttcgagtttgggtggttccacactggtgatatcggttactttgataccgatgggtatttgcatctggtgggtcggatcaaagagcttattaaccgtggaggttagtctcatttactctattttgatggctttactgtttcacaagaatactagtctatgtctagcagtttatttgtatagtctcggtggaggctactttgtgcagtactatgttagacttgtcaaagaaaaccctccaacaaattagaaatgagacaagacaaagaaagaggctactttgtgcagtatcatgatcttttgtatgaatgagttagattttctatgtgtacttaattataatctatttcaggtgagaagatatctccaattgaagtggatgcagtactcttaacgcatcctgacgtttctcagggtgttgcattcggtgttcctgatgagaaatatggggaagaggtaaacaaaacctgtgcttaaattgtctctaatttgaatttatgaattggtctcccttatctaccattatgtcctgcagaatcatcaaacatcatgtgaacttacttatcaatgagctgttaataacgctgtgtttccctggtttattggtttatcagattaactgtgcggtgattccaagagaaggaactactgtaaccgaagaggacattaaagcgttttgtaagaagaatttggcagctttcaaggtgccaaagagagtgttcatcactgataacctccccaaaactgcctctggtaagattcagcgccgtatcgtcgcacaacatttccttgagaagccctgaaacacacagaaaacaccatcttgctcgaaaatcatcggtgatgagtcctagttttcacttttcacgcaaatggatatgcgttctctattattggttcttggtttaaaagttactttttatatgtttcatggtggtaaaggttatagattaaatcacaaaagtggaaataaaagtcgataagtgattattgaagtacaacaataaaggagagtttctttttgttggtgttgtctctgcgtctttttgttactgatgctcttgatctaatggccaatttgacaactaaaagcgtactgccaaaacgggtaaagccaaaggacaaatattacattgtcactttttaaagcgtttggttcgttgaacaaaccgaccgtttagtgggacaggtagactttcactatgtcccaaattatgttccattccatgttatagctaactaattctgaacttgagctccaaatttgaattttaaagttaacttttgtgatagaagaaaaaaaaaaaaaaagttaactttgtgatttcaatatagaactcaatacgaggataaaacatttaccataaggattttcctagattcaggcatagtcatagagatataagatcaaaccgtacaaaacttatttacttttattaccgattaaaactttgtatcgtcgaattcactagacagaatggattagttaaaattctaccaaaaaaacggagaagaaaataaagatcgcatgttttctaatttatactactcgatacaattctgacaagtgcttttactctacacaccaaaactttatacgccaatctaattttacgaaccggtcttgttctgcttcctccagtacttactctcccactgttcgattctactagtcgtactctgtctccttttcaaaactgaataaaatgatgccggatcatacggaggcggcatggcgcagggacctgtctcagctgggcgttttacgagtgattccatcataaactttcgttcatttccatccctcgggcatgccattgcctctgagcagagctcagtggagttctgagggatctcgggtttaaaccggaggagtttagagtattggattaagagatgaaacatgtaatcgtacacatagtccatcttgagttcttgttgcacaaactcacttgccttcttacctatgtcttgtgcctggtaagagaaaagaacggtgagagggtaacattaggagtacttatacccgattttcaatcaaacattcatgaagtgcaactaatggtgtgaggattcacaacctaatgtgtgttaattgaaataaatggacatgtgtatgtgtgtgtgttggtgtagatattataagattataccgagtttgagaaccagttattaacacagccccagagtaattcgataacgttttaagtaatatcatacctttcgcatatgcaagttgccccaatcaacagcgaatttgatggaacggcatttgtcgtcctccttgacaggccagtaatggtgacctggaaacatacctcttgtgaagaaatcgtagtaatgaggtttcaccattaatgtcaccgagtcacaagccagaatgtacttctcactcaccgaccacgcagacccttctatgtaaatcttgtacctgcataaggtatttcttagaactccaaaagtaaagtaagggtccctctaaaagtttttgtgctactactactacctgtgatggcattggctcgccaagtctgactgcttgtaaccttcctttgattccttgacccagtcctacaaaaacacaccaatattaagaacatagagaagtactaaatacatattcaccaacaccacaactccaaaactccaaacttttgcaccatagtacatcaaccattaagaactaaaccaacaatatcaactatagatccaactcgtgttgattagtacatacatcactgttaatgttctccattaaaaagcttttagatacaaatgttcagagatccaagatgccaagacaagacacactaaagttgctcaacctttcaagttagcacagcagtcagcactagagtctacataccgtttaaaaaaacttccttttacgtaatgcagatgagtatcaagcaatgggaatcgaatccgagactctctaaacaaattgaatcatagagcaagagcatagagtcaactacctgcttgtacaaacgagctttccagtcatacacctcggagagattacatttcatgagatcaagtctcgtctcagcaaccgttggattccctttccagtaagcataaggctctctatctatccatttagtcctctggtttccttctcttagttctttcaacagactttcccatggctttatattcacctcagccctacaaaaccaatgcaatcctcaacactaacctatttgcatttaacattctctaaacaactctcacagctatattccttaagctaccaagtaaatttactatggtctgtgcggtttcatttgtcaaatctaaaacttcagtggtgaaattgcaaaaccctataagttatgggtgcttgaagaagaagcaattaccatccccaataggaccaatcgggaaatacaatgtcgagcgtctcgtcgttcgcgcaataacggaacaatggcggcggtggaggttgatcaactccggcgaattcagccgccttcactaccggccagtcaacgcagtcaaacatgagctcgagatccggaatctttcccggatatctccgtaggagctgtacgaatccccagatcgtgaacacatctcttgtctgaaaagcctcacgaaatttctcgacgtagattctcccgttgataatcgccaggcggaaaatcgccgtcgcattggctcgctccaaggcttccctcgtgatcccggtcttctcccatggccgtagatcctcgtgaatccatcggaagtaatctgggcacgtggcggatggagaacggtcagattctccttctccggcgctagatcggaaactcgtcggataattgtcctttgggcaagttccagtgtcgttgccggagaaagcagcgcagtttagcgtaaactcttttggtttttccgtaattagcttagtcgactgagggtattctggggattgagtggtttctctctcagtcacggacaccgcttctttctctatcaaaacctatagacgaaaacgaagtcgtttagcaaaaaccggtagttagttaatgactaaaaacaatcacgtgattattaaagctcccgtgtagacacgtgtcaagcgtaggaaacttgtttgacaaaaaagtaatggtgacacgacaaattaggcgcgaacgagttttagcgccactaataccgtatacgacgtggcaaacgacaaacgggactgtcgttttgatgtaattagaagagaacacaagaatctatttatagtaagatgttcgtacggagggatcgaggaggaggcgcgtggagagaaacgcgccgaggaggaggaagagaaagatggagaagaaggcgtaggatcggttagaagcaccggtgccggttttgacgagtggagacaaaatggtgtcgaaattacgagagtgcgttgcagaggtatatgacggcgagttcctcatcatctctccttgctgttgcatgccaatttgataatcaatgatcgtgaaacgaaagatgaagaagagagatgtgagagagagagagagagagaaagagaaaaggagagctttttgtgtgtgagaaaaggaaaggacagagaatcatgtgaaccagaataggaaaaggtttggtttataactaaagtgttttaatgtttgcaagacttttgatgggtgtgtcatgttgtgtgtaccaggaataaatgtttaaagtttctaggtgaaatgtgagacacacaagtgcaactcttctaattgtttttgtaagttattcggtaaataacaaaggaaaataacagaatcgttactataaaatcctgtttttttattgctttacacgatttataagattcgaaaaagtttaagatatatttgataagtagtatttttgaaaaaagtactataaaggacattttctattaaaaaaaaacttataaataagatgaattttgggaaaataaaaggcctaggacgacgccaagatcaaggactaagcccaagcccgaaatagaggtttttgtaataaagttttgaaataaattgcattttgaggcaaagatagacaatctatcgtaattatccgaaccaatcaaataattgacatagggacatcagtaatcatgtatcttcttttccggttaggttcatgtttaaatatcagttttaaaaagtgacaacaactaacaaaccgagcattgatttggaccacaataaagcacacatgtgatttagagaaaatggaccctttttgtttatccctttttttaagtgattagttctactatatcatatagtttcgacgattttgttacgacatgacatttgcatatatagagctgtcttggtcggagttcactgttcaataaagggtttaggctttcgtggtgcggaagcttaatatatcacaataatcatttttgtgtgagaatattcgttaccaatttcaaagttaatggatcattataggtctcatatatttaggaatatgtactcgtcatttgaaaatatcatcgtcttgattcttcttaatcaaatggaaacagaatgatgaggaaaaagcagctaataccaattatgatggattaacaaatctttttaggagtgtcctctttgacatttttgaattaaagctcatgcttcagaaaatatccatgtccctaccttaatcacaacttcacatcaaaaatctgactatacgctcttgcttttacattttcacaataatattcacaaaaaagttgattaatttcatataatactactatcaatgaaagtcaagtatcgaaattcaaattctaaaccgaatcctcatcatgtatcaaaaaaacctttaatggttattcaaaaagttcattgtattatcggaaaatttagttactcgaaacgatctttgatatataattttctttatcaaattatttcatcatgattcatgaatcatgcctccaagaaattgcatttaatttaataaaccaaaaagataatgtagtttataggtttctcgatttttgttattttcctaaatgagatttctcaattatttcattactaaagtatattaaaacatgataagatatttgaactaaaaaagtgaagggttcacgaaagctttgcataaatccgtattttcatattagtttgctttatagtagggactgcttctattatcattatcaattaaccatttatcggtttataaatttgatgcctaacttaaattatatttgttggcaaataaaatagaaagtaattggaagggagtgagagcgatatgatttggggcagagaagaaaacctaaagctcacactcacaccttttttgttactatttcacgcgtgctatgctcttcctttgtctccctatttcacaacccaagaaccctttccataataacttatactatcataaaatatgaaaatactaatcaaaatattagtagtatttattcacacacatatacataatcgacctatatatatagacacacacacttaggagactttgtgcactgcttcattctctataaccaagtataagcttggagggggttatttttctaaaagggattgagtttttaagatcatgtctgtgagtatctctacctcactccattcttcttacttattgccctcggtttacaattcacacaaatatttcaatagatatagagcttgaatttgtaatagctgaaatgtgtgtttgtagatgacagtggagataagagttccaaacttggattgtgaaggatgtgcttctaagcttaggaagactctactcaagcttaaaggtattgaaagcttttgagttttaaatatgtttcttcttcttcgttcaatctaagtattgagtgcttacacaaattttggtttggttttgacttttaagatgttaaccaaagttaaactatctgttatttttatcaaatatttcttaatttttcaagccaatatatgttttattaaagatttttcagtttggtatgcttttattttcatttttgtagatatctaaatttaacatctcaaccaaattcttaagaataatgaaccgattcaaatggaacatcaactttccggttctttcacatggtcagatggtttaactaatttatccggttgttattggtttacgtacaggagtggaagaagtggaagtagagatggaaacccaaaaagtgacggctcgaggataccggttagaggaaaagaaggtattgaaagcggtacgacgtgccggtaaggcagctgaactgtggccataccggttaggtaatagccattttgcctctttctataaatatccttcttacgtgaccaaccactattactctgatgcacaccgtacggatcccaccggtggtgtccacactttcttccacactcccgcggattactcggttgctgtggctggagatgagatcgcggcttcgatgtttagcgatgataatccccatgcttgtactattatgtagtcttttagtatacaaaaatatgttttcagttcatcttcttcgtccaaatttgatttgatgtgattttttttgtacaactaatgttggaatgagaaagtaaaatatatatgttgtgttttagtctgaataaattggatcaacatgatctaaacaaatacaatccgattcaaaatctctttcatacgattaaaatgatttgtagtttttcaagatccgaaccactacgaaactgaaattacaagaccgtaaatgatttctaagcctctctttaagtgtgctaaaccgaaattagattacgcagggaaggttttggttcaattcaagtaaaaaccggtacaagtgaattagagaggcaataaccaagttggtcagggaattggtggaagaccgattggtttcctaacgacgtcgtttcagaagccaataaaagaagctcatatataagaattagaatttagggttttttggtaacgtgtgagagaattctcttttctctacgagttgtctcgggtgagttctcttctctctttcagggtttttgaagtaaataagaccgagcgatcgtattattcgttttcgacttcatcttaattcggtcttccaagtttgtattgtttctgtaattctctctctctttcatgattgcatcagtgtgagtctgtgataatataataagcgtttttctgagttcattgatcggttgtgtgttctgcgttagaatttcattaattgatgagttttttgtttgtttgtggtgtgttttgctaacaagtcacacctttactatagttttaataagcgtcttctacaacctgaagatatttctattttctaatctgttttttcttgtttgatgttagcctagctatagcatttagatggcttttagctttgtagggtgaagtcataccatttaacttctcttgagcgtaatggtttaatgcagcactattcacatgttggtggttgttgattttgcagcttgacttgaagaaatgaagcacaataatgttatccccaatggtcacttcaaaaagaagtgggaaaactatgtcaaaacttcgttcaaccaacctgccatgaaaaccagaagaagaattggttagtagtaatgtcaccactactactgcttttgctatcttaatgtcaccactactatatttttttttggttttatgtgccatggttttattagaagttttaccataatcccatctcaatttgattatttggtgtgtaatgtttactcagcgaggcagaataaggctgtgaagatctttccccgtcccactgctggacctatccgacctgttgtacatgctcagactcttacgtacaacatgaaagtcagagccggtaaaggattcactcttgaagagctaaaggtttgtaatatctctctgttcttcattagcttttgtgttttgtttcttgttggatatcgtttaaattgttttttctttctgattgttgataaatttaggctgctggtatccccaagaagttggctcctacaatcggtatttctgttgaccatcatcgcaagaaccggtctttggagggttttcaaaccaacgtccagaggctgaaaacctacaaggctaagttggttatcttcccgcgctgtgcccgaacggtcaaggtactccttcgcaagcaactggtttagggttcagtggactgtatgaatggaatggatttggatatgatctctttgttgttatgcttttgtttgtgtttaggttggtgattctgcacaacaagagttggccaatgcaacacaagtccaagtagatcacatgcctatcgttcgtgaaatgccaacaatggagcttgtgaagctgacatctgacatgaaattgttcaatgcttatgacaagatccgtctagagggcataaacaagagacatgctggtgttagagccaagagagctgctgaggctgagaaagaagagaagaagtgagtatctttcttcatagcttgaagaaactttttatctttgtcatcttttggattttaattcttgtgtatcacactctgcttttttatccttaaatcttcgattttgttgctaccttgcttctctgttttatggagaagatcattatcacacatcctattagcttctgtgttaaatcctcactcaaaccttatccactcctaactaaatgttaaaacttaaaacaggacttaaccacaagctgattatcttcaataatcgatcacaagtcaactttaacgacaacaacaacaaaagaaaaagtcaacttggtttgcttcttgaaccagaacatgctttgtgaacattctaagtaagactaagagtgctttaatacggattttggcttcttatttcattataatgaaatttcatataaagtattaatgcatcttaatctgttaatatcactatactacgtcaaagaaagcacttcttcaatacaacactctcaatcggaatcaaatcagacggaaacgcacagtcaacattcttcgcctgagctttcttctcaggcaacaaactacatggctctggcgtaactctgctggtaactccagccacatctgtacaattccactgcattttcttagccttagccgccaaagctatagtcacattcgagatacaaatacccgtaaacggatctttatcaatcccgtcgagactcgctgacattgtaacattctccgccgtcatatcgcggtaattgatattagtaatttccggcaacgccttgggatcaaatccttcgtcaggatgactaccgtagtttccactcatccagaaaacatatttcatcgtcttcattgtgatcctcctagcgtaaatatccttgacgtaagcgccacgtcccaccgcagttttgattcggatggcggattcggtgttggttagagttacatcttcgattctaacgtctttgattcctccggacatttcacttcctaaggctactcctgcactctttggggagatgcatgtcagccgtcggatcgagagttgctgcgtcggcattccgaatttgattccgtattggtcccaaccgcttttgacggcgatgcagtcgtctccggagactatgtaacagtcttcgatcaatgtgtttgtgcaagaatctgaaaaaacaagaaacagagccgttggaaacccaaacaaaaacagaggatgacattgtgccaagtcagattttagaaatgccaggtaggataataaggttgccacgtaggataaacattacctggattgataccgtcggtgttgggaacagtgacgggagcaagaacggtgacggatttgacaatgacgctattacaatagacaggatgaatattccacgacggcgaatcgatcaatgtgatgttcgagatttgaatgtttttggagaacaagatctcgatcaagtacggtcttgttattttgaactgcttcttcttgaatttgtcccaccaatactgtccctgtccgttgatcgttccgttgttacctataatcaagaaaacaatcaaaataagaatcggaatatatgatcaagcatatcatggtgtgatatattgcgttggaacttaccagtgataaccacgtcggttaggtttgtaccggagatgagactgttgaatctcccggttccggttccgtctcttcctttcccgtacgatggcaatggagcgataactggccattcagattcatcctgtttatgtcaagaacggatttggtttttgtaaagacatattaattcgttatataggtcgaaaacaaaccgggtgcaatatttagatatgtgtattaaatgtacgaggtgctttagaaaaaattctaacgtcaacgtctctactaggcaaaatttgattcattaggagtagtgtgatttggtcatcagtatagattgttatggtatatgaaacgtagagacgtttaattcggatccaacacaacctaaaccaaaaactaaacgtagaaacgtttaattctattcaattacactctagtcactattgttcttaagttttttaaaaatatgaatgaaacggttttaaacacacttacctgagatgcaaggatggtagcacctcgctggatgaacaaagtgaaatggcttgtaaggttaaaacttccggtaagccattttccgggaggtactacgagttgagctccgccatcggttgccatttggctgagcttgcttatggcatttctaaacgcttttgtattagaagtttttccatctccaaccgcaccaaaatcagtcagtattgcactatgtttccggcaattcagcgctgaaaattcaatcttggaagtcaccgaatttcggtgactccgggattcaatcgccggaaaaaggaatatagccaaaaagactagtaaaccaaacgttggtctaatcatctacacaacatagaaacatgcaaaatatatgaatcgaattagtatttccagaatatattttattggtttagatagtttgatcttctatagttttgataacaaaaaattgtataagctaaccaatattattcaacatatttttttgtctacagcaatattcaacatctaataaactatgatcttgtaattttgtcgcaaagaatgttacaagattagcgggtatataaaaatacaaacttcgagtaacaaataaaattacgacagtggaagaaaaacaataagaacaaaaaaatgctctttaccttaagatatttttaaacagaggaatatgtcttccttctggtttgatcgtctgtgggagccaacagaagagagtgatgtatatatgggatccctaaatatttatagattttgtttctcaacacatacaataaagtttatttttctcccgactcaaatctcgtacatgcaagtttaaaacaagaaaataataatatagatttatgattatatgattgtgtttccatctttacaataatagaattctaaaattagaattctgtagttaaccacttgggattattagcagaactctcattgctgacctgattcttaccaattttaaatttggaccactatatttatagaaatacgttattaaatggatggattttatatcattgtgagaattaaatttatatatatttaattaattagatgtttaatttcttttactattgagtcaatgactattgagaaaaaaatccttaaataattaattttattcaggaaagttattagctaagattaacatttatcaacacactacccactttgactaactttaacatcattcatcttatcaaacttttgtttttatatttaggtaactgatataattgagtatcatctacatatacatttttaaagccattttgtgaaataaatcctagagttagaacttatttacaatggctgccacatctttttaattattaattttcttttggtaataaattgattaacaaacaaaaaatattccaaatatattccaatcccatatatcacgcagatttctctaaaatttgaactagattttgaaaactatttaagacaaaaaatatttgacaaaccaaaatacaattgcaatcccttaaaatgagcaaaacgcacctaaatacattttttatcagttcacaaatcttctttctccaatatttgaattagatttcgacaactatttaaaacaaaaaattgtttgacaaactaaaatataattgcaatcccgtaaaatatttttttaaattagcggtgtatcgcatagttttttaacgggacggatttggcagaacgggtttggaaggatgttatttaataacaattataaactataaaatataaatattttatagctaaatataatttataaactttaatatatactaattttaaaaaaaaatttgtctccgcggtatgtcgcggattataatctagttaaaatatatcatagcaataaaaaaacggccacatcttattttcttatgcacatttggtagtttatttgttgttagctaatttgttttgcttttcaacactagctactagctacgatcagatttgttaaactttggactaaacactcttagggttgagcatatttttctctggtactcatggattttcttttgaaactttcgatgcatgtgtcttcatatgtatatgtatagcaaaaggcgatcttatgcttcttgataggtgttgataatgatgaaaattagtattttggatctagttaatatttctttccacttatgaatcttcatactttgtcttctacaaggcattaccacgcaatcatttcctaagcgtacgttgatcattttgcatttttgcaagatcacttgcaaaagacgttcttataggcgtttgcgttttgtaaaaatatttacgaaatcttacttttaatgagagacttcaaaatgaagatgaatgtcagcaaaaaagaaaaaagatgaacgtctgcgtttcttgaattttatgtacaaatgtttaacattttagttatttaaatttttaactacaaatgttaatttgtaaatggaatataggttgtcatgttgtgtctaatcggttgtacattttagttatttaaaaagagagacggttgtaagtcgcgggcaaacgaggttgtggtcactcccattatagactagtgacattcatcactatttctctccttttactccttagtcattctacaaactctagttgcatatctctctaccactctacttcaattcaaaactatatgacccaaaacgtcatatcttgtactagtttcattaatattaatgcaattcaattaacagaacgaaaaaaaacaaagaaggtttcattgacttgaacaacaatacgaatcaatgatgtatgaagaaaactgcatgattatatcatacgaagatagaaatgagaattagtggattaaaaacaagagaaatacaaaaaatatagaaaattgtggattgcattgctataattaaatcctctaaactcctttttctaaaaaaacatcgtaaaaatcactacaaaaaatacttttgataacgtcactttatgtaagtcacttagtaaaccgattttaaattttttaccaggaaggaatatgatgtcggtttagtgtatatgttcattttataagaattttaatattgtagatgagtcattaggcctatttacacaaaagtccagtcaaaatatgtttatttggtttgatctcttatagttagagactttcagagcttattcacaaatgacgttaacagtgagtatctttcacgtcattcgatattacaacactttctaaccaacggtctttttcttacatcattttaccgacgttaaatacgatattaaacaacgtgattagccatctttttgtagtgaatttcttacttcaattttctctttgacccatcttatttgatttatgcaatgcctagagtttacagtttttaattccaatattaactagtccctaccttcaaacatgctcctcttgctattaccatgcattgctatatctacccgtacttgcgccgaaactacttgcagaacttaaaaacgaagtttacggttttgaagtgtcatacttaataggcatttcaaaactatttagagagaaaatacagtgattggtttgcttatactttaaattttggcttcaatcaaaagaaatgaatttgtatttatagagtataccacgtcaagatcagataccggatcctaggctaacccgacgtaagttattgattggtttacctgttctcctcccatcgagagttgggttgttgttggagagaggttgtacgtacgtgagtcgtgacggtgagcttgttagtcattttccctttattctgccaacgtgtacataattcagttttggtatatagtaaattttatgcgaaacaaaagctgaaaattaacatgtttattatcaaaaaaatgtggctgaattctgaaatatcattattagttaggtgcgttttaggaaatcagtaatgaataatgatcgtgcacaacaataaactggacaaaatagcatttgttctttttttctgtcacgaataatttcatttaagaaaaaaatatagaaagtcatttatatgccaacgagagacaggacattgctaaatccagctcaggacattagaaagttattctcacaatctctataaaataatccatgtcaacaaaaaaaaaacctctattaaacattaatcgaatttctaattcattatgaaatataatcagaagagtcctcatcttattgatcaatcgtaatacacaagaaaccatgactttagaggagcagaagaaagtcataatgcccgaggccgtcgcatcggagccatcaccaccatccaaggaggagaagtccgacgattcgaaagctattgttctcgtcgtcgctgcaagtaacaaatcttttaaatttcactgaacaagaattacatatttaaattgcaaaaactacttcaactatttcatattgttcgttttctctaattttcttcttcttcttcacaatatagtttataacacttgttggtataattattgtttatatatctaatatattttggccatgtaaacaaaatgtttttttttcttttggctaaattaatactgttatattttcggcaaagaactgtaaccttttcaatttttgttgttgttgcagaagaacctacggaagacaagaaagtaggttcagttcaccgaggtaatcaacgttatagttagatcatgattgatacataaccaggaaaacaaaatattttaactttttatttgatttttttacctgataataatagttaatatcagtgaagtttatccaatatctaacttttagccaaaaatttcacctgcggaagaaaaaatattaattaagtttatctaatttcagtaatttacatgataatattagttcatttttctctagattttttttttctgataattcatggtgtgtgtgtatgaagatgctgttttggttagactcgagcaagataagaggatatctctaatcaaagcttgggaagaggctgagaaatccaaagtggagaacaagtgagtcctaaagaagtttatataatccattgttttgatgaatttccaaatttttagttccatgatatttttttttgtgttccctatatatttgtatgtaatctcatttattaactttatgaaacagagctcagaagaagatttcttcagttggagcttgggaaaacagcaagaaagcttctgtggaagctgagctaaaaaagatcgaggtaaaagtgtaattctttattctttcaattttgttgttttatttttaacttttacatgaaatgctttccacttttcacattattctaatttatccgctggaaatatgaatgataacaggagcaactaaataagaagaaagcacactacacagagcaaatgaagaacaagatagctcaaatccacaaggaagctgaggagaagagagcgatgaccgaagctaaacgcggagaagatgttctcaaagccgaagaaatggctgcaaagtaccgtgccaccggaactgctccaaccaagctatttggattcttctgatcggagaaatggtctttgatgttgcattgtggtttcatttgttattaacttgagaaagaagagattattggtagttgaagtggttggtgtgggtttcatttggcaacataaaaagttacatggccataatgtaacgtcttattatgtttggagtaatgtgttttactcatgtgtaatttgtacagcttaaccttgagagacttcttttgaactttctaaacttaaactcccaattatttcgtttcaagttttcttcttcaatctcatggtccaagtaaaaatacaccaataccaaaatattgttacatttaagtttagtaaaaacaattaagaaaaataaccaaaattttgcactatttaagattagatttttaatatatatttaaataatattattgttccaaaaacaaaaagtaaaacaaaacacacccttaccaaaattatgtcaagtcaaagcatcctcgttttagggattttctatacttgggcctaaatactaaggcccgtaattaaaggcccaataacgtttgtggtattgtacaattttcatgtagaaaatgtcttatataaagaggtcttgcaaattagggttttcatttcagtaatcgctgccgcactatcgtctcctacctcctttgcctacaagctttcacgcgggagctcaacatcagccatggcggaacaggttactcgatctgttctctcctctaagcttatcctcgttttatgatctattgatccttattcactcaaatgattctaatactcttctcttttctctgtcactaattttcagactgagaaagcttttcttaagcagcctaaggtcttccttaggtaattttgcgattcgatttctctctgttctctattgtttcattgtatttaagttccaagttgtttatattgttcattgtttctgatttatcaagctcgaagaaatctggaaagggaaagagacctggaaaaggtggaaaccgtttctggaagaacattggtttgggcttcaagactcctcgtgaagccattgatggtatgtttaagcttttaactcgttataatagataaggaactcttggattgtgttgttcatatagtcgatagatttcaaatgctattttgtcttgtagaatcttaagctttggtttagtgagttctgattcttcagctttatctggatctacattactgtttcagtgatgcaaatgttatcagtagattttgaattagtaggatgtcactgatttgaatatgtgatcaagcttcatagaaacctgcatcattctctatatacctttaagtcagattctcaggttattgtgtatttgtgtggaacaggagcttacgttgacaagaaatgccccttcactggaactgtttccattagaggtcgtatcttagctggtacttgccacagtgcgaaaatgcagaggaccattatcgtgcgaagggattaccttcactttgtgaagaagtatcagaggtaaattcatacattctcatacttctttccatagagtcttacacattgatgtttaagaaagtaatatcctttttgttcttaggtatgagaagaggcattcaaacattccggctcatgtctcaccatgcttccgtgttaaggaaggagaccatatcatcattggccaatgcaggttatgatctgattcaaacctacaaattgtctccattgattctgattatcgtgaatttgttttgatctttttgtttgttaatgattgataatttcaggccattgtcgaagacagtgaggttcaatgtgttgaaggtgataccagctgggtcttcttcttcatttggaaagaaggcattcactggaatgtaagctgctgctgttgatgatgttagtttatgtttctggatagagctgaactattatgttttatggtgattttcttattgaatttttccagacattaaattttgttttactctgctgaatctttttcatcccaatctgtgcctctgtttaagatctgatttttgctactcttctcttaccttgtcctataattaggtttaaaacccggttagacaggccagtccaatctagtactgtcgagtttggtctaattgatgttcttagtcgaattatcaaataagaaaacgcgaaggattttgacaacaaaataaaacgtaaaaggaatgtttataactttatatagtgaagaaattacagatttgttgggcatacaaagtatttgtttatgtactcttttttatccccgtctacttaaattaaaccctaaactatatttacttggacctctctccgaacatttacattggtcgtagctcgttgatgagaccatcgaacaaaaagttgtctgaaaatgaagtacagaactcgatctcagatgatatctcatcatccaacaaaaattctgaatttggcacgaaatcaggcaaagagtcgtttcccaaataacgagggccacatggtccaatgaatcctctctcttccggtaaaacaagattttgaacatagctagacttttgaggtgactgatccataagcaaactatgatctaaccattccgagaacacgagatttggcgaaaagcttgaggtttgagcattagacgtttctccgacattgatagatgaagaagatctttcagttgaactctgcaaggcctcaagtgagtttgtgattaaaggtgtttgatgtttttttgtggtttcatgttgtttcaaagttacacccttctttagattagaatgccaatagtttttgatctcgttgtcggttcttcctggtaagaatttcgatatctgagaccatcttgtaaaaacaaaaagggtcaattatgaaaagatgctaaaacgtatatcaatattaagaaaatagtatatgtttaaaagtctaagtttaagttctaaaccataaataaacatgaagtcttaaactccataaaacctaaattctaagtgaagtgaaagattatcaaaggttgaatgacttacttgttacccaacatggaatgaagtgaaagaagtatagtttcctcttgtttagtgaataaagacttcttaagtccaggtcttaaataattaacccaccttaatctacaactcttcccattcctctgcaatcctatacattatgtgaaaaccaattagtttacataaaaacccgatgacaaatatcgaaagagcctaaatatttatttaacaaagtgaaaaaatatatttctaattaaatagcagactaaatataaaatgaaaagataatgttgcatgttttcttcaaacaccaaataaaaaaataatctcaagatatgtattattagaattaccagcttgaagaggaatagtactccagcatccatggccatatttgaggacatgactcctaagcttctcatcttcctcgggtgaccataatcccttcctttgcttctcctttgatttcatttcccggtttgatttttctgatttaaacaccatttttatttttccaaagtttttttttatatttgaaatagatatattatatatacgtgtatggtactgatgaataaaaatatgtagattggtgatgacaatctttgacacagatacgtaattcgaaagagggaaatatatagacagttttgtaggtcgagttctttaatagtttaattagtaatatctaattcatgcttgtgtagaactattcatatgaaagagggcttgttccacacgaaacaaatattttgtagatataatttggaacattgcatcacatctttataaattttaggtggagccttaccctttgaattttcatgtcataatttcaatacgacattgcatttaaataaacaaattaatattttaatttatatgttttgtttcagaaagattagacttttgcaagtttgtctttgttttgcttgccttttcaaattatgttgggggctaaggctaactttaataaatctgccacaatgatatagtggtgactgggctaggttatttgttttttgttttttttgtgaaattatggaacaattagcaactagtcgattaatctaccaaatttttaatatgcataagtggacattttcacagtaatccaccagctctttgtcttggtaaaacttaaactaaataactagcatgtgatattgtgaattattcttattgtttatgagtagaaatattctaattcaactgttcaagttagttaattttctattgaatagagttgaagaagacttttgcaacttataaaaagcctacttgccttcctcaagaaaaactcttgtaaaaaacaaaatcgataaattattggtgaattagcttttgtttttgttctttatataaatttaatttacatagtatttgtttatatttatttatgtcagtattaaagtaatagcattattggtttgacaactacaaataacttaataatttataggtctcgtcattatgtcaaaatgtatattattgacgaaaacattcacagcaccttaatatatccaagttctacaaaagaaaaaacaaagaaaagggtgtaatgctgtggcaatattatggttctatattttgatgaaaaaatataatctaagttagaaaattttcacaaaacatagtacaaggtttacgaagctctccaaaagtaagaaacgtttcttaaaacgtcctacaaatacaaatccgtttggaaactttgggaagattatctaacatgttatggattgttttggtagtgaattactatttaaaatgacgtaatttttacaatgcctctctactgattatattgataattgataagccttcagacttcagtgagcaaaagaccttggcagccgacactgtgatgacgttagctgcggattagttatcttgacacttattgtatactttatttgttttaattcaagattccaatatcgttttctgtgctacgacttattagcatggttttgctattgcatactaggcgaatttcggatctaatcactgaatcacacaatcacatattgacatatcacacgtacacaatgacatattgcatatgctagtactgatgtttacatgatcatatgtcaatcatatatatcatgtcaatcatttgcaggaaatttataggcacacaaaaagctctagtattgaacaaaagggttttgtggatttaattaagtataattgacatatgagtatagtttacgtatgtctattgtgaactatataaattatcatttaacgatctataataacaaataattcgttatctattaacgaaaagaaaaatcgttattgaagacataaaacaaatactattgtttggagtcaactctttacccccatttgcggatagaaaattgaacaaaatatataaattgtgatagtaagaggtttatgcatattttttccttttttttggtcaccaagaagaggtatctatcaagaaaaatctaattaagaaacagagaactggttctattaaaacagtgacaatatagtttggttaaatactgatagctttgcttgaacttataaataaatctcgcctaaccagcttatataattccacgttgcgcaaagtataattaagtcaacaatgtattacaaagtcgtggaccaatcatgtattttcatttttgttgttgtctaccaaacatgtttttcttttttcttttttgagatgggattatatcacatcgttgtaagatatggtttattttttctgataatgatcaacaatcaaatacagtgtatatacaaaagaatcaatatttgattgggttacttaatccaatagactgtctattatagagaaaactttacaaagaaaaaaacccgtcactaatctaatttttatttatttaagtgggctaaacaattggttcaaacgttaattttgtttgttccccattcatgttttaattataaacatactttacaccactaatgagtgatgtcaccgtactttttttttttgattttcttttgtaaacaagagtttattagatccacatccaaactaaactaatcatcaaactcaattaataaactcgtaaaacaaaactttaaattagcacttagtgtatacacctcttcaaaaatatttattgacctttagcaaaataatctttaattatttattgataagtgtctcttttggaaagagtctctcataaattcgtttttattggtgcattttgttttgtcattaggcatgcatataaaaagaattgtccactggtgatggtcattgaatcaatgacattgatgtatccaattgaaaccttccaaattccaagcaatattttttattacacagcagaaaaagtgttgtgttcaaactcttaactttcttgagctctttcttaatatatttttggtatcttaacaaaaatacaaaactatatggcaccttaaaactctaatatgaaattgatgattttatacacaggaaaagttattaaataagagaattatttcaataagataatcttccgtgagttatgcagttaaattgaatcaagcaaggtaaggtatgattaacaaaagagaaaaatatagcttcaaacttttaatagttttcatgaaatccataaattaagataaaagaactcattaacattatttttccttttttgttatcataggataatgtctttcctgatattttgaagaaagatcctaagctctctagctttcttgcaatgttcctcatcatctgtctctgaatcactcagctcaatcacagtctcaagttggtgatcatggctcttctgttcttgataacttcttgacacgctccgtgaacgagcttcaggacaagggcttatcagatcaatgacttctgtttccggatacaatggaaatgaactcattccaacacccaatctatccctgtttgaccaagcgttattgcaattttctctatcaggtgaatcgataagacgcaagtaatcatgtttcttggagttttgttgttcgttctcttgctctgcttcttctaaggtgcttctacttactagagaggttgagttgagatcaaggtgttggagttcgaggctgagttcgacaagagaagaagatttggtcggtgaactcgtttccttctgtttttgtttcggcttcggtttcttcttttttgctgccattttctccttgaactctatgatcttctcaggacaagccctgcaaagaaacgaggatataattttggaaccccagaacaagaacagtaattcagtgaacaccaaccaataactgaaccatatttgatgttatgtgacaaatgaccagaagcaatttggctgcataagtagatctagtattaagttttgttttgatgtttcgtgctcggtatttgcagctttggggaaaccaaacaaataattattttgtgaagtttctatagccaagccaaactaaataactgaactggactgtttctagtatctaatttagtccacagctaactatatcacctgaagatctgcttacttcagacactatttcagttcattgattcatggtgagttaaatttttgcattaaaggtcaaacaacacaggcttaatcaatgtcaatcacttgagctaagtgtttcagcttatggtgcagcttcaaaacataaactttagtaaatgagtgaaggtcagactatcattacctttctacaagatctgcaggaacaatggacgactctaacccttctagatcattccatgagacttcaaaacattctcgcccctgtacttttcgggtctttatgatttcagacaccggacacttctctggcatctgcggctgtaagagattttttttcttgcaagagttaaaacaagttctcgattaacttccaaatgatttgtgtaagggaaagccagttaactttaagctgatggtttctccaaacacaatgcaaaaccaaaagtttcctatttaccaatatcataaccttttataaccttcgatgcaccgtatgaatttgatgaattcatgttttgtagtaaattctaacataaaagccgaattgttcttagtatttgcttcaacagttgactacataatcttgaacacaataatcatagcttgagacatttctggggaactaaaatctatcgctaataacttgcagagagagagagagagcgagagaagggtaccttgtggagaggaaggttaacttcaacctcagttgatcttgattgcagattagcgaaccttctcagatttctttcagcaactttaggaagtatgtattcatcttaatgcaagataatgaaaaagaagaaacgttggtttcacaattggttctgcacaatgcaactacaaggtataagaaatatgtataaatccaaagtaatacctgttttctcagggggccactcaaagaactgatggcatatctcctgaagcttggtgcgctggaaagagaattcagctaaggccctgcaaaaccagtatataaattatagcacttcctttataaaaaatctgaataacattcaaatttttttcaagttcaccaatctccaggcttaacagacattcctattataagctt

SEQ ID NO: 88 - DNA, 129757 bp, Arabidopsis thaliana
gaattcaatatttgctattgaagttgatatctgattcgtcgaggtttgatggtatgatgcttggtttggagaatgtaatttagggttccatgatgattgattactagagatattggtttttagttgagttttcatcgtaccttgtcgtagttatgtggttacttttgttttggcttggtcaatgtgattgctaataggttatgttttcgtacgtcttgatgaatttaacatgtcttgcatggcgatgtgttagataagcagatctagtcctctcttcagagcaatagttcttggtggaggttgaagtgtgatactttagaactctttaagctgggctgagttttgatgtaaatcattgtatcaacttctgtggttaactagatgtccttgttgtagtcttcttgttttcattcttgtccattcttattatgtgaagtatatatatgatagatttatttctacttttcctttaacttagtgtctcaagttcaagacagaccaagcacaagaagcgaagaagatggagaaactgaataacatatttttcaccctcatggccagaggacctgatggtaaaaatttcattttctgcatatctaacttaaagaaagaacatgcatcatctatctcttagtgtttgagaaaaaaacctcctttgttttattgagctatgaggttatttctattatgagacaatgtatcacatcgtcaccggctattattttctcaaaacatcgcttttctcctaccaatcttgaaagaatggaacttgaatgtgcatcatctcacaacctttaaaaggaaagctccttttgtgctgtgtaacattgggtgtattatagcttactttgtttatttatgttggttgtataatgcagtcgatctctcagaagtcaccgggaaagaacagatggagacacagcctgccaagaaaggaagaggaaggaagcaataagtctcaagatttgttttccgtttgtcttggtatcaagattttgatccatttttgtttgatattttgagatggtagggttgtcaagattcgttctaaagcttacgacttttttttacactttgatcgattaatcacttttggattagcctaaacccaaaagctaacctttttaacttggattttgaaagttggccaactccttatagcttgattagtaagaagactaaagatagtctttgaaaagagaaaaacacctggtcaattatgatggagacagagaagaaaaacgagatgattttcttaaccgatgatctatcagcaaatatcatatcgagattaccgcaaagaatcatcaccacttccaaactagtttgcaagcaatggaaatcactcgctgattctccgtattccagccaaagtaccatcaaaactcgcattcatgactgtcatgtacacacactcacaagaagaggtcatgggttactatgcacgcaagatttggggacttccacaaaataaattaagtatatttagaaatgtaagaattgtgggacccactggtaggggcggttggggcgatacaatacgattcgagaataatatcagaccttagaacttaagctttagttgacaccctacatacaaatacattttgtgtcacaacgttagtgcaaaatataatattaaatctggtatctatcttatacattttgaacataagagaaagcacgtaggaacatccattgattgttatatgaagcaatatggtatttcatggggaaaaagcttaagaagagatcaaaatcatggcatttgattcaaggaagagtcttaattaatcaaagaactaatgacgagagatcactcttttccttttcctttccctatcgtcatgtgattcctaaacctctcgagggtcgtagaagttttctacaaagagactgacattttcacacatcctgagttgatgaaacatcacgttgtttcttaattccttaacaatacatctcttttgatcagaactatacgactatgcaagttctttttttagtttctccgtttaatcttttatgttgtgtggaaataagcggttttcttatgtgacaatgtgcgtttttttttgtctgtttcgaatcctcaatatgacgaagattaatacatttatggttgtgtttcttttgtgttgtataaatatgtgtttgttttattttcaataataagcttggtttggtttccattgtttgaatttattgggtatacatattagaccaattagaattccacttgtaaatgcatattctggaacaataatgttgactatactaataattttttcttgggtctaaaacatttagtatacttttcttgaattttatgtaaagttattctgtttttaggacttttatcctcactgaattatgttgtgttaaagtagtagcttatatggtcacatatctcacacgtgtttccattttttttctatctaagttttcggtttttacattgtatacaaaaataaatggcatgccttgggccttggccactgattcacatgatcacgtagagtttgtgtgtgattcaaatcctagatgagaagatcatccaattgatctaagatgtgtctttcttatatcacacgttttattttaataatactcttcagttgggtttgattccatttatgatttatctatgaaaacagaatatgtcctcatgctgattatttcgtttgtggttgcattttaccatctgtagttttttttgtttactgacaaacaactaagattttatgaattcatttgatgataaatagttaatcaaatatattattatgagtgactcgatggcgaaagctggtattatcttatggctgctaaagtctacttttagaagaagaaaaaaaaagggtctgttgcattaccctgttgttgcgactctcctacaataactctcacgtggcccgtttcttggtttttgccctattttcacaaaagtaaacagagattttcactagcaaattgggcccaattggagacaacttcatgtggtttgaatcgtatatttcagatagattagacatctagtcttctttgatgtgcggtgaggatcttaagtcgctataacgttgtgaaaaaagaaaagaaaaagtcactataacatagatcgcaactaaacaaataaaggacactatacatgtacgtaataatattcatttattttcaacgacaatgttccctagggtggtaacccaagtatttttcatagatattatacttctagcgaaaagccatcaattgagaaaaaaggcctccacgtttgacccgttttgcctataaaaggattctttaagatatggaccttactcatcttctccgttaaacccatttaaatagttttcattgtccttgtgaaaaatgcaattctcttcatcttctattacttctttcacttggacagttttaatcacagtgggatgtcttatgctttgtgcgtctttctccgatgctcaacttacccctactttttacgacacttcatgtcctaccgtcaccaacattgtaagagataccattgtcaacgagctaagatcggaccctcgtatcgccgggagcatccttcgtcttcacttccatgactgctttgttaatgtaagatatcacttttcatatatctatagcgttatgaaattactgtacttaatctcttcatcttttaaatattgattaaatcagtgtaaaaaagattatagttgttgtcagcattagcaattgttttaggtgtactcttagttgctttcaatttaatgtcattttagcttttcttttatgtttcaaaatttggattctgaatgcaaattttaaaggaaaaagtaatttaacatcacgtcaaaattaatcaaacagacaaagaatcaattagttttggaatcacgtagtagtataatggaacttattaaatttccaccatattttggtaatataaatttttcttttactgaatttattttagtgaattaaaatgggttagaacttagaagagttaattcctccttacattgttttccttaactcagttacttgcttcagaggaacaaatggttttaatggatgaaaaaagttcaacgttaaactgttacctttggtaaagatgtaaactatggatgacattaactaataatttgttaaataatattttggacttttgaaagggttgtgatgcttcgatcttgttagacaacacgacatcatttcgaacagagaaagatgcacttggaaatgcaaattcagcccgaggatttccagtgattgatagaatgaaagctgcggtggagagggcatgcccaagaaccgtttcatgcgcagatatgctcaccattgctgctcaacaatctgtcactttggtatgctccattgtcccatattcttttattcattacacacattgttcgatataaatatgtcaagtagtcgctttacgtacatgttaaacatgacagtctaagttcgaaaataaaattgttggtatattttatgtcttttagaatgtcacaaactcccaatatatgtttagaataaaatagacaagtattcaaaattaatcggaaaacattcaaaacactcccgttgatattttttgataattttaatatcactgagaaaataaggtctcatcactatgatttatgtacctttttagttaacaaaatagaagaaaattccttttcatccaagaaagagaccatggaaattacctttgagttttgagtatataatcaatagatttataaaacatgtttcagggtaataatattttctaagaaaagaattattattttgaatataatggttaattattatactataggcaggaggtccttcttggaaggttcctttagggagaagagacagcttacaagcatttctagatcttgctaacgcaaatcttccagctccattcttcacacttccacagcttaaagccaacttcaaaaatgttggcctcgatcgtccttctgatcttgttgcgctctccggtaattattaaaaagaaatgaaaccttgtttgatatagttgtaatttagcaagttaatcgttgatctaattatggtcttccttttgttaggggctcacacatttggtaaaaatcaatgtcgattcattatggacagattatacaactttagcaacactggattacctgaccctacactcaacactacttacctccaaactcttcgtggtcaatgtcctcgcaatggtaatcaaagcgtcttagtggatttcgatctgcgtacgcctttggttttcgacaacaaatactatgtgaatcttaaagagcaaaaaggtcttatccagagcgaccaagagttgttctctagccccaatgccactgacacaatccccttggtgagagcatatgctgatggcacacaaacattcttcaatgcattcgtggaggcaatgaataggatgggaaatattacaccaactacaggaactcaaggacaaatcaggttgaattgtagagtggtgaactccaactctctactccatgatgtggtggatatcgttgactttgtaagttctatgtgagaatagttgactcaatatctggcgaccagactatatgttaagataaataagcgggatctcaagttgttacttgagcaggagcagattgtattggtgtttatagtatccaagtagttctctgttttttttttatattggcctttgatagcgttttgttaatcggtctaagcttctatggttttggactgttttatcctaataaatatgacaagataaaacgtttatgttatttgaaaatattttgtcctacgtttccatttctctagtgatgtatataaaagaagaatgtgtgatctagcaaaattgaaatatgaatatggttcaagattgtcgtgatacatagtcagatatataaagaataaaacgtatctaactttgtggccttgcattgatttatgatacgtaaaaaaaggacgcgacaaatatgagcctggcgagtctctccgaacacacaataattctggtggaacgagaagcgattcatagggttatcaagaggtctaatttcaagctgagaggcctttatgaagattaaattaagatcagttgagaaactcaagcattggaggggagaggatgcggctagaaacttagatatggaagcttcataaatacttaactgatgagaaagatgaatcgcgtaagttacaaatggagcttgctggaatttagaagagtctatgtgtgttcaaaaatgataatcacaaagtttattatgtatgtagcaaagcttaaaaagaaacttgtagctgaaaagaaaaaaacctaagctgttcaaagaatgaacttttggagaacttgaataaaacaaggattctcaatggtgtaacaaataatccatataaattttttgagcatatagaggcgagagaagaagagtattggtacgagttataacaaagaagctaattaagtacatctagatcaaatattgtatttggtagaaatgcataacataaaaaaaaaaactcacgactaacatgtcaaaaggaacatgcgcacaattttaatagggaaaagaagaatttggttctggatactacggaagttcatcaaaaatcattttgtaggtgaaacaagtgaactttatatgaatttatttatagaaaagaaaacgtaattgaaacccattaacctatgatacaattgtgtccaataataatttgaaattaaaatcctaattaaatagaaactaaaacagacaaatacgttacttagcttgaaccaattaaacagatgtctagacaagtacgttacttgacccatttattcccaagtttgaatcaccattcaaaaaatgttacaaagacaaacgttttctccaatgtaatggagtattctgctgaggattttgtgtatgtagtcccctaactacataactaaagatggattgaagaagggtaaaagaagaacatacaatttctaaggatggtcacattgggctagaagcttttgttgtttgcccaaaaaaaaatagtaaagcttcctttaggttaatgtgagtagttttataagcatgacaagatttttctaggctggcatatatatgctttagacatccaagaggtacaaactatgtatatctctaaagaaatatatatctccatgcctataaaaccatctcacattaacctcaaaggaagtcttgctatcttttttagttccttaaggataatggtacccaaataattggcaaacaacaaaagcttttaatctaatgttccttgcgaatgtacctcagaatcattttatatcgtcatgcatgtattagcaacgaattagcaatattcgaaagatttgatatcaaataacactaaatcaattctaacatctgaaggcttgacaactatcttatttgccactcatttgtgatgagtgacaagattgtaatgatcctaacaacctcacactctcgttatatatcgcaaaattgtcacagccgttttcgatgcacatgatccgacaaccattttggttgtaatgatcctgaaaaccttcacactctcattacataacgtcgcaaatttactatacaaccatttcttgacaaacaaatcggtcactagctattcttctgttttttttatttttcttgtaatatttatatatataacgagtgtgacttgggctttgacaatgttagtatagctttaaaacgggggaaaaaaaaatactagaacattaagttttgagggtgcaaatatgtaacatatgtgttgtagaaatactttttaaaatttcaataataaccttggtttagtttccattgtttgaattggtattcatatctgactaccgtagaattcaatttgttagtgcagaatctgaaacagaaattgtgttgtctgtatattctttttttgggctctcaaatatttcgtgtatttttgtggaattttatataaagttggtgtcttttttaggacttttcgttgcattcaattatgttgaatgtgtaaaagtagtggctttccttggtcacatttatcaaacgtgttttcgcctttctttaattttccgtgttcaagtgaattctagctaacttttcggttttacgttgtatgaaaataattggctgtcgtcggtcacatgatcacatagagtttatttgattcaaatccatttaatatatgctgtatctttaatgcatacatagagatatattattatacgttatcttttaataggacattatattttgtttatatgaaagaaaagaatgtactgtatatgcagttatattatgctggtttatgtcaaagatagaagttaacgcaaattaatttctttatttcaattgtgttttgcgttacgatctgttttttttttttttggacaaatgacttaagattttattacttcatttgatattaataaattagtatgggtgatgcaaacgacttgaaggctagggttggtaccacggctgctaaagtctacttttggttggatctgtggtcggaagatcttgacgtgatcacttctataattgaggattgtgtgttgctgctactctcctctcacgataactcacgtggcctttttcttgtttttctttcttcatattttcacaaaacaaaatagtcagagatcttgagagattttttcagaagcatattgggcccaaatgtggacaatttcatgtggttgaattgttaaatttcagatagattagacaactaatcttgttgacgtgcatgcggtgaggatattaagtcgctatacgtcatatacgtgtatacttaaaatctcgtttgatatttctttcttttgtttttatcttcaacgacaattattgcctcaggcatgtcagcagaaaacgacaccgttcatattcgatctcgttattaatatgtttttgaagcaaaatatcattattagctatggagtttctgcagtagcctaaccggaagtctcaaaaagataacgtttatgccggttataattaaatccgataaggcgataaataagtgaacccgtaaagtctaaaattttcacatatatatgaacaaagaaatagtctatagatctccatgcattcttgtacaaacatatttaattttttattttattttctttatataagagttggtgtatgaaactttacattttgtaaatactaacattacatcataatgtcagaaccaataattctagtggaatgatataatctccactttaaattcttatgtctttatccaaagagatcatgaggaacttgagcaaaggaagagggcaccgtttagtagtataggtgaataacgtggcggacacgaggctggtctcattttcaaataaagagagatagagagaaaatggaaggaaaaaaaagctattggcgatgttgatatttgttcgtcttttagtggagacgaccaagagattttgaaaggtcgtcgaggagttagtttattatcttacaattattatggatttcttctgactaaagttttagtgcaatagttttctgagttattatatatttttcgaaattcatccaaaggctaaaactttgtaaggtattctgagtctattacgctagaaatagacacgcttacgtttttaagtcattttaatctgatatatatatatatatatatatactacaattttataaccaattatctttgtttcagacaatttatataaattcatataaactatcagaaataaagagacaattggctgtaaaattgtattattttgcatctatgaaatttttatttctctttatcaaaattgaagacgagttgaaattctatttcttttttaaaaaaatttatatatgggagtgtcaaaaaataattttcctttgtaagagaatattcgtatttggacgagtcttgatttgtgttttccgttagcgttccacattagttgtaaagagcgagaaagatttaagtgataattaaaaagacaagatatgcattttgaatatactctagatattaatcttaagcatttttcatattggttatattttatggtcgaattttgacatccgaaaaatacatcccttattcttcaatttatattgaatacttaagtttttgatagtaaatatgtataaataaattttaaacaattgtcaaaaagacattataacttatacggttatagttgttaaaaaaaaaacttatacggttataccaatagataaactgacattttagatttgagttttttttttttttactttccatgtagatagcgtggaataatacctcatttatatgtatcgttagttgaaataattgacaaaaggaaactattcgtttgctgttctagataaaagcctttaattgagaaaaagaaaatgcctccagctttgacccgttttgcctataaaaggattctctaagatatggactttcctcatcttctcgggtaaacagaatcaactagttttgtttttcctctttcaaaaatgcatttctcttcgtcttcaacatcgtccacttggacaatcttaatcacattgggatgtcttatgcttcatgcatctttgtccgctgctcaactcacccctaccttctacgataggtcatgtcctaatgtcactaacatcgtacgagaaaccattgtaaatgagttaaggtcggaccctcgtatcgctgcgagcatccttcgtcttcacttccacgactgctttgttaatgtaagatattactttttatatatctatagcgttgcggattactgagggccatcttttaaatattagtaaagcagtgtaaaaagtaggaaacaaaagtgataacaagtgtattttgtcatcagcagattcagcacacgcaattgtcttagttaatactctttttgctcaaagactaaatttcacgtagttagatgttactagttgttaactgcttttctttttctatattgaaaattaatattactcatcgacagtgatgttactggttagttgttaatttcttacacaatgatgatgccaaaacatttatgcaatcggattcacgaaaataaagtatccgtgttacagtctaaggaattgcatggtgccgtaccaaacacgatagaaatttaagatccatcaatcatttttcttttttggttgagggatatatatttaaaaaataattctaaaatcatgattattaatttttataattcaattaaaattttgatgaatttaaatattttaatgtgattatatataagtatttcggtatacaaatattatttcggtatggtttattttctattgagttaaaattggttaaaggagtttctctatcactttgttttcattataatttagatatttacagatataccttcactgattacttgcttcagaggaacaaatggttttagtgaatggcaaaaaagtttttaatacattcatgactaatgatttgttaaataaatttttggactttgaaagggttgtgacgcatccatcttgttagacaacacgacatcatttcgaacagagaaagatgcgtttggaaacgcaaattcggctcggggatttccagtgattgatagaatgaaagctgcggtggagagggcatgcccaagaaccgtttcatgcgcagatatgctcaccattgcagctcaacaatctgtcactttggtatgctccattgtcccatattcatttacaaacactgttttcaatatgaaaagtattcaatattaattgaaaaaagcgcgtggtcccgttaagaaaatttgacaaaattaggtctcatatcactagctttgatatcatattaacccaaaagaataatattcaacttttttctcaagaaatagtggatatataaaaatttactttgtgtatatatatctaatcaatgaatttatattacatgactctctttttctctttacatgttaaaaataatctcaagaaaatattattgtaatataatggttattatactataggcaggaggtccttcttggagggttcctttgggaaggagagacagtttacaagcattcctggaactcgctaatgcaaatcttccagctccattctttacacttccacaacttaaagccagcttcagaaatgttggtctcgatcgtccttctgatctcgttgctctctccggtaattaacaaaagaaaattaaacaccattgatacaatatcaattagcgatagtttattactaatctaattatggtatttgttttgtttaggtggtcacacatttggtaaaaatcaatgtcagtttattcttgacagattatacaatttcagcaacacaggtttacccgaccctacactcaacactacttacctccaaactcttcgtggactatgcccccttaatggcaatcgaagtgccttggtagattttgatctacgtacgcctacggttttcgacaacaaatactacgtgaatctcaaagagcgaaaaggtcttatccagagcgaccaagagttgttctctagccccaatgccactgacacaatccccttggtgagagcatatgctgatggcacacaaacattcttcaatgcatttgtggaggcaatgaataggatgggaaacattacaccaactacaggaactcaaggacaaatcagattgaactgtagagttgtgaactccaactctctgctccatgatgtggtggatatcgttgactttgttagctctatgtgagaattgtttacccaatatgtggctacaagaatacatatatattaatgaataaaactctcaagacgtttacttgagaacatttattttagttctctccttttctagaagtgtatatacgccaccactaggtgtctctcactcaaggagaagcagatttgtattattaagctcattgcgcagtttgtggcggggtatgggaaggtgtttcaacgggatttgaaggcgataattgttaagagccatgagcagtttgactttttgaagccaactaatagcaacttcggtctttttaatgcccttgttacttcgtattcacgagtattaaaacattccaagggttctccctcctttcttgatcgtattttcgaccatcttcgattggagaagctggaggagggaagggatacggttatggttgatttgtttgactttgttggaggagggagtagagactgctgcgatcgattaacatgcttttgtgagtggtgttgaccgtttttctcacattgctgatgaagattattctgctgccatgccaccacctgaacgcctttcggtgatgatcatgaaccgagtagcacaaacacagcctgatatggttttgcagcttccactgggatctcagcttactagtgaatataaagtgtaggtgattcttttaggtctcctactctaaaaagactaacattaagagtccctgcaaaggggattacactcaaggagcttggtgttatgaagctgacagcgcagtcttcggtgcgatatgggtttgatttttggtgtggtttatggaagagagtgtatatgaacccattgtttcagttcttgaatccttccgatagccgttccgatttttacaatgggtttactgctgcgtattccagagtgttaaagccttctaaaaagctgaagaagtttgatgcttgtacggcgaccgtgcttgaggggtttttccaccgtcttcacctgtttaagctggaagagggagtggaaactgctatgattgatttgcatggttttgtgtatggagttgactgttttgctcacatggcagatgacaactattctgctatcatggatccacccgaacggccttcgatgatgattaaccagctaacacaaatccaacgtaatgctccagctcctcatgagaagtgtctaaaacgtagctataattttccttatgcatttggtggcgggatctcactcaaagagcttggtattatgaagttcacagctctgtttgtggcgtgttacgggatgcattttttttgagatttgatgaagaaagttgttatgaaacctcagtttaagttcatggagccaacaaatagcgtgttcggtttatataatgttgttgttgatgcgtattctagagtagtaaagccttctgatgatgcttgtacggagaccgttcttgtggattttttccgctgtcttcgatttgagaagctgtgatttgatttgcatgctttatgcggcttccactggaatatcagcgtatgtatcctccttatctttatagttatggtcagtctgcagacgcttcaatggggatgatgcaaactgcacgaccagaggaaccagaggcaaagagacaaaagtttgacgagtcagctcttaatccagaaggggctgttcgaaggcgtcacagtcgatggcaataagaaaggtttattgacttccattcaaacaagaaattgtcacagagtttcgattgtttgtttgtattagctcttttgcttaacacttgcatgttataagaatgcgttttcattcataaagaaacaacagttatttgtgttatagttagaattcctttgtaagttatacgaaaaaaacattaactcaaacagaagataacccacaaacttgaaaccaataatgggttggaacttcaatgcccaatttgtgcagagtaacccacaaacttgaaaccaatatttaacacgaaattacagcgttcaaaaatcaattgaaaaattgcttgaagtcactgatcttactcttttgcttagatctccaagaacttgttcatatttgttccagaaacatatgcattgcttgtttggattttggttcatggaactgttctctgcagcttcacagaagattactacagcgtcaacattccctctgacttgttcattttggttttggttgtgtcgactggttcgttttcgggaataatagttttcttatttgtccctctgcgttttcttctgatgttgcctgcaagagttttgattggcatgatatgttaataccatcaattattatgtcagcacggtttcttaaaatatcatagatcaggaacaagatcttaaaacatgaaaggaagaacggatgtacccttgtcgagaatgcaaatcgcaatgactcaatctttgctcctgcgcaaagcctgaggtcaaaacctagggaatctatcccaatcagcttcacttcctgcaaacaaaaaggaatgacgtcgatcatctattcgtacacagccaaaacctacagagatatcctgttatattccagagcttctagagttaagttgaagctatttacctctgcttgaatactgttatgtctccaacacagagatttgagtgcttcagttattttatcaccagattcttctaaacggcttatgatttcagctgatgcatgagcaatagcatcaggttgtgcttttctgacatcttccacctcaacttcagtctgttcccaaaagtttaaaagatactagtaagcataagattgcaacaaaaagaagagtttacataagaagtgaagcttgaaaacgagaatcatgagatttgccaatcaagaaacaaagcaagagcaagcgtaacacagttttccagatatgcgacaatggttagatagacgagagttttgcaagaacatgaataaatttacacagaaaagatggaggctatgttccaaacctgatccccttgtgctgtgataagctgaattcttatcatctccagcttgtaaaacgccaccacatttcttgctttttcatcctgtgatgaatctatctcagattcgtcaccacctgccttactattgtcttcaagcttgtccactaagttttctgcatccttgtttccgttagttgtagaattgctatcagcaagtttcttttggatatctgaataatcttccactaagatatgactcaaaagtccctggatagcaaggccagcagacggctgatccatccaatcaacaggatcatttgaagcaacctaaatttgacaacaaacaaatgtgttaaaagttaacctcagtcattctcttttagcctcaggtttgaaaatgatcttgcatatcgtttttataaagaaccaaaacactttctttttaatgaattctaaaagtcaacctcagtcattctctttgcaaaaaacatgggatgacaactcctcattgtttccaaatttgcccagtctcccagcgattcatcagaatcagaatcatcatcatcctcatcatcatcatcatcatcatcatcgtcttcatcttcatcctctaaaatagcaacccattcctgaagtcaagaataaatagtgaaatatgctaagacatggcaacagtattcctgtcatagaattccttagtgacttaatataaaagaagaaataaaatttgttaaacctcctcatcttcgtcttctcctgtatcctcactgtcatcatctccactttcatcatcttcagtttcaaagtcactatcagaaagtcccatcagctccatttccttgatcatctccatcgtatcaaaaccaactataacttgctgcaatgcatccataacatcttaaaggttagtacagaataagatagaggataaaaactacacagatcagtatagtcagttataatcaagagaaacatattgaagctagaaggctcatattgatgtatggatgtgcgtttcaatttaaaataaaccgtcagaagatacatgctttagcaactgcaacagaaaaaataacagatctctcatagacaaagcttggatttgaagcacttggaacatataataatgtaaataggatatcaatgtcttgtgcaacataccacataattattttcagaagtaacggactgcatgacgtcctcatcctcctttacttgaaagtataaatctgcaaggcattagggtgattcgctttaatcgtgacgatgttaggtagattaaacaatgacatggaactaaggataattaaattttatcttacttccattttgatctgttatataaggtatatctggccagagaatattctcatgaactccatcaccaatagaacctgtaagcatcagggttcctttattgttcacctgaacaagacacactacgggaaatgttagatgcacaaaaacggatcatggacaaaaataatgacaggaaaactgaaaatggaggaacatgtattcataaaggcaatatatgtaatgcagacttacatagactttgagaagataaaaaaaaaaaaaaaaactattctctacagaagaggattagaggactactgaaaattgatagatgaatgttgaagcaacctataataggaccaagcaaaactactaaatgcactaacatgtgactgcaacaacaagcatgtaacataaggcattggtctaacaatattttcaccaaaaagatagcttatgctgattgaaagacgcaatataacacctcaatgatggttctagtagtttctgcaggtgaaagcctggaatctccatcattctgtggcaaagaggctctgatttcttctgaaggatgataccttgacttgccagtttgcttttctggatctgaagctgaatctacatactcagctgtggcttgagttcgattcttccgtaggtgttttcttgttatatagtcactgttgtacttcagaaacccactcctagaaaagtgcatatatgaatgtgagatttacattatataaagaaaaccaaaatattcagaatctgtaatttcaaaagaatcgatctttgaatgtttccacggctcactaaagaagcatctaacttagtgctctatctccatataatcatataatcgaggaacatccgcttcacactaaattcaatattcacagctgacaagaaacatattgcactcgtattatacactcagcactcaaatactagaatctatcctcctggtgaaacgaaaactctcaaaactattttacaatttaatgacggaacaaagtgaatttttcattacccatcaatatggtggatacgttgaggctgaaaaacgcggcgggacgcataatggaagcagtttcctccctcctccgagctcggtgctgtacgatactctacaaatttagcatgagacgattcagacgaatgaacaaagactctttaagaaaaacaaaaactcaatgaagatagaattgaagaacagagacataaatagagcttacggagtaacgccgtcgacgagcaaaatccggtggagagacgaacggccataaccgactcaatcatcggtaaaactactgttatctctaacctctcgctctctctatctctgagctcagaagctggacaaagatttgcagattaggctatcatctatttggtgaattttccttaccggtgatgacgtgtcatattctcattcgtcgaaacccaactagatattgtctaaaaagtgtaactttcactttcaccaaaacgctgcgtttttgtaaagttaacatttattaatttttggttcaccaatagtcaccacaagagcaaacaccgaaccggaacacatgaaatctattagtgtctctgatgattatctctcgagaagttatctgtgagataagcttagctgcaacatgacagtctccacatatcctaagattcttcgttattcttatggtattattactgtcttcttcttcctccttagtgttcatcagagcaaacacaatggctaatttctcactgtgaacagctaaatgcgtctctttatcttcctcttccacatcgtgaagcgctgactctgaatcaggaacataacctaactctttcattttctttactagaacatccagctctctgtatatctcatcggattgcgggtgtgacctgtcgcctactaagaatgtatgaattattctgttgacctcaacattgcttgctccgggattcttctttaaccctttgctcttcattatgtttctgatgttagtcacttcttcccatcttccagcctttgcgtatatgttagaaagcaatacgtagtaacccgattgctcgggtgctaactggaaaagtttatcagctgctagtagaccgatgtctgtatcagaatgcaccctgcaagctcctaataatgctccccaaactctctcgtttggttccattgacatatcttgtataaatctgtaagcttctttcactttcccggctcggccaagaagatccaccatacaagccaaatgctctaacctaggagtgatcttgtaatgatctgtcatgagtttgaaacaactcctaccttcttctagtaaccccgcatggctacaagcagcaagcgttgtgacaaacgcaattgaatcagggacgagacccgaatcttgcaatttcgaaaacaatgccactgcgtcacagcctcgtccgctgaatccataagctgaaatcatagctgtccaagacacaacatcacgtgacttcatgttctcaaacacatctctagctttctctaaacatccgcattttgcatacatgtcgatcagtgcattctctaacaacagatttggtatcagcttcttcctctcaatgtatccatggattttcttaccaagagacagagcagaggtatctccacaagcaggtaatacacttgtgattgagactgcatcaggttcaaacccatcagcctccattcgggaatacaattccacagcttcaacaggcatcgcatttttcatatacacaccgatcatcacattccatgaaaccaaactctttttccccattttaaaaaacatatctttaacatacataacgttttcagttgtagtgttactcactgctggtaacagactagccatcgtaccagcatcatggcttatcttcacagactccatttccctacaaacctccaaagcatcatcaaatctctgattttgcgcatacccaacaaccaacgagttccaagacaccacatctctcctagacatctcgtcaagtacaagccttgcttcagataaaaatccacactttccatacatagaaactaaaccattcccaacaaacaaagtcgaagagagcccaacttttgtagcagacccatgaattttcctcccaatgacaatagtcccagagcaagaacacgcctttagaacacacgggaaagtataatgatcaggtctaacattacaaccacacatcgtcccaaacactttaacaccttcaccgtaaaacccattattcacatagcttctaatcataacattaatgataattacgtttctctcaggaatttcgtcgaacaccttgcgtgctgacgctacatcttttagagaagcataagctctcataagtttaacacccaaagaagaattacaacgtagatcttccaaaatgattcttgagtggactgttctaagtgttctgatatctgggtaagtgtcaagtacctgaccaagtaagaaaactgtctcctgtggtgatttctgatcgagttccaatttgggtagggacgaagatacttttcgtgattgaaattttctgaatttcggaaaatggagaagatggagatcgacattgatgcgtttcatgagctttgaaatcgaacctcatcactaacatcaacggttatatatatagcgcgactagcgagcgcaaatagcaacggtaacaatatgtgtaggtaagccggttatagagattcaaccatcatatatagttgaaccggatcagaccggtcttacatgaccaattgggtttatatatctgattttttaacaacataaatctaataatatatgagtcattaaaacttggtttagataagtcatctttgagctttgtaaatcagtcacaaggttaatagtaaaagttgcagtgacagtgaggtttatgtaaaactcctcctctggggaaaaattaaatttaccaagtacatatttaagaattttcagaattgttttattttgaaatataaatcgaggacttttattgatagattgaagtattttttgctttttgctttttgccccaaaaaagaaagatagaagtattgtctatctttttttgtacttcttattgaaaagttgatatcaaaattaagtaacaccatatgaaaatgagaaagtgacaatcatgtctatcagaacaaagaacattcttttgcactacatagtaaagtaaaataaataaagagagagagagagagagagagaccaagtctccttgccttcttttcatccatcagttactagtctcgatcgatcattgttccacatatatgatcgacattttctcataaaaattgacctttagaaagaaatttagacaaaccagaagtcacccgttccgccacgattacaaaagatgttcaaagttctcaataccgtggggtactacctatgtgagtttcccaattttctccttcatggttttgttattctgtcgtgtcggattttaacgacttctgttcattcgtaactgtgttttttcccgaacatacatctaaaactctcagattaaaataaattacataactcaagatcatgtcatttttcaggttgtaactgtttgagatctgtcaaagtagattcaaaaaggatggatatatgttgcaaagatataattagtgatcattcaaaaaaagatataattagtgatctaccagaagctcttatttgccacatcttgtcattccttcccatagaagattcggctttgacttcagtactttcgaaaaagtggcagcatctatttgctttcagaccaaatcttgagtttgatgacgctgtagtatatcttaatcctgacggagaaagaaatgagacaatatttgagaatttcgttgatagagtattgagtttgcagggtgattatcctatcaacaagttctctctaacatgccgagattttactgatccaacttgtgtatctcgttggatatcaaatgtgatggaacgcggggtatcggatcttgatctacgttgtattgtgtattgggataatggtaccatgcctccagatatctttgtgagcaaggcactggttcatctgagaatagaaactggaaacggtgccttcattgatgtggaagatgtttttcttccaaacctcaagactctatatcttaataaagtcttgttacgacacagtgataacggctttgtgaagcttattactagttgtcatgttcttgaggatttatttattatgaatatatgttgggatggttatttgaagcgctctctatcttctaaaaccctcaagaggctaacgttcttttgtgaagacgtccatgccgtaaatccggagagtgtttcgtttgatacacccaatcttgtctactttgtataccatgattgcgttgcagacaagtataaaaatatgaattttgattcacttgtttacgctagtatctgtcttcaaatgacatctcatcagcgtacacatgcaagctatgaacatttggtcggtaatgcaacagattttcttttgggaataagcaatgttcagatccttgaattatttgccaataccattgaggtttgtattgtaatcccttcttcttcttttttggctacattgaaacaaaaagaagacaaacaagttagtgttacatgccttgcaggtacttactttctgttgtgaacaaataccggtattcaaaaacctggtttgtttaattattaagactgaccaaaaagcaggatgggagtcattgccggttctactcaaaaactgtccagatctagaaagccttatcttcgatgtactaactcataacctttcatatattgcatttgcttacacaaatttgtaaacaaaaattgagtttgaagttggttactctacgattcaggggctccatcacaacgatacaattaaatgtgaggatgttgacgggtgtctatgcaaatcttcacgtggcattcctagttgcctatcatcaagtccggtgcagtttctaacgatatggaaatttggtgaaatttgtgatgactatgatgacatggagaagcagatagagctcgtcatgtatttcctggagacaatgccgaatcttgaagaaatgaaattgttctacgatacacaaatttatgaagatgtgataagcaaacttcagatgttagtaacctcgtcgaaatgcacagtctatataatccccgaggtctaacttctacgtgtctacgaatcatctattcggtatctactaaacggggtttgttctgtaatatgtgtattactctttcgccttctcaatacgcattttcacttttgtgttgaatattatatactttatgttttctcaaaacttcaaaatttaagcttatgtcaaaccaattgttctgatattgcaaaacaaccccaaatcgttacatttaaatttatctttggtcctctcgcaattttgtcgtcttcttaagtgcgagcgaaatcgtttctgcattttgtaggaggagtcatgaaattgtacattttgtcttacccaccgagaaagcatgagcacgaatcgaggcttagcgatttcgtttgctcactaaaaaccctaactttcactttttcccactctgctctctgttcttccgtcgccgtgtagaaatttcgatcaggttcgtctctttgtttcattctacagcttgtttgatcatgatgatgatactttgagattctatgtgtgcccattggctctaaagttctcgttttttagtctctcctctttgtgctctgcgtttttgtgctcactggctctaaagttctcatttttaagtctctgctttttgtgttctgcgttttgcaatgtggagaagaagaagtgttgctttattatagcgttttcttttctctaagcttttaagatactaaatatgagattttttatttttttggcttgttctaataccaatctcactaatcttttactgtttacagggacttgagacgcactttgtctctcagatccttattcaatgctcgctgctaccaaccatcttgtagcggtatcattcaacgtgatgatgtccatgaagagaagccacattacggctcttttcttcatcagagatccttcagcagttcgatgattctctctcagcagcatatgatgagaagcccttcacatttcccactatgctctccttttggtgtctctacctatcggcctatgtcgacttcacatatttcaggctcagatgagagtggcgatgtgaatcatgttgctgaaactcttactgatttagtgcagcaagatacagtcatcgaagttgccgatgctgctatcgattcctccatccaattagattttgttcagcagatagttcataatgtgcattcactcacaggcttaaactggtaagaaatcttcttcttttttttgtgttggtcaacttttaaatcatgtcatccttggagttattgttggatcacttttttgtgtttttttacacccaaaaatgaccatgtcttatatcaatcatctctgtatgttctgtgattgcaggtgggcttccattgtttttaccacctttctaattcgaggagtgacaatccctctcatgattgaatgcgaaagatggttttcaaagaggatggtaataaaacaatgttctttcgtaaacacatgagttttgtgtctcaaccaaccaaaacaccgttcttgtttgtgattggcattactttctatttatactgttcactgtttgaaacaccatcatcaatcggaatcataatgggagaactagaatcaacaagcttaatccttccatgttatgatctctattcattcatcatatcctaaatacattgtacatttcccctaaaatctctttcttataaaacaacaatacgaatataaatggccaagcaaactacaagcagatcaatggagattttcagagtccgatttcttgtagataagcttggtatgaagaatagtatccaacattgaaacagcttcaacgatattcttgcctttgtttaacatcacacagctcgccctgcatattttcaaaatgcaaaattagacaaagaaactgcaaatcttacaaagatcatgtctaatgcaaaatattttacctttttgcatttgcagcatcagtaatctcagctctagttggaactccggatttcacaagtgattcaagaacctgagttgccataatcaccggtacacgagcagctttacaaatagctataatctcctcctgcatattagccaatctctcccatccacattccactgcaagatcacctctagctatcataattcctaaaggattcgaacacttcattgcttctaaaagaatcaaagacaaattcttgaatccacttttcgtttcaatctttaaaacaataccaagatcatctagttttcttttcttcaactcttgtcgaagaacggttatatcatggacatcacgtatgaaagaaataccaaccatatcagcatgtgaagctacataatcaagatctttaatatcttttgatgttaagcctttgaaatggatatcgctctgcggtatgttaatggacttctctgatcctagttttgtaccttttggacgtgcatgagttatggagacaattacctctgaaggacttgttccttttatgactccccatatttttccatcatcaaaaccaatggtttcaccaggcttgactgaatcaaacaaataaccggaaggacaagttaacctatgagctcctggaacagttacagatggttcatcgagcgatccttctcgggttatgactagtaaatctccaacttttagccttacaaaagattctttgggaggaacatctactactcgtccaactaaacgtctccctttctttcccttaacacttaactcagttccactttctatgtaagcagtgtcgaaacattcagccacaaacccggtactgttgaaaacatgaaactcttttgagattttaagtctcctctttctccctctagcgtcacatagtcttatagaatcaccaatttggagaccagcaagaaaatcttggccttggaccgatatagtagcatcaggggaaacatgagcaggaggttctgttcctgtgaggcagagccataccaaagcaggagaaacaacatttccataagcatctttctttggtgaaattttcatcacacacggaccaggttttaaggtaccagttctgagttttggtcctgctaaatccatatgaacgcgacatggcatctctaacatctgagaagttcttcttactcttttgatgatctcaccccaaatacttggatctccatgtgcacagtttatacggataacagatgttccagctttaagaatatcagttataaatgtttcactcaaagttgcttcttcaccaatagttaccatgatatgagtacttcttccctcacgaagtttaccaagtaatgactctttgtatgataataccctccctttatcattcttcttagtactttttcccttgggatatacattagtccaagactccgtcacagcgttttgatcgttcatcaaaagattaatagaggcgttaaggtgggcgagaacatccagattgttgttgtctaaacttgacagaccaagagaagctagatgactgttgagctgctcaatgtccagagatctcaaagccatataatgaactaagtttgttgcacattccagatacttactgcaacagacggtactaggaaattaggcgaaaaataagtaatgcaaactatatataaaatggttaacaaacctgtcacataagtgtagttgagaagcattccatttctctgctgctaagagatgtgaccgaagagcattcagtttttcgataacactagccacattattggccccattgcttccagagaggtctgcttctgacttgagatgagacatagcatctttagaatctggaaagtcaaaactccaggtacattctgtggaggtattatcaccaaaggtggcttccaatctgctgaaactttcagcttcgcctttcccgcgagctaaggcaaaagctaaggttctctgaataggaagtttcatgtgattaagtgataatgcataacttgtcttcttatgttggttgtttatgtgagacctgctggagaagcaaaggatcttgtctctcaacaagtggcttgaatcaagtcctaccatatcgactaattgaatcacctgagaatcaaaacgaaaaaggagaaactgttatagattgacacagaggttaaaacctaggcataaccacaaagacaagaaacgaaacatgtataacgcaaagaaagaaaacaaaaaaacaaacaaattccaagttcgtgaaaaggacaaaaacaagcctaccacaaatcaaaatccaggaaacaaatcatatctaagcaaataagttttctaggctactggaattgagaaaatatctggaaggaatcaaaatcaaccgaaactcattccctagaggacaagaacatgagaaatacctttgttatggagaagcgctttgttcagataatgtcttcgctctcgtcttgaggagaagaagaagaagaagaagaagaagaagaagagaagacagatttttcaacgaagaagaagaagaagaagcagaagaaagaatgatgaagaattttcttaatgaaataaaaaaagttgtggttaaggataaaaagggagtgtggcgagcgcgtgtcagattcatcttctcggggaatctagtaacacggacggatgaggctgaaaggtccccattataaaacgacgtcgctttgtttttctaaacctattcagacaagagacccaaagatagaaaaaaaaagaccggtccatgcggtttaaccaaaccaattccgtgaaaactgattaatttggtttatctattccaacaatggaaattgtttggtaaattttaaaagagtttgggaaagtagctcctattgtaaaagagttttataattagacaaagtcgtttatgaatatatgaaacacttaactgactatttcaaatttcaaatatatgtataacttttaaccatgtaagaacaaaaaaataagaatggctaagtttgcttaattagattttgtaaaatttgacacattatttctaaattacattttattgaaactatgattcatttattggatgttttttagaaagtttgtgaaaattattagcggatttgtaaactgaagaatgaacataaaccattcaatcttttagttacgggaataatgaaacctataaatcggtacaaagttacaaacacatttctaagcataacatttgttcaacacaacactctcaataggaatcttatccgtgggaaaatcacagtctgagtccattgtagttctcttatccggtaacaaactgcacggctccggtgtaaccctactagtaactccggagacatccgtgcagttccactgcagcttcttcgggtccggcgacaaagctatagtcacactcgacatgcataaacccgtaaatggaccattcttgatcctttctagctttgccgaaattgtaacgttttctgcggtcatgtcacggtaatggatattgctaatctccggcaacgccttgggatcaaacccgcctacgggatgcagcttatacgaaccggtcatccagaaaacgtatttcatcgtcttcatcgtaaatctcctagcgaaaatgtctttgatgtaaccgccacgtcctatagcggttttgattcggatagcggattgtgtgttgattagtgtcacctcttcagttttcggagaagatgatttcgatcaacaaaggtcttgatatcgacttgaaaccgccacttcgatacttcaaccaccatgacttcccttgtccattagtcgttcttttgttacctaacaacaaatttgatcttataaactaaatatataattttgattcaatctcatatatatatatccatcaaaccattttaatgatttaagttttgttgtgcttaccggtgataacaacatcggttaggttacttccgtatactaaaccagtaaaccttgcatctccgtatgacggcaaaggtggaatcataggatattcagactcatcctgtttgttacaaacgaaataaaaccaaatgtgattatttatctcaaatagaatggttgatattttttagtgcattcataaataggtgtacgatactagctaaaattttgagcttagatatatttattacctgagaagcaagaatagttgcaccttgctggataaacaaagtaaaatggcttgtgaggttgaaacttccggtgagccaactccccggcggtacaatgagttggactccaccgtcagccgccaacggagtaagcttacttattgcttctcgaaacgctttggtgtttgagggttttccatctccaatagctccaaaattcgtcaaaaccgcactgtgtttccggcaattcaaagccaaatattcaatactcttattgcttgttgatcccaaattgctttggatacgggattccatcatcggaaaaccggatattgctaataccactagtatcttaaaacttgtctgaatcatcttcaactgtaataacttaaataaattagaatgcttctctttatttatttttaaaaagaacgatcacattgaacccaaaatcctcaagatttaaaataacattgaatagaaaagcctcatttgtgtatctaaatctcaaagtcaccattcaccaataatcattacaagaacatttcccatctttaaaatgatgaaaacgattcaaatccctcaacacaatctctctaccagagactgtcgatatatatttcatcgcgttatggcaatctccgcagacccgtaagttcttgaacaccctaaccggtctagatttcgacgtgcttataagcccaaacgcaaccgcaattttctcgctgtgctgatatagtaacctctccttctccgcctcatcattctcctcctctagcttgtgaagaacaagatccgtatcaggaacatatccgcagcgttttatttctgtaattaaccgatccaattcatcatatatttggtgagcattcgggtgagctgtatcacctacgtagaacttatgaattttatctcccacttctatccaactgcaacctccttctttaaccaagtttctctctttcatcttcctcctcatctccgtagattcttcccatttccctacatagaaatattcaacaaagtgtcactttcacacaaggtagatcagtagaagaaagagttttatctgattgtgtttgaattatatagatacctgcacaagcgtatatgtttgagagctgtatataagctgcaggctcattcggatcaagttctaagatcttcctcgcagccaactttccgagttctgtgttactgtgaactctgcaagctccaagaaacgtacgccatactaaaacatcggcttggaagggcattgtgttaatgaactcaaatgcgtctgtgagaagcccggctcgacatagaagatcaaccatacaagcatagtgttccatcttaggtttgatcttgtggtcttcatacattgaattgaaatgtctccatccttcggagaccaaaccaacatggctgcatgccgataagattgcaacataagtgacctcatttggcttcaccccttcttctatcatttggttgaatgtttcgagtacccttatagcgaatccgtgtttagcgaaacctgtgatcattgaagtccacgagatgacattacgattttccataaaattgaagactcgggaagctgtgtcaatgcttccacatttggaatacatagagatcaaagcattgcagacgggttgattgcacgagagcccgagtttaaccacctgagaatggatttgctcgccttttcttattgaaccaacatttgcaactccactcaacaagctagcaaatgtgaaagcgctaacacctaattctctctcagtgatctcacttaaaagcttaaatgcttgctcaaaattcaagttcctgcatgttccgtcaagaaatgtattatacgaaaccaagttcttctcagaaagtgactcaaaagctctctgagcatcttccatcctgtcagatttaacaaacatgctgataaccgagtttgcaacactgctattcgaagcaagccctcttttgaaagcttgaccaagaacctgtttacctacccgtggatccgaaagatttccacacgccttgaatgcactcgagaaagtgaaatgatttggctcaacatgaccttgcgttatcatttcactaaagagattaatagcctctgtagcgagattacagtttttcatataaccagtgatcaatgccgtccacgacataacactatgatcctccattctatcaaacaccttcctgcaatcatctaccgaaccatccgcagaacatttcgcatacatatcaactaaactacattcaacatcatccacaagccctgatctaatagcccaagaatgcaactgctttcccaaagacaagttctccaactcagcacaagccgaaaacacagagcttagtgtgaacttatctgattcaaatccacttaaaaccatatccaagaaaaacctaatcgcttccctaggaaaccccatctgcatacaccgagtaatcatcaaagtccaagtaacaacatttagttcagacattttatcaaacaccttatacgcattctcaaagctattctctcctttcacaaacatgtcaatcaaagaacaacccacacacacatcagattcaaaatgcccagtcttcatcaaaaaccctaaagtcactctcccaactccaacaaaatccgaattcgaacaagctcgtatcaccgccgtgtaacaataatcattaggcaccaaacctaactccagaaactcaacaaaaaccttaattgcatctaattctcttccgttgttaccgtaacaagccatcatcgcactccacgaaacaacatctcgcttaccaaatcttctcatagtctcaaacacatcttcagctttcgccgaatctccagatttcgaatacaagctaatcaacgaattgtagagaaccgaatcaggctcgatatcaaactcgattaatcgagcgtgtacgagtttcccgagacgaaaatcgcgtgctcggatacaagatttgagaagtgaagagaaagtgactgagtccataggacgaatcccatcacgagccatgagatcaagagctgaaaccgctccacgaagatctccggcattgagatgacggagaatcaaacggtcggcgacgttgatccgatttgaaacggacggttgagatttaatcggaagtttggcgggagatggaaacgaaaagcttatcatcgccattgttctccaatctaaacgatccgttactgttaattatcaatatcacacaaaatttacattatagtcccttaagtttgtggaaattatcaataagacacaaaactattaatttatcaaattacatacatagttcataaaccctaatttatagatatcacaaaacccagacttggaatcagtttctctttacttccctctttctctgagctatggagattactgtaatcgcttcttcctcaatcgatgaaggaattggaagttgggatctcaaaaccgggacagagcagcttcaattcaagccgtgtgcttctccggcgcatggtctcaccgccgtcggcgaaaaatttctcgcctcctctcagctctcggcgagaaatacttctggctcgattttttactggtcttggactaaggtctcattctcaaacttgaaatcactgtttttttgttctctttggatagaaagtttgaaacttgttttgaattgtagcctcaagctgaagtgaagagctacccagtggaaccaataaaggctcttgcagcaaacaatgaaggaacttacttagttggtggtggaatctctggagatatttacctttgggaggttgcgactgggaagttgcttaagaagtggcatggtcattatcgttcagtaacatgtttggtgttctctggagatgattctttgttggtttctggatctcaagatgggtctattagagtttggtctcttataaggttaaaactttgtgtattatcatgcttgtttttttgcaaggcattgtcttttattctgattctttgctctttgtggttagttaggctatttgatgatttccagaggcagcaagggaacactctttatgaacacaattttaatgagcatacaatgtctgtaactgatattgttatagactatggaggctgcaatgctgtgataatttcctcttcagaagatcggacttgcaaggtacttatttggatcactaatgttatgcatttgttaactgcaatgaaagtttagctcttgtattgttaatgagattcattttgatatagctgagaaatagaacctgatatagcttttttatttgatgaccttggttggatttgtaaatccatataggtttggagcttgtcaagagggaaattgttgaaaaatatcatttttccttcagtcatcaatgcactcgcattggaccctggagggtgtgtgttctatgctggtgccagagacagcaaaatctatatcggtgccattaatgccacaagtgaatacgggacacaagttcttggttcagtatctgaaaaagggtactaaccgttccctatatttcaatcgttgtcaacaatcctagtcaatattcttcttacttttaacatcttctaaatcataatacatgtatttgaactggagcttgtagtaattcttgactaagatggtatttatgagatcttttatatatttgaacattagctagtagtaatctatttgactgctgtggctgtttgactgtctaagttaatctctattgatcaataatttttgtctgaacagcaaagctattacttgcttagcatattgtgcagacggaaaccttttgatatctggatcagaagatggtgtggtttgtgtttgggatcccaaatcacttcgccatgttcgtactctcatccatgcaaaaggtatatttgctagcactttcttctgtttgagttttacttctacaaaatgaataagtcaatttaacaaccctttcttgcttttcaaacttttttcttacaggttctagaaaaggtcctgtgaacaatattcaaattgttagaaaaacgattgttgctaattccaacaaaacccaagtttcctggaaaagtcgtggggctttaatcccaccgcctttggaaaaatatgaaagaccagtagaagatactatggatggtatcgttacggttgatccgccgccattttctgatgttcctgtttactcttctttcctcagtgctgaccttattgacgagcaagttaaagaacttcaggtttgtgtttcctcactgtctacagtaaacagttttggtaaaaatgactcaaaacataatattttctcggtttgtttgttgtttcagcaacaaggctctgcagcaacagagatggaaatggaaagactgaaacttgaatacaaaagatctttacagatgaatgaacaatggcagaagaactatgagaatttgcttcaagtggttatggaagaagaacaaatcggtggtaccaattgaaagctttttattgttgtttctacacatttttggaattacattaagagatattgtcaagtggcatatgaagtcgtcactaaagatatgttttatcaagatcccaaatttaggtatcatagcattctgtaaagtagcccagcgatttggtaaagtagccaagccactctattgtggagaatcctgagataatcccacaaacggagagactctctttttgtgacagcggctttaatgcttcggagagattcttcccagtcgtcacaaagccgatgaggatcacttatcaccgttggatctacgattagtgtaattgtcatcttattcatataactttgacaatgtatcgtcaacgcctaatcaaattgaacaacaaaaaaaagatttacatttcattagatagacataacaaaaggaaaaaatagaacaatgaagtttgtggaatcatcattttatcaacttttatgaacaatgataaaaataagcaacttacatggggatggccataagcacttgaggcaaagtaagtgatgggatgtccatagaagctaacttcttcaacgggaccaaccatgttcgaaaacgtcatcgttgtgtttgacaccattctgtttattatactagccgccacctgcaaattaattacaaattagtcaataatcatcataaccaaagtagtgtcaactatatcaactaaaactatttgatcgtgttgcttttaattttaatgaaaatgacaatatgtaatgtacctcttcttatatgtaataaattattattttttctgaaatcaagctttctcgtctatactaaacatatataagatgggttagttcttatttaaaatgaccttgattccaagcaatttgacaatgattctacagaatatgtatgttagcattgcgccgtatgaattcttctttcgactgatggtcttctgagctatttcaagatgttccaatgggtcatcgcgtaatgcgatagaaaacggaaatactacatagccgaaccaatttccccacctacatttagaccctttctccatcatatctgctagatcctgttttaaaacaaaaataaatttaaatttcactgatgattaagtacacttaacttgtaatcaaataagtcattaactttatgtgaatttacctggattccagttgttggtcgtaagtttacaagcagagctgatcttagccttattctcttaggcagctttttttgcttcctatttttagtttcttcttctcctattagtttatcatgaaattattgaattgtacacgttaataatgggcaatatttattaacatatatacatgaaaatagataggatcgagtataattttaattaccgtatcttctcgcaaggtatcgcgagagaccagcttgggttactccaagtacaacatcgttgatagtctatcgaaccaaaatatataagatactcataatcttctgtttttaatatgtactgtatatataaatatgtaaacgaagagagtctaaggagaaatctaaccatgttcattgcgttcttggttagcttgatatcgtcaaggctcacagtacgatgaaccaaacgcagctgtttactcttcgttgacaggaaatcacctttgatgggtgtctcggtgtccttaacgaacaatgtcgtaacaataaactccaaagcatcacaaaccgtgtttaaacccaagataaccgccgtccaaataaccttaaccaaccacaacaaccgggaatcacttcttgaaccggttgtcaacagggatgaccttgatgacgaccggtactggtacggaagactaggaagctcatcgggatttgatgttttacgcatacaagcgaggacaagagacatgattgacatgccatcaccaaccgagtgatggatctttaaaacggcgacgttttcagcgtctgaggttttcaagtcgagtaggtgaagctcccataacggcctcgaggtgtccaacgggatcttcatgaggtcagaaacgtaatcttcgagaaatgcgtttgagttctctatgttttggggtttgattttgggtacgatgaagtgatcctcgacgaccacgtttgtccgaacccatctttggttttgtccattctcatcggtcaccttcaagtaattatatatttttggtaaatgttaattgttaggaatcttacaatcattttatctagtatataaaataattcagtcattgtcacttatggattgaacatttagagtaagatttatttaaacacaatgtaaatttgaaattttgaaggtagtcgacttaccaatttacttgagaaacgaggatgcctgataaaactttccttaaagcctctgataaacacacatggatcgagcttactcttaaaaccaatcactgatatgatgttgcagttaaactctggcgcgtgaaacagacgcgccgccgggctaagtggttgctcctcttccttctcgtcccctgatatgtgtggtcgtgtctcaatctccattattttttgttcaatgtttctatctctcaaactataaagcctatctttttatagcccccatgcttatgcggtaccatttcttacgtgtataacatggaaaatttaaatttactcttttgtttacttcttagttacgttgaaattgaagtaatcaacaaatgcgttgctcatacaaaaagttagacaaagatagaaaaatgcatatcattacaatggcgaacaacttaactgcactaggcggatatatatgaatatcattggagaaagtatttaaatttttttgcattccacatttagtaaacaatattcttttaaccaatcatatcagtgaaccaaaaaaaaacgtttccattagtagtttatcggtgacatgatgcgttaatgcatttagtttttcattcacgtcatgtactgacgtacataagtatttgtacgttgatcgaaaagtcaaatatgaaaacatgtgacatgtgtatttgatcgaaaagaaacatgtggtgaatttttacacaagaaacaacagctatttttttgttgttctcatcaattcttcatattttagtgttgttttgttctgatcaaatcttcacattcaagtattgcaacgctacgcgcttctcatgcatgcatagactgataggcatacatatggtttctaattttaaataaataaaaacgcatatgaattgagatttttttttcaacagtaattttaggacgtacagatactaaatagtttaagacggcaatactaagcgtcataactaaattgtgatctaattgtcgtaattaaaagcaatcttgtgaccaatggaattttcatcttggtgcatatcaagccgcagtgacaaagttataagtatttaacaagatatattcgtggtcgtggactgatgaaaacacattcatttcgtatttagtcaaagatgagaatacaaatggaagatgaaattgtgaaatcctagaaatatggtatcaaatttgtctgttttcaagttttcatttatttttttttgataattttttttctctaaatcaagaaaaagaaaggaaaaaaaaaagctaaatctactgagtagaagttctttcttgaacaacaactttgatgcttcttagagattcctcccaatcatcacatagtttatgaggatcactaatgaccgttggatcgacggttaaggaaatcgtcaacttgttcatataactttgaaaatgcatcgtcaacgcctgatatagatggaacaatcaaatccaaaacttagtgacttaaacgaaaaataaaagagaaaaataagataaattaaaatcttacatggggatgaccataaacacttggggctatgtaagtaacggtatgtccatagaagctaatttcttcaacaggaccaaccaaatttgaaaacgacatcgttgtgtttgacaatgctctgtttagtacatttgctgccctctgcattcattcaaatttggtttatcgagtttttgttagctgattgaaacttttgtattggtatgacttttgttaatttttgaactatatttaaaggagtagttatgtataaagattaacctgaactccaagcgtgttgagaagtattttcccaaccacgaatgtaagaacagcttctaacgagttcttcttcctgtcgatggtcgacttggctcttcggagatgtttcaacggatcatcgcataatgcgatagagaacggaaagataatgtagccgatccaatttccccatctacactttgatcctttagtcatcatatcagctagatcctgtttttgaccaaaaacaaaacaaataattaaaaaatttgtgatcgattatatccatatatctactattcttctatatgataattaatttacctggattccagtagtcggtcttaggtttacaagcagagctgcccttagccttattcctttaggtatgttacttgaattcctcttagactcttcttgttctcctaatatatttcataacatatttaaaattcatgttagagtaaagtttaatgctccttaacagaaaaatcataaatatttaccgtatcttctcttcaaatactgcgagagaccagcctgtgatactccaagtacaacatcgttgacagtctactaacacgaaaatcaatgaaagcaagattaatgaaatatcatatacgtcacatctctcaaatgttgtaaaaaattcgacatgtcaatataaaattgattactaacttaaaatgtgtggagaattattttaccattttcatggcgttcttgattagctttatgtcatcaagacttacggtacgatgaaccatacacatccgtttacccttgcttaacttgaaatcgcctttgattggtgtttcagtatccttaaggaacaatgccgtagcaataaactccaaagcatcacaaaccgtattcaaaaccaacaaagctgccgaccatagaaccataactagccaaaagaaccgggaataacatcttgaactggtttttaacgaggatgatccagaagacggccggttctggtatggtagactcgggagctcattggggtttgatgttttacgggtgcacgcgaggactagagacatcatagacataccgtcgcctaacgagtgatggatccttaaaaccgcgacgttttcagcgtccgaggttttcaagtcgagtaaatgaacttcccataacggcttggaggtgtctaacgggatcgtagtgaggtcggagacgtaactctcaagaaaaacgtctgcgtttgcgttctctatgtgttgtgtttggatttttggaatgatgacgtgatcctcgaccaccacgtttgttcgaacccatttttgttcctgtctattgttgttacaattgttcaccttcaataaaatttatgcatgtttatatcaaaaccatcgtcaaacattgacaatttgacttagtacaaaaatctatatatttgtgatcaaagataacaaagtaaaaaacaaaaactaatcacacactaacatgtgaaaactaaatctattaagtgtgtgactcaccaatttactggagaaacgaggatgtctcatcaaagtttgcttaattccttcgataatcatatcaggttcgatcttgttctttaaaccaaccaccgaaatgatgtagcagttaaactccggtgcgtgaaatagacgcgccgccggactaagcggttgctcctcctcttctacctcctttttcactgttgtttccgctatttgccctcgtcttcgtcgtatcttaatctccattgtttggtttttgatctttgtttttttctctagttctttcgactcataatatttatgtccaaaaaaaaaactaatcttttggaatgttttcttactcttaattcttttctttttaaaaaaatatttattactcttttcgctcgcaaattttccatcatatgtgttacacgtcaaactttccaatagtattcttttcgttactaaattcacttcaccaataagtagcttttcttatgattaagaatttgatttttggtttattcggacattataaaaaataggtttaagtagaaccgaattttatttcaatttggtttgaacattctagttttggtttagattcgggttcgtttttagattaaacgattctaatgaaaataataacactaacgttatatttttttaaaaactttttttgtatatttaatgaaaatcctaatttttatgaattctgattaatttggatttagtttggttaatctaatgtagacttaatttaaaattaatcagaattcataaaaaaaaaaggtagacttaatttggacgaataaaaaaagaaaagatttgattcaatctaatgagcgggagtctctttcttgcacagcagctttgatgctttgtaaagatttctcccaatcgtcaagtagtcgatgaggatcacttatgaccgttggatctacagtcaacgaaatcgtcatctggttcatgtaactctggaaatgcatcgtcaatgcctaatcaaagaccaatgagatcgtcaaaacttatgcacttttacaagaaaaagagttgataataaaagagttgaaaaacttacatggggatggccatacacacttggggccatgtaagtaatgggatgtccatagaagctgatttcttcaataggaccaattaaatttgaaaatgacatcgtagtgtttgacaatgctctatttattatcttagctgctacctgtttatatacattttaatttataagattggacagtactataaggaaaaacaaaaatcaatgctatgttaggttttggtttgatgccataaaatacttgaaactaacctgaactccaaatgttttgagaatgaatttaccggcgacgaacgttagggcagcttctaacgaatttttcttgcgatcgatgatccttttggctcttcggagatgttgtaacggatcgtcgcgtaatccgatagaaaacggaaagacaatgtagccgatccaatttccccatctacacgtagatcctttagccatcatatcagctagatcctgtttcaaccaattattgaaattttataccaataaatatattatatgatcgtcgtcaaaacataaatgaagtgaaaattaggtcaatgaactaacctggattccagtgttgggtcttaagttaacaagtagagctgatcgtagccttattcgtttaggcatatcagtggctttccttttagaatcttgatcttctcctaccttcttcttcttttctcctattaatcacaagattattgaattgcacttgtttaaaaaaacatgtctatgtcatatatatacacacttatttaccatatcttctgtccaaatattgcgagaggccagcctgactgactccaagtactacatcgttgacagtctactaaaccaaaataaataataatatctaaactgaaatcaagcgttgattataaacacaatatagtgttatataggaatatatccacattaataaaatttcataaacgcaaaaaaaattattaccatcttcatggtattcttgattagctttatgtcgtctaagcttacggtacgatggaccaaacacatccgtttactcttactaaaccggaaatcgcctttgatcggtgtttcagtgtccttaaggaacattgttgtagcaataaactccaaagcatcgcaaaccgtattcaaaaccaacataatcgccgaccatataaccataactaaccataagaacctggaatcacctcttgaaccggccattagcctggaagatctagacgacgaccggttctggttcggcagactcgggagctcgtcagggtttgatgttttacgcatacatgcaaggacaagggccatgagagacataccgtctcctaaagagtgatgaaacttcaaaacggcaacgttttcggcgtctgaggtttttagatcgagtaggtgaagctgccataatggcttcgagatgtctaaagggaccgtcgtgaggttcgagacgtaggtctcaagaaacgcgtctgcgtttccgttctctatgttttgcgtttggatgtcggatacaatgacgtgatcggtaacgaccacgtttgtccgaacccaactttgtgtttgtcttttcttgttcccaacggatgtgctcaccttcaagttttattaaaaataaatgttaaaattaatggtaagaagctcaaaagtaagatatacaaaattagacaaaaatgtacatatatgaagaacactttttctttctttgacaacatatttatagggacaagtacgtaaatataagtggtcaagagaaaaacgatagagatatgttaggactaagattaaaacaaacagctattcaatatacatgagcaaaatcctttgtatgtacgatcttttgattagctactttcaaatgataaataataatttttgctagttttaggaaatatacttaaataattttatcatttgggtggaatatttttgtactatattctgctagatttttataacaaaaaagtaaaactaatcattctcccatttttggaatgaaatccgaaagaattatacatttcattgaccaaaaatatttcactgatctttggatttctttcttcttactattttctaattctaaattgtttctttttttcaatgtttgataattttcgaaaacgaagataaaaacaatgtttgtttctttaatttctgaaaatgaaatagccggcaaataaaaataaacttttgaaaatgaaaataaaagcaaatatacagagtggcttatgctcaactattgtgatttgtgaactgtgtgatattgtagcaaaattagaaaaagaaccgccctaaagattattggtcaaagaaacacgtccagttctcgacgatcacgcaacaacacccagaaaagtcaatgaaaccataaatacatcaaagagttgaaaacattaatctatgttttatacatacgagttgatattttttttaatacatataactatataatatttaaccatgttgtattcatatgtacgagttaatttggactcaccattttactggagaaacgaggatgtctgatcaaagtttgctttaatccttcgatgatcacatctggatcgatcttcttcttgattccaataacagagatgacgtagcagttaaactccggtgcgtgaaacacacgcgccgccggactaagcggttgctcctcctcaacttcttcctcgtcgtctttcctcacggatgtttctgatgtatctcgtcgtgtcttaatctccatggtttgctgcttagtctttctcttttattttctttctctctttcttaaacttttaatattcgctttcttgatatatagcctccaattgttctatgccactttcttctttatataactttttggatgtgttggattatatctaaccgaaaaaattagtaactcggacccacaatcttcacataacgcaataatggacaaaacgtttagtaatattaaagtttgatagtaataaactaataattatatcttatgacaaaatctttataattctattgtttacttagattatttaagagttaattaacacaaatctatttcatatttcagttatcattatttttcaaaatttactacttttgctatgttaaaaattctactaaattcatataatattgaaatcaatatttaaaagagtttttacaacaaaaaaaaacatcaaaatcgtccatttttacaactttacttttcacgtcaataaaattcaaaataaacctataaaatccaaaataatatgtaatttagccacttttcgttattggtaaattttaaaatttgataatcatatatcaaatcgaaaccctcgaaatgatgagttcaactatatctttaaaattttcaaacacagatatatataatcgtgagaacgattacaatatatgtaaagttacaaaaatggactatatatcatattattttagagttcataaaattattttatatattttgaatgtaaaaagtaaaattacaaaaacaaacgacgttacggtatttttgcacaaaaccttatttataattatacttttttttttagtatagcattttggtttactcccactttaaaaaaaaacacaatgatcaacttgatgattcatcgatatctaaacccaacttcttttacaaaatacgatgaagattattaaatttagaaatattttattattttttttactcaaaatcatacttcaatgtataagaatactaagaaccgtacaataatttgccctttctaccaatattgttaaccatgaggggtagaaagtacaaaatagagagtacaagtggtttgcaaatgtaacaattaaatcagcacattcattttcttgtcttccattaaaccaaaaagatggttttaagtgtccgcttcaaaagtctagattcttatttaaatagctcttcatccgcgaccacgcaaataaatacccaaaatttacttctggaatccctaaattaacaagacaagatgaacttactgaaaattttaaaatattaggcacgagaaaattggtagttaaacttaatgtagaaaaaaaaataagatgctgagaaaagaatttaatattttttctagtgttagtttatgtagaacaaaaataaaatgccagttattttctaataaataataaaagaaagacgaagacacattcatttcaatatctaattatggtttattggtcaatttgctggttggctgacgacagatatacaattttaactagtaaattatgaattactcccgtgatggagtataatgtatagttctgataataatacgaccgttacacagaagaaaaaataacccacaaaattgacaacgtcgataatatcctgttgtctagaattgacaacgtcgacaattggcaactgtgtggacatatattaataacaataacagcaagaagataaattcatggtctaacacggcacggtgccagtgacgtgacgaccacaaatcaataataacattcgccatataaaccagttcatcgacgtttagtcgtttacccaccatatatcagcaccgcctttatatttcacaaccatatatatttagtttacatttatgtatagtttttctctctgttttttttttttataaaatagttttctctatgttatataatacaaatttcttgaattagggtgcaataaacgacgttatacgttcctagtaaaatatggataaaaggaaagtaagttgataaagccataccctttcaaaatgtttaaatacgtgtttctcagttttatctactgatttaggttttattagtatttctatttactagcaagttgatatgggtttcactgttatgtttttgatgggacattatcattttagagaagttttagcatgttcaatggtatggccctgagagagtctcttttaaattttatactaataaattttgtgaatttgtatagtttagagattatgatgggtccttatattttttggtgtctaatagtggaatcttaaattgggtctctttgagaaaaaaaatgttgaagatcaattgatttgagagagatcagaagaaaaacagagaagagcagctcgagaaagagatgggaaagggaaaaaaaaattgttttctcaaactcacgaccaatcaggccgtgacacgtcaagtccctttagtttcacaaaaacctcttaatttaggaacgttttgatttaattttgggtttttatgggaagagtcttttgctgtagagctctttaaagctctccattggacctgctctattatagttttgtgttctgccccttcactctttattttagcgattttagcgatcactaaataatttttcctttcgacgtggaagtttctctcattaacatgaactttacaatgtttttattaggggtgtcaaaataggtcaaaattcatgggtcaactcaactcaactcaactcatgaactctaatgagttagaaaattttgactcaaatgagttgatgggtcaaatgagttattgggtcaattggtttgatgggtaaaatgagttgggttgtaatggttaatggtttcaatggtttatccaattaacccatcaagttttgtaaattgaattaaaccaactaaaatctttaaaccaatgtcaatttaagtttaaccaacacatctaaaccaatttaataaaacattatttttccaaatttcttaaatatacaagcgatgaaattgagaaaaagtaaactcgtaatttttccacaaaaaacataaacccgtgatttttccgccaaaaacgtaaacccgtgattttcccgccaataacgtaaacccgtcattttcccgccaaaaatgaaaacctttgatttttccgccaaaaacgtaaacccgtgattttcccgccaaaaacgtaaatccgtgattatcccgtcaaaaacgtaaacccgtgattttcccgccaaaaacactatcctaagtttgatgatagtgaattaataattattaataatgataattatttattattattttataataataatgaattaaattattacttaaatgggttaacccatttaacaactcaacccatcaaattaaatgagttatggatcaacccataactcatttaaccattttgacacttctagtttttatctttcctacccgtggacaaaaatctattaggataatattgatattggaggatagaaacatgggcattgatgatgatctgttaaagcttcatgtgctaataaaaatatgatacaacttagtttcattagaaatctaatctatgtattttaattaaaatattatatattttttgttaaattagtcattactcttaatgttcctttaaacccgtcccttaaattaggagtcgagctctctttttctctttttcttggtgctttttaggaacatgtctctcaagtctcaacgactcttgccccttttcacgaactatctaccaattttttaacgaaccagacaaaactagtagtatattgttcccattctgttgtatcagttgacatgtggaactccaaacttttattatacttgggtttgaattatttctttgtgttttgtatgtatttatcaaatgtgtttatatatataacaatcatgtgtcttctactcttctattattattaatttctttctcttttgacatcttcaaccgactcggtgtcgattacaaaactgaaagaaacagaacaaaaaccaacaactaaaaaacagaggacaagaataaagttgagcttccaccaccacccgatttgtaaacgcaaaaactattatttgaataatagaaagtctagttttgaaaattaaaaagtaaattttaggaaacttttgttccataaatgttttttgtattttctttgcaattttttgcatagtattttctctataaatgaagaaaggaaaaagcacttcttacacatttaagccaattggagctaccagagattggaaggagatttgtgaaattttctttagtgatatttgtttcgacgccgatgaaacacaatgagaaaaggcagtacgaacagaagtaagaaaatcactcactcaaaagctttttttttttttttgggttaattctctcactcaaaagcttatgtagtgttcttcgtactcgatgtcaatgtaccacaaaattatagtattgctgattttcagtagtagtggtccgaaattaaagttaggcccgtttaatatcttagcccatacttttgtggaaagtgatcgtagattcgtagcccattctgtataaccaaaaaagttattctctatcaaatgaacaaggtcttttaagttgcctctgctaggcgtactcatccggttcggattcaaataggatatcgtggattttgagtcctttagtttcgagtttcgactatcaagagtcgaggtatcttcccagtattttaatttgggtgacatttagtactctttaagtttgggtcagttcggatagttgacacaaaataaatttcttatttttactttaatgataacacataatcaaaacattatttttaaaatcatgctttataatatataaagaatactatgctataattttctatagttaattctaactaacaaaaaagaaagaaaaaaactatttttattttaaaagtgaaatttgccacattttttttttgtgtggctgctgttttaatatcgatttgatactatttttggtaaaagaatcaccaagttactgagtcaaatcattatgtaaagtactatttttgtctgtgtgttacaagttgtgagatctaggttgttctgtttctcatacagtccacaaccaaatcacatggaatgtctctccatcatcattattttcgccatcactattatcattttttgttaaataatgtctttgcattatacgtttccttccttgttaccaagaaaataaaaattgccacatgaattagtatcatataacaagacataatttaaggattagaacgaaccctgtatatagtatagctggatactatttatgatgtatcccgtggatatatgtatatagtatgtatgcatgcataaagctatggtaaaggttcattgacctcaatgaaaagtttgatttattcggtatttcaattatattcgattctgtgaacgattcacaactctatgtttaaagcatctactttatgttttataaaaagatgactcgaccacttttcgtttgcttaaccccgaatcataaggtataaaagtactctaagaataaacgaaatacaaaaaaactactgcattcaacgttttatccaaaaagaagtcctatattcatctctacgaatttcttaagttaaaaatgtaacatgcgaatgtcatataatactagatcgcctaacggaaattgtattaaaaaaaagggtgatttgcagatatagcactttttcaagtataaagaaaaaatggtgatatgtgaggatatttaactaatcactagtataatgaagcatatccatatcaacatataatactactatactagatcaaatccttaatagaaaaatcgtagtcgataaaaaagcaagtttagatcaaggtgaagtcatggttaatttatatgggaggatattgaactaatcactaatgtataattaatctttaaaagaaatatgaaattaggtcgcgataaagtgaggagccaaaaaacacaaacactttggtgatgggtttcgattgatgacaaagcatcaacttcttatgtactaaaattccatgtacagaattattgaataagcacagaaacagtatcatatatatggataataatgatattgattatcaatttaaaatatagaatttaattaagagattttactctattttatatataatcaatcgtgtttgctagttatactcttaaatactaaaaattgtatcaaaaataacaagttaaaaaaaaaacaggagcgtgcgcctagcccgcaaaatccacaatcttagaacaaggtggataataaggtttggtttttctaaaaccacggttcataacgagtgtccactagaatccaaaaaaaaaaaaaaactaatttcgtcgtagaacaaaaaaaaatagtgagacaagaccgatttgaaacatgtaatgatgtaatacatatgatgattttatatctatagaatgaagaattttaagctttagtttattctagaagacgtttattttgttaatggttgcttcagatgtaaatttatataagatcattttggtaggtatttactctatagtctatagtaatatacactctacaaactggcccttttggcactcatgtataaacacgagtatttaattttcacattagtagacacggtcctgcttcaataaatctattttgacattagttcttaacctcattgttgtaattatttacaaacgagattaaaacaaaacacatggacatttttggataataatatttctcaacatattgttctagctttgatcgttgccaatagatcaacatatttgttactctcgataatcacttaagcccaactcatgtggttttaatgtaatggtgaagtgtttcctttcaaggtgtagtgtagcttcaaattgcacatactagaatcccaaagattaatgcactaaattcaacctcttctgcatcaactccatttgaagtctgtataatccatccaaaacaatcatatcttgcgctgtccatatccaaaattatgtgaagcgtcataattacacttcatccacccttctgtcggcatcctccatggcattgatctggagcttcataaacacatttggtttgtattaaatatttatgaaaatccatagtcagtcacacggatagtgaggtagaaatttagagagatcatcttatgaatctttttatttaagcaacaagcttttatccgtgttagtgttactttttatcatttcttttggaacaacctatagtatttaatttattcagagcgttcttaagaatttgtttgataaatatattcacgtagtttcgactacgtatagaaactttatagcaaaatgaatgttgtgcgtacgtacattgtttctatggtagataagtataattccagaaagagttaatgaggaagaattttattactgtggcataggatgaattaaattgatctatataaattttatgttacaacttacaaacaattttcacatggatttataaagaagccgctataaataaaaacgattgtagtttagttttggggtattcgaataaataagaaacttactccttaagttagcaactttttaatactaaaagagaaaagagatacagaactttccaaaaaattattgaacatgttctgatacttcactaaccatattgaaacagatggcataatcactttaattatacaacacacacatcttatctatatatgttacatctattataataattaaaccagatttaatataaatccagctatttaaaattatgccacagtttgaaaagaaaaaataaacaacgtgagatgtctatgtaattagaaacaatgggggtcttttctagtcgcattctggcattcgttgagtcgattttttttctttgttaggttgatgttggaacaacagatagatttatttattataaaaaaaaaaatacaatgtatgatttaattaattgctgtgaactgtttaagtgtttctaactattacggaatagtcttaaaagaataatgcgactagtttatatagagttttcctatcatttcatcaagtttaatctttggttggtaagtgccagctcatgttctttaatagccacattgcacacatataaattgaaacagtttctagatttctacgtaaatgttttaaatatgacaaaaatttactatatgtttcgaatcgaaataatctagcgtagtagtattcataactaccatctaccaccaacattattttgatactgtaatgtttgcttttaataaactgtcgaaatagaaaggcgcaattagttgtatgtagagtaacttaatagtctactcatctctaaacaaatgtgaaaagacttttttctcgatcaagtcgacgaataacaaacaaatacgatagattttttaaaaattaaacttttcgaaatcataatacgtgtatttttagggaattttctcttctttttttctttctaattcatgtcgacgaataacaaaagctcaccatcaaacgaagaataataacacaaacaattagaactagaacaaaagaaaatgataaagcaattttattctcatgtaaaaatgacataattcaatgacgcgtgtcccaccaattatcaccactcactctccatatatacttcacatacaatctttcactcatatatataccacacagtcacacattctttataatgtaaatcaaaagagaactaaaccaagaaacaaaatgggatacgaaaggctcggaccatccggagcaactggttcggtcaccacctccactactacagctccaatccttaaccaagtctccacgtcagagcaaccggagaacaacaaccgaagaagcaaaaagaagcttgtcgtatcatcaatcgtcttagccatctcacttatcctcgccgccgcgatcttcgccggagtcagatcacgtctcaagttaaaccaatcagtcccaggcctagctcgtaaaccgagtcaagcaatctctaaagcttgtgagttaactcgtttccccgagttatgcgttgactcactcatggactttcccggctcactcgccgcttcctcctctaaagatctcatccacgtgactgtgaacatgacgctccaccacttcagccacgctctctactcctctgcttccctctccttcgtcgacatgccgccacgtgctcgctcagcttacgactcttgcgtcgagctacttgacgattccgttgacgcgctatcacgcgctctttcctccgtcgtatcctcctccgctaagccgcaagatgttacaacgtggcttagcgcggctttaacaaaccatgacacgtgtactgaaggattcgacggcgtcgacgacggtggagtgaaggatcatatgacggcggcgttacagaatctttctgagcttgttagtaactgtcttgctatattctcggcgagtcacgacggtgacgatttcgccggagttccaatacagaacaggaggctgctgggagtggaggaacgagaagagaaattcccgagatggatgagaccaaaagaacgcgagatactggaaatgccggtatctcagatacaagctgatattatcgtatcgaaagacggtaacggcacgtgcaaaactatatcggaagctatcaagaaagctcctcagaacagtactcgccggataattatctacgtcaaggccggaaggtaaaatgactgttttacccttcgtattaatcgatgtttttaactgttatgtccgtgagacgaaagtgaaaactaaaaacctgtacggaggtttaataattgcgtatctctgactgtgtctgtgatctcttttttttttttttttttggaaagatatgaagagaacaacctcaaggtcggtaggaaaaaaattaatttgatgttcgttggagatggcaagggtaaaactgttatttcgggaggcaaaagtatatttgacaacatcactactttccacacggcgtcatttggtgagtttttcctaacctcactcttccttttttagtttttactatactacttttttcactttttgaactcttttgcaataatacaacaatcatgataaatagttaaaagcaaaacacgtattaatgcaatgaaacatgtacaagaattataaattgatacactaatcttttcggtggtcgaaaatcagaagcgttttttagtgatataatagaaaagttaaaagatctttttgtgttaattaaaatcttaaaaaggagctatgagggtcaacatttatgatataataaatgtcgtttttctatagatttaatataaactatttgttgtacatatttgttactgaaaaaggtattgatataaataagttaagaaggaaaaatatatatactttgaggagaattattggaatcagatacgtgaagggggccatgagctaggctgtctatagatttcggagtgatagggttttaaaaaagtgtccaatagattctcctatagtcagaaatttttacgaatattagttgtctttcaccacttgtgtgtgtgttgtgtttttttttgataaaagatttaacaccacttgtttttattcttcatatggattatggaccactaaagaaagctatatttaagtaaaccttgtaaatagtagtagtatgtactcgaaccagtaaacaaagtcaatattatagaccactaaatttctaaactgtgaatttttttctttcttttgtgttttttggtattttctcaaacttttttgccaaggcactcagtagtcgttttaataaaaaaaaaattgggggtcagaatttttgtttaatgatttttttcaaagaaacatgttttagaacaaacgtcattcacccgttttctactacttcaactcaggaaccttctcatggcagactaactttaaattaattttgaccaactttttcttgctcatgctgaattaagacctaatcacctaagttgtagttcttacgtaagtttacgtgtttgtttagtttaagagaaaaacacgatctaaaaattccaattctcatataaaagtatcataaaattttgcagcagaaaccttattatatataaccaactttttgtatatccttttttcagttttgatcttcaactcagttatgtagaaacttaaatttgaactgatctttatgctttttcgataactatatagtactccaactttatttattggaatattgacttttccataggactatgtacgttcgaattcggttaggtaacacacttacactgaattggacatcctatgtgatgctgccgcttatccaaccaaactcacatgcatgttgttgtgatttttaatgttcattaaatgcacaaaactcaaatcaaatcgaaaacataaaacattcttttgatcaaacaaagtttatatacttctttaccttcatctaatattcattcctcacatccacttatgtaacatagtaaatgcatgctccacatatgtataaacaaatatacatacagacacgcacacatggaaaatgcatacacatataaaagaatatgaacgtatcgtaaggttcgaagtaggccgcgcaattactgaccacacatatttgtatatatataaacatgcatgataggagacagagaatagtagcatttatttacatatataagttggaggtgggtcatagctcattatttagttgaacgcgttatagaccacttgtatacaacatttctataggtaacgacatttctcacatactagttttttttttaagtttaattatatataaagttagttgaattagtaaatacaaaacataattgtgtgttaatttcttgctttaatttttccagctgcgaccggagctggatttattgcaagggacatcacattcgaaaactgggccggtccagcgaagcaccaagccgtggctctccgcatcggagctgaccacgcagtgatctaccgatgcaatataatcggttaccaagacacactctacgtccattcaaaccgccaattctttcgtgaatgcgatatctacggtacagtcgattttatctttggtaacgcagccgtcgtactacaaaactgtagcatctacgcacggaagccaatggattttcagaaaaatacaatcacggctcaaaacagaaaagatccgaaccaaaacaccggaatatcaatacatgcgtctagggttcttgcagcatccgatctccaagcgacaaacggtagtacacagacgtatctaggccgaccttggaagctattctctaggacagtgtatatgatgtcgtatatcggtggtcatgtacacacgagaggttggctcgagtggaacacaacatttgctttagatactttgtattatggagagtatttgaacagtggacctgggtcgggtctcgggcaacgtgtgagctggccgggttatcgggtcatcaattcgacggccgaggcaaaccggttcactgtggcagaatttatatacggttcctcgtggttgccatcgaccggagtttcgttcttggccggattaagcatataggtagagaaaaaattgaaatgcttatttttccgatgaattgtttcattcttacggtccttatattaatggacatatcagtattccaatatatatgagtatattttaacttttaattgtaatgtctccactctccagaggtattatttaataatagatgaacactcgaggataattttcccttgttttcttgacagtgaagaagtaattattgactgatgtgtgatatatatgccatgcataaaaagttaaactagtttgattaaacgtaacttatatgcttcttttgtgtgtcaaaagaagggctaaaagtccagactcaagcaacattattgtgtttaaccgactaaatgtttcgaaaattattggatttttttttgtattcacacattttaatgttggatacaaaataattcaaacattcaaaaaacaaatatgaattggatgtgtcggtgatgagtggtgagagccggagagaggagctcatgtgattgaagtccataggtcacggcccacgaccgacactcactgtgggggccacgattttgggaactcatatgttccagtcatgttcgacttaacaaagaataccaaacatcattttcgtcactttccaattaaaatgctttcttacgttatacattactataatttatcattcattaaaacttaaaattgatgcaaattcagattatattttcattacaccaaaggtccaaatatataatacacaaatgcaaatgctaagtcgcatactcgcatgtcaagtgacacccaggcggacatggctgtttttgggtttttgcggatagacggtcacttggttcatcacttgcgagatggactcgtgctgcaatatacttcgactctctaccattctatttttaggtaatgttatttctacaacctttaaagttaggaataatttaattgttattactatatagtagaagtatatttccaaaattccaaagactgtatagaatcgatcaaattaatctcagataccaagccagatagattaacaaattacttaccagaatatataacaaggagggaaagaaaagtgaatatgttcaaaaaaactattcattttcacggagaccttttgttctacctacggatatatattggctaacttttttttggtaaaaagttaaattttataccaattttctaattttttctctacaatgctgaaacagcttatttaaaaaagcaacaattagaaagggaaggagatacaaccaaagtagaaactaagaagagaaatagaagaagaaggaggaccagggaaggatagaaggcggtctctaacggtgcggtccacggcagccttagtcacagaagccgaagtggagatgttggtgaagatccttgcatttcgttcgcgccaaatgagatagcacgcaacctgagcgatgagcttgatgatgacagaagagagagtttgaggttggagcttgcgctgtaaaatctaagatgagactgagagaagatccaagggtggcaagcgccaaactttagaagttaaagcttcccaaacagaggaagagaaggggcattcgaagaataagtatcgatgagtctcgatgccagcagaacagagaacacaagctgaggtgacgttaataccccagccccgcaacctgtccttagtaggcaatctgcccaggaacgcaagccacataataaatgagtagcgcggaactaacttgattttggagtcaataatccatagcttgcttttcaaatatctttttgttttttttgttttccacgtttttcaaatatctgttggaccattttgtcttagatttagattcaataacttttgctatactatactgtgtattcttcttgtactaaattttgtaaaaactgaatacccaaacaaaaaaatacatgaaatacaagtattttatttaaaatttagacctgttctcttattcgttggactaaatatacaataataaatggataaattatttataaaataacagttataagatagaaaaaaaattactacggatgtggtacaacaaatttctcgttaagagagatatgggccggtcgaagtgccggcctctatagataagccggcaccgcgtatattacgcacaacgtattccgctctttttttgttacatcattgtgcagaatgcagattcctaaccaaagaaaaagaaagtttttaaaaatatttaattataattatatgatgaaatcaagaatgggtcctccaaaaatcgagcttatggcccaataaagcccaaacgtaaatagccaagcccaagcatatttatccacgttcccaaacaatccctaaacctcatcatcatcatctccaaactcctaaaaccctaacaagaacccttatctctctcatttcctctgaaaggaatcatttttccactcagaaaatctcaaacatttcaaccatgtcgatttctaaagccgcctttttaaaccaccttcaaacactatcaagatcctaccgccaccgtgttctgccgcagccatttctcgccgtccgatacatgtcattcgcgactcaggaagaagccgccgctgaacgtcgccgtcgtaagcgtcgtcttcgtatggagccaccggttaattcattcaacagatctcagcaacaacaatctcaaatccctcgaccaattcaaaaccctaatatcccgaaattacctgaatctgtctctgctctcgttgggaaacgtctcgatcttcataatcatatcctgaaattgatccgagagaatgatttagaagaagctgctctgtacactcgtcactctgtgtattcgaattgccgtcccacgattttcactgtgaatactgttttagcggcgcagcttcgacaagctaagtatggagcgcttctgcaattgcatggattcattaatcaagctggtattgcacctaatatcatcacatacaatttgatattccaggcttatcttgatgtaaggaaacctgaaattgcgttggagcattacaagttgtttatagataatgctccattgaatccttctattgctacttttaggattttagttaagggtttagttagtaatgacaatcttgagaaagcaatggagattaaagaggatatggctgttaaaggttttgtggtggatcctgttgtttatagttatctaatgatggggtgtgtgaagaattctgatgctgatggtgtgttaaagctttatcaggagttaaaggagaagcttggtgggtttgttgatgatggtgtggtttatgggcaattgatgaaggggtatttcatgaaggagatggagaaagaggctatggagtgttatgaggaagctgttggagagaattcaaaggttaggatgagtgctatggcttataattatgtgctggaggctttgagtgagaatgggaagtttgatgaggctttgaagttgtttgatgcggtgaaaaaggaacataatccaccgaggcatttggctgtaaatttgggaacttttaatgtgatggttaatgggtactgtgctggaggaaagtttgaggaagctatggaggtttttaggcaaatgggtgattttaagtgtagtcctgatactttatcgttcaacaatctgatgaatcagctgtgtgacaacgagttgttggctgaggctgagaagctttatggtgaaatggaagagaaaaatgtgaagcctgatgagtacacatatggtttgttaatggatacttgtttcaaggaaggtaagatagatgaaggagctgcgtattacaaaacaatggttgagtctaatctaagaccaaatttggctgtgtataaccgtttgcaagatcagttgatcaaagctgggaaactcgacgatgcaaaatctttcttcgatatgatggtgagcaaactcaagatggacgatgaggcttacaaattcatcatgagggcgttaagtgaagctggtagactcgacgagatgctcaagattgtggatgagatgctggatgatgacacggtaagagtgagtgaggaactgcaagagtttgtgaaagaagaactgaggaaaggaggaagagagggagatctggagaaactaatggaagagaaagagagattgaaagcagaggcaaaggcgaaagagttagcagatgcagaagagaagaagaaggctcaaagtattaacatagctgcattaattcctccaaaagcagtggaagaaaagaaagaaaccgcaaaactgctttgggaaaacgaagctggtggtgttgaagaagccgatgtggtggagatggctaaaggagtagaagcaggtggatccaatggtcaggatccaccgtcctgctgatcttatttttttccttgaattcattagactctagttatcttcttatcattcaacttttatgtaattagggatttgtttgggacaataagctatgattaatcttttgctataatgcaggtgtttgcaaaatcttttttccatgtttgcttttgatttcaaattaacatgctatgtagaacatttgttttagtggatggtctatgtaatcatttctttattactcaatttggtgcattatatacgtaacaagaaattgtaaatcttatccatttgggacaaagatttgaagtgaggaaagactgtattccaactacatgaagcaatagaaactgagcatctgattagaaagcctagaagattgattatgtacacagcaaactggtcaagtcaaaagcaaaacagacagagattggaaacagcataaccaaaactaaccgatctactacccttcaaggaaatttattaaaatctagtatatctgataagatgcattccatggaagcaatctatcaaaaacttagctggaaacaagttcttatagtcaaaataggcttcctacttatagtcaaaataggcttcctatagaagcaagggtcactgtaactccgagctctatgcttctttgcttgcttttttttcatctgggtgtgttcattggctggggcaccaccaacacataaacagaccaatgttagccatataaaactttcagatagaggtatttgaagctttgaattaaaactgaaacaaagatatgatcatatagacaatttcatgatatgcttcaacagacatatactatgatagaagagaagggtcagaagatacatgaaaactagttttaatacctgattagtgcatgaactctgagccaagcatcgaacaaattcttctttcttcttgccaaagttgaagacggcatgctcacggagcacttgctcccgcttaatgtcctccagcgttttctcctttttccatttcagctctttcattttcttctccgcctcactatagttgtccatcgtgcgagaagcagttggctttgcaaatctcacgttcacctcatcactgaaaatcatattgatttcagttcaggacagcggataagagcaagaaggaaatggaagaatccaaagagggaaataagttcagaggttataaaattgtgagaatcttaccggtttccaagattgaagatccccgttttcctgatgattcctccatccaaagataccgcaccatcacttatgcatgggagggcactaatcatatcggcccttgttttgtaaacttgaaggcgagagaatagattgtagaacaaggtctcacgaagaccatatccatatgatgtgacacagagcaagtaagctggatcgatctgtatcatattcactgcaaatccgagaaacccgggaggacactcaccattaggtaattttggtttcagaagatcaagccttctttgcagatcatcagctatgtgctgaccaacatacggcctaaaagtcatcaaatgaagcaattagaaaaggactgcagatgaagtgtacctaaccaaatttgtaatacatgtaaaagattcaaacaaaaattagtacctcaggttttcaaggcagatggcatcaaaactgtctccaatctctcttccaatcgaagagccaaggcaatgaaggccagcatttatatcaatgttgccatggttatcataagcctctaaagccgtaacactttcataattcctgcatacaactgccaacattgagcgagtccccaaataattcgacaaaatcctgcatttttaaagtaccacgagagagaactagttagtttcagatcacaaaaaccattgcaagaaaggtttcttatataatcagtggcattgagaagttgaaggtaatctgaaaaagtgagagaaatggaactaactggctgagattttcatcattgaccttcccaagtttcgctacaacaccaacaacaccttttgtcaacatcaactgagaagcttgagcaccatgaagagtctcaaccagacttaaaactccagcagctgagttttcgtggcgaaggatctgtgcattgatatcttcaccctgaagactgttatcagagttttcacttctaggagtaggagacgagttaagcttactcatatgaactgcagaagaaacgaaacaaagacatattggataatctcaatcaacataaatcactgaaacgtaaaagtctatgatatctcagaaccttgcaagtcgacgatagcttcatccattttgtttttctgagacttgagaaacttgagattatcctcatgctgtttgattttgttacccatagcttcaagatcagattcaagcctcttggaattgaacatagcaaactcagcgtgagcaatgcctcctccattctgagtttcatttcttgcaactggtgaagattgatccaaattcatcatccttgttggatcttgaacattcaacggagtggtctgaaacgaaatctacaaaattggatacaaaaatgactcaaaaactattcctgtataaaccctaactcttaaaattcgtaaaaaactgaaacacaaaccctcaaatttaatccaatgtggtcgcatgcaataaaaaaagaaacaaaatgtcgagagtagatacatcaataaacaataaagcacgagtcttttctccagattcacagaaaaattcagagagacttcatcgtttaagagagatcatagactaaagttcgttcgttttttcccaactaatctagttccattttgcaattgaactgagtttttttcaaccaacctgttgaccagtcggatacattgctcctcagcttcaatgttatcaccggagaatctttctgcttcaatgttatcaccggtgaatctctctctctctctttctctctgcttcttctccggtctctgtgagtgtgagggtttaatttttgtctttagtgttcttctggagaaaaacagccaattgttgtgaagtaattaaactaaattaaaatacaccaataataaaaggaacgtattttgccaaaaatgtaagaaaagtttccttttatcattcaattatattttctggccttatttaaggcccaataatcttcggagattccaagtgggctttgtgcttcatacctccttctgagcctgactttctcactttgtagcatattagtttgataatgaaaaaacccgaaccagaggtaatttctcgtatttgagttcgataccgatacatgtcaaaccagtttttatcttacaaattcaactagttctgtgtcatgcgttaggttcgttaggaaaacgactctgtgtatcgatattgtcgaacgccgtactggttttctattaaaaaaaaatcatgtgacatgatgttatgtttttgcctaaacattatcatttataacatattttataaggaatgttgaatttaagctttgattacattagaaagaaaaaaaaaatgaattccagctttgtttatgcttaaaaaaaaatagtttagctactcgtgtggatgtatgagactctcaatgagtagtgaaatcgaaaggtggtccaattttggaggtggtgtaggtcttgggtcctcataaagaaagttaggtcgccgttattaaaacaactgcacattttcatttttgtgtttttttttctctcttttaatttacatcttaagacaaatgatcggcatcatttgatattttaatatcaaagttttgtagttcttgagtaaattctgtatgtatacctaaacgaatgaaacctttaaatttttcgttcattctttaaaatgtgtcggataaatattgcttctaaactcatgttaccaatgttaatcatataaatcagaactttatgtataaatgcatattatatgcatgtgaccaatagtttattttaagctcgatataaaggaaggataaatctcatgaatatatatatttaaaaatattttgttaagtagcatatttaaccatacaaataaaagtattattaaaaactgaattttatcaaactaattagtaaataagtaaatttatttatagaatatagtttttttttgtttttaaatatataaattccaaagtatgtattggcttcaacttgaatttcctcagattacactagtacatatatattcgaaatatggcatcttctcatcaaaaatatgtaaacataataggtccacaagtccacaaaatttaagaaaaagtcaaataatattttatataggatataacaaatatgtaaatacagaattcgatcattacaaatgtcagaagactttataacaaatggaaataaaggcgattggcgttaaaataagagaagacaaaagtagaaacctcgtgaacttcgtaaaaacacttaacggcgtttaaccgaaccccacgtgactccgttaatgattttcattttatcggtggtgaaatgagtgagacatcctctccttctcaacttaagtctctctgtgacttctctctctcacctcttcttatctctctcgttctctttctctaaacttcaacaatcgcttctaatcgtttgatcacattgcacaaacatgtaagttcctcaattaacatatatgtctaacttttatgcatgttgttgtatgtatgacaatgttatacatttttggttttggctacaattggaattggttttgctattggtgtaattacagctatttttgggaatctttaaacataatgtttcagtattaatagagcttatgatcaaagagtgttgccggaaatatggggaagaaagggagtggtggatggttctcgacggtgaagaagaaagtcttcaaatcctctcctaaagactccaaggttctaatcacacctttaattactatttttattttgtcaaccaccattatatatacatatatttatgtatgacaacgtattaaagaaaattaggacacttaagtgggatgtgtagaagtatatatgaggatcttcatgaaaacatatcctagcttaaagaaagatagaactatagtaatcaaattacaaatatgcataacgtttcaagtgattttagcattgctaacaaaacataactttaataataagatataactaatacgaccgcataactactttttcataagtaagcaatttggtttagtgtctttttcttcttgattgaaagcaattttccatactaattacataaataacatttttttttgcattgaacacttttttcttatttttctacctatttaataggattcgtaagatatatttatgcatattatagcttaaaagaggaaaaaacaatatacgatctttcatcttataaatgtatgacaagttgagttacaaaaagtaaatgtttagaccgtatatacttattaattaaaagccgaaaaagattggtccccttgtgaaagagatagactaagaaggctccttataagagcatctaaatatgatttttgtgacaccgaaaaaaatcttttttccatctcccaattttcatgtgcattgctttgttccctcaccatcactccaccccatttatttccccacctatagatatatacattaaatttatttcataaacttgtatctatagatagtcatatcttcacattaccataatatagaggttctctttttaccactatccaaagtccccacaatctttatcatctttttatatattttggatctcaactctagcccttttctattggttctcaaaatttattatagacatatagtaaaaacaaatgttaaatactttggacgtaaacattaaaactaaaaaggaagtaatcataagccaacaagtttattaagatggaaattattcaaatgttagattactgttattatgtgaatatgtcacacttaatttacttacatgcagagagagaacaacattggtagtaataacgccgacatatggcagcagcagcatgatacgcaagaagtcgtgtcgtttgaacattttccggcggaaagttcaccggagatctcccatgacgtcgagagcacagcatctactccagcaactaatgttggagacagaaaacacgctatggctgtagctatagccactgcagctgctgccgaagccgcggttgcagccgcacaagctgccgctaaagtcgttcgacttgccggctacaaccgccagacggaggaagatagcgccgccgtgctaatccaatcgcactataggggttatttggtaattttctatccctaaattttactatcaaatcatttccaactctcatttgtcaataacatgcaccctcgaatataaccattttacaatcaaattttaccacttctcttacccacaaaaatcgaaatgcattttgcctagaatccgttatgactataattcatttcagtattatcgctaaaccggttttagtggaatttcgtgttttagtatacacaatttattgactaaatttgtttttgtttttttttcattgtaaacttgcagtaatgccaaaccagaaatcttaagaaacattctaggttattcaaattatgaccggttttgtgttttttttttctttctaggcgagacgagcacttcgtgccttaaaaggactagttaggctacaagcattggtccgtggcaaccacgtacgaaaacaggcacagatgactatgaaatgtatgcaagcattggttcgtgtccaaggccgagtcagagcaagaagactccaagtggctcatgaccggtttaagaaacagtttgaggaagaagagaagcggtccgggatggaaaaaccgaacaagggtattgatatcaatacatactaaatcacccaatatgtatgtacatctataattagtggtgaacctaatatttgtatggttaagtagggtttgcgaatctcaaaacggaacgagagaagccgaagaaattacatgaagtgaatcgaaccagtctgtaccaaactcaaggaaaggtaatgatgaaaaatcttaggtactattttgctcacgtttcaatgtttttcttttaagtaattacactattggcatatctttttaggaaaaagagaggagtgaaggaatgatgaaaagagagagggctctagcttatgcgtacacttaccaggttggtcgccactctgtttctgttagagaaaaattccctcttaattgtcataaaatatgctatgcattataggtccttaaacatctttcataatagttttggttttcatattgaagcgccaaatgcaacacacaaatagtgaagaagggattgggctttcttctaatgggcctgatagaaaccaatgggcttggaattggcttgaccattggatgtcttcccagccatacactggccgtcaaactggtccgggtcccggtcccggacagtacaatcctcctccgtatccgccttttccgacagctgcggcaaccaccacatctgatgatgtatcggagaagacggtggaaatggacgtgaccactccgactagcctcaagggcaatataatcgggcttattgatcgagagtatatagacttaggatcatatagacaaggccataagcaacggaaaagcccaacccatataccaagctatatggctccaaccgcatctgctaaggctaaagttcgagatcaaggcccaaccgtcaaactacaaggaacttcgtttatgccgtattggaactcctcgaccaaaaacgggtcggttaatggatcaggttgtgattcgtcaagttcaggtggagcaataacaactggttatcccggtcctaggagtccgaacccaaaatcggatatccgacgtaaaccggttagtcctagtcaaagtcctaccgggtttggaaagagaggctggaggcatgatcattagaagaaagtatatgtaatcttgaataaaaacttacatgtgtggttggttaattatcttgtttgaaatatattttccctgttacataattgtatatgacattaataattgaacatgtcttctcaagtttttaacgtcgcggtcaaaatctactttgatttccttaaataaggtcatatcggattggtttggttgaaccgaatataccaggagtatatggccaacaaaataagctcaatgagcatacaaaacttggaaggaggctaaagagttagttttggtaaaagaaaaccttaatgtcctcacatcacgtggttaacttaaagaatgctcacatctccggatacattgtaaactatttgatagatctttcccatgcaaagtaaacagatctctagaatacacatgtgtagagttgtcttcgagttatgcgcaaacgagaagactagtcatgaagtgactccaatcccaacagaggctttgagtctttggcattacaaggagaagagtgaagactctcactcaaagacaaggacgtcacgcgcttgttgcctacaaaggaactgtgttgttttagatctagctttaatgttagaacatttcaggaaaacttggggacaaagtgcagaaagtagttgagttgagggtgtgtttgggagctagtagattcgtgccttgttgttgtacaagcacaagagagagcttgttgcctagaaaggaactgtgtcgttttagatctagttttaatgttagaacatttcaggaaaactggggacaaagttcataaagtagttgagttgagggtgtgtgggagctagtagattcgtgtcttgttattgtacaagcacaagagagagctcgttacaaaccttattctagtggattccgggacaacaagtttcccggcgtgaatagggtttcattcagagacccgaacacgttaaagtctcgatcttgcactttactttctctccatatttctttgtttcttgttctgttttctagttctcttcaaagttctttacaaacgagtgttaatcaaagagatagagtgagtttattccgcaaagacatgagttttatcaactctaaacctcacaacatgagatcctaatattgaaaactataaagataaaactcgtgaactttctcgatgagttgtaatctttttaaaaaatctatgattgccttttcagattccttataaagaacaaacaaaattctaaaagataaataaacatatatgtagacagtttattagtgttttcaaaaccaaattgatgaaaatgatctgcagatgaaatttcttggttcacaagtttattaacttgattatttaagaagaaaaaaaaattcaatgattcaaagtttgaattcttttaccgaaagtaaaaatgcaaacaattgaccaattctttgaccaagtttattatagcttattattgattagtttgacagttacacatcatattttcatctctacttcatcatcataattcttagttcatccgcggtggcggtggcgacaaacgaataacacggtttattgtctgatcgtggcttgggtttgggtatgttttcggataacccatcatccgcggtggcggggcgacaaacgaataacacggtttgttgtctaaccgcggcttgggtttgggtatgctttcggataatccatcatccgtggtggcggtggcgacaaacgaataacacggtttattgtctgatcgtggcttgggtttgggtcttttttcggataatccatcatccgtggtggcggtggcgacaaacgaataacacggtttgttgtctgaccgcggcttgggtttgggtatgttttcggataatccatcatccgcgatggcggtggccgcgtaggacgaccccaaccgtttgttgtctgatcgtggcttgggtttgtgcctgtttccatcattttcggaatactctcttcaacctacattatttttttggtttggtgaaaaaattcacgatggttatcatatacagatctattttgaagtgagtgaaaatgttgattattaatcagagagaaaattaaaatctatgacaaatgtgaaatgtacattttggttaatgatactgcttaccatatttagtgaatattggtcggtgtgaggaactccatcttcatggctctctccaaaccctaaaagcgaaaatggaattcaataaacaaccatattaatagattataattgtgaaaatggtaataatcagaatagatctttgatattaaaaatgtaagactatctaattagatgatataaaacattctcaaattacttgaagaacacaatggaagaaggagcaagaacgacatgagaaccaccagctgcatctttgaaaacatgtttttttttccgagaaaaaatatatattttggttttgttgtttggaagaagaacgcatgcttctctatatatagtagacatagttcgtaggccaatgaacgcatactggcagatgcggacgtacagcatggggaaagtaggcacgtgcctactgttttttgttctccctcgaatagctatataaattaagaccatctccatcaggctaatactgcgtgggtttctcaacaatattattttaatcaatttataataattaagttatttatttaaattttaaactataaaaaaaaagaattgggccattaatataaagacacgtggaaagatattatctctaagtttctcaaactagaaacgtgtctgactctctctcctattttttcattattttatatttttttgtctccagatactctctcagatactcccgatggagatgctctaacaaaacaattcaagtaaaatcaagaagtgctttagtccaattttttatttatttcacaaccatataaattttattttttatccaaaattttataaaacccaatagaccattgaaacgatgattggcctaccatcatcgaccttatttttatagaaacaaaatttctttctcattgattcatcgtaatactatttagtatttatttttaatatatgtagctatataattgtactctggattaaaaaaacatattctggatcttccactgtctactggtgggaaaatggctaagtaaagtaactatgcactacacatttactacaattcaaactaaatgttttggtccaagattttcgtctctgagaattaacatattaatagtggaacatgtcatctcaagtttttaatgtcacggtattataccaccaaacgacgagcataaacaacttggaaggaggctgatcgaggagttagtttggtaaaaagacaattccataatccataaaagaaaaccttgatgtcctgtttctcatggttaactcaaagaacgctcacatctctttatagtgagaacaagtgtagttgcggaatggaagagtccgtgagtatgggaactaggcagccccatcttgacgtgaatctgtggccaacgagaccacgagatagtgatgaccaaacttgagaggagtatgaccaggaaaaaaaagatggtcccttgtctctacttgttcactacaaaatacacaattactactcgctcccacattccactttaccaatctatctcacgtagctaggccattatgattagtaattttgaaatagagcttagatgtgaagttagggaaccatacatccttgtaccaatcaaaaattggatttacttgctgaaatcaaatgctgtgtgtcttgcgaagcaaacttacaagtgaatgagtcattttttccttctccaaagaggttgatccttgccggttggtaacttgtttcttctccatggaaaaaaatgtccgtaagttattactattgaaactaggtccgtcttaatctatgggacgatcttaggcaaaaccagtaaaatgttaaagtttcttactaatttttttttatccaaacattggacatttttactctaacaaaaattttgaaattgtttttgaacttatggcaaaagcgaaggtggtttagggctacgatcaattgaggaggcaaataaagtctgcatattgaagctaatatggagaattctttcagcgagaagttcattatgggttgattgggttaaaaaacacctcataagagacggctcattttgggcagtgaaagataacacaactagcgggtcatggatgtggaggaagatgctgaagtatcgggaacaagcaaagatgttccacaaggtggaagtgaagaatggggacacaacttccttttggtatgattcatggagctcaatgggtgtcatctatgaaaagttaggagatagaggctgcatagatatgggaattccaaaaaacagtatgcttagtgaagcgataagtaaaccccgaacaagaaaccatcgacaaagcttcgtgaacctcattgaagttgaactgcaaaacctgcgaacaaataggcgagaaacagaacatgatataccactatggagaggaaaaatgactgctacagaaagaattttgtatccaaggagacgtggctgcagattcgttcaacaaggccagagatgcaggactacaaagcgatatggttctcggatgcaactccgaagtatgcgtttgtcacttggttggtggtgaagaatagaattgcaacagggagagaatgctgaaatggaacaaaaacgtgggtactagctgtcttctctgcaactatcctttggagacaagagaacatttatttttccaatgcccttattcgagaacggtgtggagtgaactggcgggaagactactagctagcaaatatacggacaattggctagatatcatgaaggagttagtgagtaaagatcttgacgccactacaaggattgtgcttcggtatgtgtttcaaaacacgatacattctatatggagagagagaaatgagagaagacatggagagacgcgccatcgaggacggagaagataatcaggctaatcgacaaaaacataaggaatcgattaagcacgctaagggtgagaggtgaagagaagtacccaagaggaatccaagtgtggtttgcttcaaggcaagatcaaaatcaaggatagataagatacacatttgatctattttttttaaaaaagtttgcatttatatgtataaacagtttatttttctttgaatataatttaacattaaattttttaaaaaaaaatgcctatgttgcctactcttagagaagcgcataatgtatctttggactttcgacaagaccaaaagttcgactcacacgatgtttttataacaaattttaaccaaaacgacgttgttttataatatatatgatgttatatagtctgttaaagttgagtcttatattgcagcctttgcaggtggagaataaatttaccaaaaaaattaaaagttgtgaatatttatttgcaatttttcttcgctttagaagtttttaaaaattagtattattaaaccgtagtattattgaaaaataatactttttagtttttaaaaaatgtttcacacatgcaagaatttgaagaaaaatccgactgctaaccaaaatactaaaatagcgaattaaacatgggactcataacttttgtattaaatgactaaactaaaaaagatgcaattgaaagaaaatgaattgcatgtttaattggttgcaccaaaaagtttgtttggtgataggaaataactgatgatataaattttcacaaaatgacgaccgctccaccatagtaactactcaaaatttgtcagtgataatgagcatgacaaacatgatttataaagacacggcgagtccccaacacctgcagctcaactaatcaagtttcttgatatatgatacgcaacaaattatcttcagtccgtcgtcgggatccacacaaatacgaggatggacttcggttatggttcgcctctaggaactagttgtttcaatctctttacaaatcttttctcaaaataacatttaaaataaggttgcattcattgtacaaaggttttttggttgaataaattttaaattcattcaaaaaaaaacatgatttataatcatggaactatagttactattttaaaaagtaataaagaactacatggttatccaaagacgtgcgtcccttaatcattgcatgttttttcaatttttatcttttgtctcaaaagttattttgttaaaaatgtaatgaaattgttatcctagatatactcatgttacagaccacacgatcgtaagcttgttagttaaaaaaaaaaacactattatgcctactttattaaaaaaaatctaagagtccactcaaaagtcaaaacactccaaactcgcctaccaaaaaaaaaaaaaatcactccaaacttaaaatccactaaaatgaaccaaaatgcttagtacaagatatcatcttaattgcaatcgaactacctaatgcatttgattcaatatcttgtttcttttaagttttaactatccacaaagccatgacttgggaatgtgattgatcgataaaactttttcatttgattcaatatcattttactaactattcggttattttaaaaagttcggttcggatgcggttttgtttttacggttcggttcattcggttatttgcttaccgatttttctgcaagagagcgcgtttcgtttgtctccgcaaacgatgggacaaagtgggttaagtctgaggttgtttcttcgacttgtctctctagtctctataccaacaacactcaacgagacaagaccatcatcatcactcacttccttccttccttcaaatctcaactaaatcaatagacattcctctctttgtctctctctatccaaatttgaactgtaactgtcttcaaaatcttcatttttctcagacaaattggatctctccttggagcagaaacacccattaaaggaacaatagagagagttttggattgaataatcacagttccacaggtttccttccactctcattatcttaaatttcacttaaaggtcgaaacttttggtccactggtttcattatcttcttttaaacacatcaatttgtttaggatttaacttgtgattttgaattggttttactacttctcctctctcgatttagcaagttaaaagcttttttttttttagtgttcttgagggttttagggtacaattttgtttcctcaggactgggttttgctttcttgtttcatatgtgttttattgttcttgatgaattcattgtacattataaaatattgtctcagctattggtacacagttttctttctccctgggaattgtttgttaatttttaatagagtactaataaaagattagaaaatctgtggttactttagagagctgtggattctacttgtttgtttgtttcttcttattggattagttatggagcaaagtaaaagccttgttcattttctttgttcatatgtaataaaaacaactagtgatatacaagtgttcttggaaaatcttgaatgaaacagctttgaagaagactgaggtttatcttcctctctgttgaaaaaatagaagactgcagtggctacaatgcctgcgtcacatgaagcttcaaattacgatgaggtttctatgcagcaaagtatgctcttctctgatggtcttcaggtagattctgaatttgcaaaatattgcctagtttctgataaattgttcaaatctccatctgacttagaaggacaatgctataataccaagcacatactatctttctatatgtgaaaccgatgacaaaagtaaaatgataattaatggtctctgtgattgaagatccaagtgttgttacaatgctgaatcatatcttgttttctaaaatctttgtaggtttatttgacaattaattgaaaggttttctgctcttttatttcctcaggacttgaagaatctgcgagcgcagttgtattcagcagccgagtatttcgaactatcttacacaaccgatgataaaaagcagatgtgagttagtattaagcagcgcttcagatttattgtgtcacaaaaaatttcttggtttttctcagtagttgtttctcatgttaagtgcagtgttgtagagacactgaaagactacgctgtgaaggctctggtgaatacagttgaccatttaggctctgttacatataaagtgaatgactttatcgatgaaaaagtcgatgaagtatcagagaccgagctgcgagtatcttgcatcgaacaggtataaaaaagctcctaaaaacttgtatttatccgtgaaggtttctttttggggttactaagttgtaattttgtgtttatgttgggaaaaataacaatgggatggtggttagaggctaagaatgtgccaagagtatatggatcatgaagggcgttcacagcaatcacttgttattgacactccaaagttccataaacgatacatcttacccggtaaattctctctttctcgcactcgggttagaaattttcgatactcactaagatgcaatctttatcagcgggtgaaattatgactgctacaaatcttgaaaagcttaagtactttggaagcagtttagaggatgcagatgattggaaccaattccgaaatggtgagtttgtatcttctatgtttctgttgtacacaatccaagattcaagatttcttactaactgattggtttgctcttttatagctgttcgtgctacaatccgggaaacgcctccaccacctgttaggtaaattatccaaacgcttgctcaagaaataacacaacacacattttcaaacacaagaacaaaacaatgagacctgattgtctttgcagaaaatcaacatctcagagttcatctccacggcaaccacctcaacgatcagcaaccttttcgtttacctctaccattccaaagaaagaacaaggtaaacaccacaatcgcttggtttttttccgctcgatactcgatcctttatacatgttttcgtgtgatataatcagataagagatcagtttcaccgcatcggtttccactactaagatctggatcagtcgctaccaggaagtcagcatcaatcagccgaccaacgacaccaagcaagagcagatctataactcctatacgggtataaaaagcttccattggaacaaaactccaccagaaaatgtgtttcatcaatttacctcttcttgattcttcttcttttgcattttccagtatccatcagaaccaagaagatcggcttcggtccgagtcgcattcgagaaagataaccagaaagaaacagagcagcaacaaccgagcaagagcaaacgattgctcaaggctttgcttagtcgacgcaaaaccaagaaagatgacactctctacactttcttggacgaatactgaaatgccaataccggtttttatttgtgcaagcgctttactaaaccggaaaattgtggatttcctattttttcttttatttttctatattatattttataatataaatacacaaactataccaaaacatcgaatttttacccatacaaaagtcataatcatgattcgtgttgttatgagatataaaatttcacgatctgtacatcttctcgatttgatatactatggtcatagattcgatcattagcaccaaagggatatatattatatatattagacatatacatattaacatatataagagaaaaatttaacataatacatttacaaccaatcgtaaatgctacgttgcatgtctattgacacccatcgggacatgctttgtttttcggatatacgacatgcatgacgggctcttggtgtatctgcatcacatgccgaagaaacaagaaagtgaggatgttcaaaattttattcatttgtaggtggaactttgttacgaagaaagagatcgaatgaaaaaaaaaatgtttgagtttcgtaacttataaataatcttatggttcagtcaaatatatggtaatctaatggtaaaaaacaatgttgagtttcacaaaaacatgtgtcaagtagagattccttttctttttttttggcaagtagagtttggttgattgaatataaagtagctataatatccagaaaagcttacattaaggatccttttttttttttttttttgatggaagaattagtaattttttgtataactattgaaggttgaacatgtataggtaatttacatatacaatagttgaatgtcattactaataataatataaatcttaagtactaattttattattaactataccataatatggtatattgatgttattagatatagtaaatttacaattgataaagtagtggatgcctttttctcttttggttccatatggtagatcatttatgtacatcataaaaatattcaccaaataataagtactttggatgaatacatatattaatatattatgaagtgcttttgaactctttggatcttatatttaattattatgcataggtttcaacggtagatcaaaagtttcaaccttttattaatggtgcatcagttttagttgtgagatgtaggaaaatcatatgggtggcagtaatgtttatacgttacagtaatgtgtaacaaaaatcagtagaatctggtatttttaaatagatattaattgcgttgaaaactttgagtacaagagtcaaccatacgtttcaagagtgattataatatgaattataagtagaaattgttttctttaaatttcatacatattcgactttccggtttcggtttcgaacttatgagctataatcttgtcatgtaaacattttttaaatcaatctttgtctattcaaattccttaaaattaaagagaacaacaatcactaaacgattattgaaaaatgaaaatatcggtaagcattgcatcatcattaattttacatgtagattaaatttgttaaatcaaaagtttaatattcataaataggaaaaaaatcaaagatcaaacaattgaccaatttttccaaatttactcttttatatttgattgattactttgatagtacatatcatagaatcatcatatttaagtttttcttttgcttcacatgaatactagttcttctcacgagcatgatttaacgatattacatatttttgcttcatcatgattcttagttcatcttcggtggcggtggcggtgacagtggcggtggcggtgggggaggaaaaccataaccgggttttgttggatcgtgtttcgggtctggacctggttccggataatccatgatcgttggaatactctcttcaacctttattacatattaacaattactttttggttcttaacaaaaaaaaaaacaatattactttttggtttggtaaaaaaatacccaataattatcatatgctaatttctttcaaatgagtgaaaatatttattgattaaatttatttgtcaataaaaatatgagagaaactaaaatctatgaaaataaactttttattaaatgagattgcttaccttgtttaaggaattttggtcggtgtgagtaactccatggccttctctaaaccctacaaaaaatgtaaaactatttacagaacctgtttgaatataaaataaacagttttttcacacctttaatcatgcaattgtaaccattcctttacttaattagatgtttaaacaagataatccatatacaaatatacaaattgatttacccgaagaacacaatggaaacagaagcaagaacgacatgagaaccaccggctttatctttgaaagcatttttttgtttgttttagttttgttgtttggactcacgcttctatatatatatgtgtacatgtagttacgttttggtggaaaaatgtgttggcagattgatgatattgacacatgcatttcgcatttactacaattcaaactaaatcttttggcgattttatttttaaacatatttataattcatcaaattagtaattagtttccaaaaaatatcagatcatatttattaaaaagataataattaattaatgaggaaagtaggaaactatattatgattaaaaagaaaaatactcatgaagaatgattttaaattttttgattaatgattaaatacattgaaagatagatttttgggttagtagatgaaacattaattaaaaatcagcttttgttgatgagaaaccaatcttatgaatcctccactaggggctgcagaggcagatagatgcatagtttgtaaggaaagaatgaggtctaatgttgctgagattaggatcctaagtgtttgcggctcctcaccaagaaacttgagcaaaggcccaaaagaagtccatgagtgtctcccaagaaactaatgcacaacaaacatctccaattccatgaatccccatgctacgctcttgagtgaaccagaagtatgaagtggaagaggagagatgaaattcttctctggagattgatgatattgcctccttgaaaaaactattaaaagtaagtttgacctccagattttccaacataagctaagctactatatgtaatgtccacatccatatgcaattatcagtgtttttagagcctcttgtctacttttgtgttcaacatcactcaaactaagctacttgcgaggttcaattgataatcgttgctactcttgttaatttgtgtaccctattaatcttttaatcatctcgttttgagaatgatgagaatcaacatggatagcataatcgaattgagaccctgagaacgatgagaataaagataaatcaaatatggctcacagactcatatagaacaaaagtacgatccaagaaaacaaaaagaaaaacaaaccatattgtctaggatccaattgtgtagagcctgggatatacacgataacagtctgaaaaccagcatttctcaagaagcgtaaactcttaccgtaagctatgtcacagctgattacaacaatcacaccttgagggccgtgtgactttttccaattctcaattctgttgcaaatctcgtacctgttgccgtcgtgctcttctttcaaaaccacaggtacaaactctaccccagtaacaatgagcctgtcgacgatgtccacacttacgtacttacctcatatccctttactgtaagtgcctcaacgtttagggaaccgcagaatcctcaaccattcatggccgactttatggtctctaagactccgagagcgtcgcagccacttggaaggccaccgctacctaaatcccaccacacaacgatgggacatccacgattctgctcctccattgcttgcgaattaggctttgttttctagggttttctcccaattttagtgacctagacctttttataatgaattgtatttttttgttttttatacttctttttctttcctttttccccaagctttacgcattaggcctcatttttcttccaactattggccaaacaaattaaaagatcagccttgtggtaaagcccaaaccaacttggaaattttaaaaattagaaccggtctaatggaaaatggaagaattgaaccaaatcaacctcgaacattgatattaagaagtgaaagtaagatcctctctcgagaacttgttcaaccttattgtgcataggttttcaacggtgtatcaaacatttaaaatttgagtaggtgtggtgaagcatttcaaattttcattaatggtaagatgcgtaattttcccgatcaagtgatatctagatcaaatttgtagaatcataagtttattatgttgataactaagaaaaaattcaatgattcaaacagttgaccaactttatattagcattttatttatttcattgattagtttgatagtacatagcatatagttttttgcttcacatgcatactagttctccgcgcgagcatgattaacataattacacatttttatttgcttcatcatgattgttagttcatctttggtggaggtggcggaggacgaccataaccgggtttcgttggatcatgtattgggttagggcctggttctggataatccatgatcgtggggatactctcctcaagctatattacatattaacagttactttttaatttggtaaaaaatatcacaatatttatcatatgctgattttgttttcaaaagactgaaagtacttatggactaaatttcttattagtcaataaatatgagagaaactaaaactgtatgaaaataagcattttatttaatgagatttcttacattgtttaaggaatattggttggtgtgagtaactccatggccctctccaaatcctacaaaaaacaagtaaatgcaataaacaaccatattatttgattgaaatccataactagctgactagagagatattggatatatgttaaaaatgtaacacgattgaatataaaataaacagttttttcacacctttaatcatgcaactgtaaccattcctttacttaattagatgtttgaaaatataatctatatacaaatatgcaaattgatttacccgatgaacacaatggaagcagaagcaagaacgacatgagaaccaccagcttcatctttgaaagcatttttctcttgttttagttttgttgtttggaactaactcatgcttctatatttatatgcgtacatgggtagttaccagttggcggaaaaatgtgtgttagcaaattgatgatatttaccactatgtattcgcccataggttttcaataactaagcactacgcacttactacaattgaaactaaatcttttggtgaaagattgtattttcagacaagtaacatatttataattcatcaaattatcaactagtttctcaaaaactataaatcatatctaaaaaaaacaaatcaggaactaatgattacataatgaggaaattaggaaagtatattacgattaaaaagaaaaatactgatgaatactgattttcaaaattttgattaatgattagatacattgaaaaatagattttttggtaagtacatgtattactcatgcatctaaaaaataaattaataaaaaagagaataagaatatgatgtactcatatatatgcatctatatatatatagaaatatttgtatacatatgtatatatagttatactatcttaatctatctaatgtatacattttttattaatatataagttgtaaaaaaatcaatatgtgactacttatggagactcgaggtcaccaaaaatgtagttattgtcttatcgaccgtcaaatgattcatttagactcgacatcattttttatttttttttaaactaagtgtgaaaattattgtattaacaacgatgtcgtatcataatttgagttcaaactcgtattaatgtgcacgtatgagctatcaagaaaaaacacattaaaacttgtgacattcttttctttttttcattaattaatgacgttccccatcactataaacggttcgatttcttctagtacaaggaacatcatacatttacttggacgtttgattacttttttttttaatttatctttcagaattcagagttatacaaaatgatgtgtaggatattcatgttcatattgtttcgtttttataaccgaagaataagaaaaccggattggacaatcgtcattggggtgaggccggaatatctcacctaggtttgaaccggttcagtataatatctcacgttaccttggttcaataaaaccgcaatgagctttttaaacaaaaaataaagcaactagctagtttattctatttaatagtagaaaaccagttaacaaaacaaatgtgacacatgacatggtgtacctataacttctgatattgtgatatataactataaatatttatataacaacttttaagtttaagttaaattgatcaaaacaatattttcaatactttgtcaaatttctagtcaccctatttcctgtcttatttcgcttagtagagtctccttatcgagtgcatttcaacgtcttaccaagagctttgcttatggtatagtcgattatttagttggttctcgaatgtttatgtttttttttctttctttggcatgtgatcatctttttagaattcgcttaaccttaactttcatttcttaaaatgatgtattgacatgcattcttatatatatatataaaattctatctagatttgcctattgaaaaatgaaattgatgaacaaacaacaatgaaaatatttacattagaaaaataactagttgtcgaattcctatctttgaagcattttaattttcttattacgacaattccttagaaaagtgaaataacaataaccatatcactagacgttgcatatcaatatattttagtgttttcaaaatcatatttaaaataaattctgtgatttatcgaatcatgggactattaactagttagaatttattgatgattataaggatggattgaaccaatattacatatatttttctccactatattatagaatgttgcatcatcaatatatattacatattttgttctccactatgggttcttcttcttcatcctaggacgcggggcatgtggtccatgtggacgtccaggataacgtcgtccaggttcgttgggaccaggatagtccatcagattctcaatactatttttaatctgtattacatcatttttttcccaccaacaattactaaaatttgatttatttattttaacaaataaataaattaattcatttaatttaaatcatgacatgttattatatagtctataaaatatgaaaattaaacgtgttttattttattgcttaccttgtctgaggaatattgatcgatatgaatagcaccaaggtcctccttaaaccctaagaaaacaaatagagaataacaaaagaatatgcaaaattaattaataaacggggtatatatttatgtattgcgataaaacatataattaaacgttgacaagaaaaataatactattaaactttatgtgtgaaatccttaagaaccagactatgacttgggcaccagtactacttgtatggatcattttttaaatcaaacaacaatttttttatatggcattcaaagttgttattatttaaacttaatcaatatgttcttattaaaatatcgattttatttatttaacttgagattacctgaagaacacaatgaaaacatgagcaagaacgagaagagaaccaccaacttcatatttgtggatatataggagaatcaggtttgaataaaatggaattcgagttaaactgttttttagtaacacgtaactaaattggacatatgaaatggattgcttgtttgttgataattttggaggattgaatatgatatatcaaaatgaataaaagttttctaaggatctttgacaaagaaaatatgtcatctcatggtgacattgatctccaatttatagcctaatcctcccttaatggaccaatgattacatctgtgatgtgtcaatgtgtggtaccaattttactaaaatttaaacacgtacgtaacgtttgattgattaaaagaaaataaaaaaggtaactaaaaatgtaaaaagataaataaaaaatcttttaaaagttttgatatagaaataatggattctgtagttataagtagctgttgaggataacagataattaccatatatatatataatatatcacagttgaatatcattatttttatctattaatctaaaatttgtcacatatatctagtactctacgttatttgataagctcacacgtctcactgtctcagaagttaaaagattgtaacaattaatttggtaaaatattaaggcaatgtcattattttaaatcgaatgatccacatatatattaaaatgagcaattcgtttcaaccgattggaaaaaaatatacttttgggggaaaaaattatacttttgggggaaaaaatattcgtttcaaccaattcgttaccaaattccacaattaatttggtaaaatattaaggcaatgtcattatttaaaaaaaaatatacttttggggggaaaaaagattcattcaaatcagtaaaaatcaaaagatatccatcgatatttacttcttaaagctttttttgtcctcaatcaaacaagattcattattaaattccagcatttgtgaatctcctcccacataattgtgtaatcttctttttttttgggtcaaattgtataatcttcaaatgatccttctttaaacaaaataaatccacgtgtgcacacgaattaggtcagcagaagagtttacatataatttggatataaagcatgctgaatgaaaatggatgttttatgtattgcgaaaaagttatttttttgttaaacaatggaccaattacaaaatacacatgtatcaagtaaagtttgattgattaaataaaaattaattaaaaactctcaaataaaaatatttgaaaaaatttcgatatagaagaaatgcattgatagtatttaagtaggtaattagaaattattattattaatctaaattgtatcactagttctattattaacgatcgcgatcatccgaagggaatagaaagatgtttcagaaaatttatgatggacgctcgagtatttgtgatgcatcgaagattcttccaattactttccttgcatctatcccaaagattgcctcaaaaccctgtacgaaaaggtgaagcaccgtctcctccacttagtgcaacattgactcctctataaatgctcactggttgatgataatcttttgatatagtaaggtgaagtttcttgtaccaaatgataactttttgatcgcatgacatcaaatttaagaaacgaaacatgtagtttagtgatttgtgttcctgtcgttatgccatcatccgaattcataccgttgtgtattgcatattcttacaaaattaaaactatataaaaacccatcccaaatcgattctttgtctgtttaagaggaatccaactgtataaaagctctactaaaataatgtcaaatttcaaaatatgtaaataaatatacattcgagaaagaaattcacaaactgtaaacaaaatttttgtaaaataataagacttgattggtaattgtgcgtaaaggtaaatatagagttacataccctatcaaacaatcagcatcaataaccatacatgtaaaaagctaagagcaaatcattacctttcttcattctgattgttctttttctatttctcaaaaaaaaaaaaaaaaaaaaatcaccaaaaaatgaaattaggaatttgacgagcttaggagtggacacaatcagagggtaagaggatcaacttccgagtttcgctccttcatcggactccaatcttctgcctctgcaataaacaacagagagataagtaagacattaccatttaccacaaacaaacaatggtttctattttgctgctctctttgaatataaatggccgtagtttcttcagagttttggattatatatgtatgtaagaccgtaagagaaaagaaaaggaacatacttggcttttcagagatgaccataagccgccgttgtaatatggaggctacgaagaggaagattgagcacataccaaacatgattgtgatcggaaatgcgtccacctgcagaaccataaaacaaattttccagattattagcttttttccagataaagaggatgaagatatgaattttcttacgttgtacaagacgatgcagacaaagatgttgagtggaacacggaagaaattcattatggtgcttcgtgcttcttcaggtatatactgcgacctcatcttcattatcgaaggccaaaatattccgacacaagactcaaaaacacagaaaccaagcagctgaatggagctagttaacgacaatccttcgtctttcacctttgacggtgtcaccaagacctgtgccacacgttaatatagggtcaatgtgcaaattgtacaaacttaagagtaacaatgaagtttcagactcttgagacatacacttgttgtaatgggaagaagaagtgaagcagccgagactagaaagacaatttgcatgtagttttcgactctgagagatgagcgagacatgagacgagctgcaagggagcttcccaacattgaggctaacatgaaggttgcaaagacgaagccatgtggaatttcttcatcgtttgggctaagagctggtgtccagaggaaaacaaaggtgtacatcgaggcttcgaatagagactgaatagcgcccagcaatgcaatcttttcatctgagaaataatcatagattgtgttagagagatgaggaaacatagcttgcaaataaatgcaggatgggatgaatggagacagagtatattgagaagccttttgaatcaacagttttaacgctaactttgaacctgcctgaagcaattgctatggcagcaactttgaactgagtcagcaagtctttgctgtcagatggatctccaaaattctcagaccatgttcccaatatgatcgccattccaattgcaagaaagcacgcagcggcgtcaaagggagcaacaggaccaaaggaaaaagtgtcaacaagaagattgccaaacaatcccgaaaggatagccaccagaccgtttccaagaaatacagccttagagaatgtaagtgacagccactgttgctcaaagttcctctgcatagttgttcagaaccgagaaaaattcacatcaagctatagctaaacgaaatcactaaaagcttataagtctttacttttttcattatccaaccttgtctacagattgcactttgaagtccataaatgatagtttatagatactacagaacttacactcatcaagaactgaacgagttaactgtgtaaatcatcacgctaattgaggaacatacatggtaggaaggaaaactatgtttgtatcaaaccagtaacaaagtatttaagggaatttccgcaggaatcaaaataagaaaatatagctcaaatacctagactgactaatatgcacataaaaataagagtaataaatctaaggctaaccttattgtgctctgcaattagccaggactcgaaagcagaaaacaagagagatgtagcaataccacccaagatacggccaaccatcaaaactttgtactgtggagagtgcttggtgatgcaacttagtatgtaaactatacagtatgtaacacatgccctctttcgacccctgaatccaacacacacaaagatattagttgcctaaacatagttctcctccaacaacacggacttaaaacataagagagagagctttctcactgtttgtcagccagagatccaacaatagttccaaacaacattgacgaaccaaaaccagcaatgaatagctgaccaatatctccttttccaaaaccataagtgctgtaaaggtaatacacataaggaccctgaagccaatccccagctgaaacaacataatcatcgatacaaacaagtgtatcagcatgatacgattcatcaacgtattcaagaacaacatactaccatccttaattgcttcatactcgtaataataacttgtatcatagtcactggtcctaattattccatcaatatcatccaaatatttgatcaatgacacatttgatcaaacctagttatgatacatgaaacaaatatgccagaattaaaataaggattatcgtcaatcactgataccagatatggaaagagcaaagcaaaccatcgtattcaaatgataaattgcagatttgatatgagctataacaacaaatccaatcagtggatgaagaaaacgacggcataaattgtatctacttctggattcgatctagcacgtacttaagtggatgacgctaaaacaaaaaaagaagaagtatcgaaatgaactctcgtctcgtccaaacacagaatcacttagatcagatcgatgacaggtaacatcaatcaaattgcaggtgccgatcaatcaatcaatcaatcacagagctgattccgcaataaggaataagagagtgaaatcgagaagcgataatggcggagagacgtacccatcataatagagaaaacgaggaggtaattgttcttgaatgaattgaaggaagacgaagtgttgatccgatccttgttcgtcttgctaagctccaacgctgccactacggcagccatgactccaaacaccaagtagtagaaaacctccattgttgcttctctctcactctctcagagtaccgagaagaagacgaagaagaagaaaatgtcacggagtggtatgcgcgattgtaccaaaccaattaaggtggaaattatcctctacaacgcgggttcgtacacgtaagcattagtcggtgagtttcactatttcttacatcaataaaaaaattgaagctaaataagatcacattatttatgaattatgtacattcacatggattttgactcaaaaaaactatttttaaaggaaacttttgaatattaagtattaatcaaaatctaaatacaatgtaactttagtgaccatttaaattcgatgtataggattaggaaccggtccaaaccaaaagaaaccgatgtttggttatgcagtgactctaagccatcaaagaagctcttgccattgctaaggcaccttcataggtttggtttgcaccaatgaaaccactcatatgcacaaaaacacagcgtggaattgagctttcctctgagagcttctccttttctaaacctctccatgctaatggtaaagctttacggctctcaaacctctctggtgaaaccgaaactgcttgtattctccagttttcgcttctatcatcctgcaccaaccaccacatacacacactcattggcttaaagagaaataaaggttacgacaacatagtaaaattggtgcataaacctggttgtacctggtaaagaacatattttattggaggatcaatcttcatttcttcctcgagctcgaatatatggagtttccactgtcaattgcacataaatcttacaactttgaagactaatcccaccatttcatcaattctaatccctctagcaaattataaccccaaaccacgacgtagatgatatatgtaaaggagctcattttaacttactgggcattgtttactgagcttcataatttctccactggagtctatatcataccgttttgcaagacactccataacaattgaccgagctggtaaccacgatttcgcgtgaaaatgaacacactgtcaaaaggtagaaacacaggtagctttagaatctgcttggttgtattctcgattcatactcaaataggcaggcaaacatattcttgtaccaatcacttctaatgaaacagtgccacttttttatcagatgcaggcaacaattgttataagaattaatagcatctcattaggttgattcattcaaagtagttaccaaacaagttttggcttaggtactagcatttttcctagttgcacctcatttccatgaagaatcagaaccaaatggttttatgtaacagaacgagatatagaagggggaaaaacctccaagaactcagagccagcaagctccattgcccgatgaaaggcttcatcttctttggcactagactgatcaggttcaatccagtctaagttcaatcttccaatcctatgccccaggctagtattgtttacatatcttggaggttggtcagtatcatattgatggataccattgtctaaagcatctactgcctgaaattgtatacaacaagacattagtacattaccttagaaacatgtaaaaaaaacacagtatacgaaagttcaagaactggtctactatctctaacatcaatattgcaatttctttctttcttagcatactcaatttgaaaaaaaaaatgtcagacagagccatatttgccaataaaacaacagattcagcaacttgttcccatcaaacactaaactttcgaaggcatagccaaaaactttagactgttttgtgagcatagtttggatagttcactcaatagataccaaaagaatctagcatcttaataagcaacctttctagagcacgaagcactacctcaatgaagtttttgtacacagctagaaacaatcgaaacacatcaggatgtctctgctcaagttgaagctccttggaaattatttccaatccataatgctacaagacaaaaaatatcagcccaattctcaaattaagcaccaaatcacaagaaagtatcatcctttaccttatagacaagcccagcactactgagtttagtattaaacccaaggccaaacacttcactaaatcctttctggtgatggtcataacgttcactctgaggatcatacacacctccaacatcaagtgccgcatcaagcttctccaaaaccttatataaccacatcacaaaattactaactaatacagagttgatgcaaaatcgcacactcaaaacaaattactgcacaaattcatagctacacacacaaaaattcaagaattttacataaaaatcaaactaaattaaccatttctcgagaatttcgaaaaaaaatccaaaattgaacccaaagaagggaactttgcacacagagaaactcaaatacagggtaaattgaacaaagggtacctgatgatctctggttcggacgatttgagcatcggagaatctattggaacgacgaaggatgaagcaagctaaagcttcgtcgcagtggaatgttccattatgggtcccaacacgtttcgtagagaaactagctcggaagtttgaagaacgtttgagaaacagagaacgattccagattctgctgcaacagagacctcttgacccaaacatggctaagagagagaagaagaagctcttctacaactaaaccctcgacgtcgcgggtttaagcttgacattataacgccgtcgtttcgtcaactttgggatttgataaaacgacgccgtatgtgttttctttgtgaaagactaaaacgacgccgtttgaattttacatttttggaattattttcttagggaatcttctaatagagttgatgatctttggttgacctaccaaatatggttgatcaccacactgaccacagtttggttatcaattatcaaaattctgtttatatcatattaaagtgatttcatgtaccaaatgtattgttttaatcgtgggaccttaagttataatcatagaaaactcaggatcaaatccaaatgacaatacaacaataaaccaatggattatcataattgcataaacactctcacttctggataagtttgttcataacaaattattaacatgacaaaatagtactattaaagtaatgcaacccacattactttggaaagacttcaaaccaaaggaattgagaaatgtggtctataagcaataacatcattgtcttcaaccaaatcaccaaacatattttcatgatcattcctcttctcaaactaatctcgaaaccgcgatcattttaaacccgatcaatgcaggatactaaaaaaaaaaacaaatcttaaaatgtcaacatcataagattgatgatgaaggttaactaacaactacgttttggaacaaagtcgatatattctatgaagacaaggacatgtagagataaaagagtataaataatgatattaccaattaagctttctcttgaacatatcatcaaaacaacaccttatgagcaaatggcttatgttcacctactcatgtctcttctcattttcattaccttcaaatcttcaatctctgtcgtccctgatccaccaacacaaaacctaatcaacagaatctgcaaacaaaccattgatttcaagttctgcaaccaaacaatcacatctcagctagtcagacgacaaacttcaatcaaaacaatcgcgaaactaaccgcagctaaagcttggatcaacgcgatacaaacgctcgataacatcgaagattctcttcttccgaaagcgaaagataaacgagacaaagcagagtttgatgcttgtaggaaagcttataagttggtggatgctcatttagacaacgcgttgaagtatttgtatttacgagattatagattcatgagagcgtatcaagctcttgcacttgtgaatatttccatgtgcaggactagttttttccatccgacgcctatggtttatgcgaattggaacatgaagatgttgacggatatagcgatttatgctggcaagattctttctcctcctcctcctcttacgaagaagagcaagtcgccatgaaagacgtcaattttgaaagttggagctttgtttctcttttattcttattattcaatagaatagtattttttctgaattatttcaaacaaaattccaaaacaattatatacgacaatgttttctttgttatgtagggaaaaatataggctgagtcatttttttctatatatacttgtttcttctctttgtatcattttttatatataaataacaaatttttataaaagaaagacataaatccaaagtcggagcttcgattcttatcattcagtttccaatggtatttgtctgatttattcaaccaaaattcaaaaaattcaatatacaatagtttttggtttggtcatggtcatttgctttggaaggaaaatataggttcagtcactttttacacgtcatttcttttatcataacttttgataaataactatattgactcttttttttgacatacatgagatgcgagtttttttccacaagtaagtcagccatggattatggcctttaaaatttacaagagtgcaaggttcattgaatttgaatctggttgaaccaagtctcaaagctctccaagccaatacttgagtcaaattaaacttcatgaaaacttttccacttcgtgtacgcaagtaagttcaggtttgcatggctatcaatcaaggatttacgactagagtagtagccatggattggagagatgcccttgctgatttttcagaatggaacaataaagtacacagtttttgaataatgtattaatgttttatctgttacaccaatgtaatacatgattccaccaacataacttccaaaatacatttatcaacaacaaatttcaaaatatatcatgcgactgcaaaaattcaggtattgaaaagggtattgtcaatccctctgaacaaacacatcgacatatatattcgaataatatatgaatatattgttgcattgcatgtgtgaagagcatggaacgaatatcccatcaagagaattgacctttctgaatggagtattattttgtttctaattttggaagcgagcgggagcatgttctttggtagggaatttcaagcaattaatcccaccatgtgtaaatgaactcagacaaaaaaaaaaaaaaaaatacgaacttaattcaatttattataccaacgtaatacatacttcaaccaacataaattccgaaatactttaaaatacaaatggctgcaaatttaaaggacaattattcatatgggtgttgtgaaatagtcagaacaaaacccatttacatatattcgaagcaactacaaaaggattcaagcaactggatagtaagcaaggctggccaaaccacacattccctgaggtgaatctacgtctctcatgattctcatataaccattttctccccaagattctccccatgagttcttcaacaaccaatacttgatgccttcttcgctcaccccataaccaactatagtaactgcatgagtaagctgcgtcccacactctccgttaaatatccctcccgagtagtgtataaactcatatcctgacccttcgatcgccacggaaacaggctgttgagacactgcttttagcaatgcttcctcgtcattttggggaaccgtttcgtatccgctgatggtagcagcagctagatgatttgactcacatgtttgttgtgctccttggtaaggatagttatcctctgtggtgataccttggttttctttaatgtagtcgaaagctttccacattatccctccgccacatccattgttttccgtactacaatccaacagttgctgctcagacagcgatacaagctctccattcgcaatcttcgtcatgccttccactgctgccaccgccgagaaagcccagcaacatcctgttccattttagtaatctttatttttagtttctacgagacgagaatatatattactgaataagttaacatggacatttaggctaatgatgtatattagtgtcgtagtgtcccattaatgtgttatcaacatctagattcaagtattacagtatatatgtatgttactaaaaaaagactagagtaatgataattaataaattaccacattgttgttggtgcttaacggatgtaacagccccttcctgtatccaatccatgctctcaccggtttcaccaacgttttcatatctaaacgataccgtttcatgagaatcagttgttgaaattctggtcataccttcgggcaccaccagccccgtgtacctcgccttaaattcctcgtcggtgagatcagagaactcgttaacatccaacgtgtacgttttgttcgtattcatattgatgctctcgacaaactttaagttattcgtaaagatctcgaacctactcgttttctcagaatcgtctgagtacacgcgattgaatcgagacatccattgctcatgtttctctacggcagaagcttcaaagagcccgccacgagatgtgactcctgaagttctggaactcaaaagaatggctagaagaaagaaaacgatcgaagtcatttgatactagagagaaaatgtaatatgaaatgtttaggtttatatgactttggtgccaagaaacgactatgagaaggtggtgctatatagagtttctgaagtggtgcgtatacgtagttgcatgttttatgtttgaatagtcagtctaacaaggttttgataatcgtctcattgctaatttttctacacgctatgaagtcaagtaaagggccaactaacacaattttgagggtcccattagcgcaatatctgcaaacgttttttggggtctaacagtaaatatgggatcctaaagatttcgaacttaagatttgtcaaatttattcggattgttgtgcctaggtatttatcggagggtgagcttacacattaactttttttcttatcggaactcataataaccagaaagtctgaaactgatattctaaagattgttgtagaggttttaagaagtgttaattgtatcttctgttgtcatatgttgatatgttttttttttttttttcacaagtttccataatttttggagaaatgattagcaaggaatacttatctagacattaattatcttgccttgttgagataacaacatttttttttttttttggtgtttttcaagggacatggcagaaatgcccaaaagcaccttcaaattaaacacgaaaaactatgttgaaacagagttttcaaacagacatgagttgtgtttagaactgtttgtatggctgtcgaagaaacgacaagatttttttccgaatatgtatcgttgcatgtgtgaatagctcggaacgaagaagagaattcgaattgagttaaggtatggttggttggatacctcgtttaatcatgtgttgtcctatgttatgtgtttcatatgttacttgctttccactttaaaacaaaaatattctagtttccttagatatttcaaacatgacagtttccacttcacattaaaatatttggggaaattaaatctgaaggagttctacgaaaaaatttgtccgtatacacctttttttggagaatgccaatttggaccaaaatacccctactcgatattttaaacatttttgaaaaaatttaacgttgataacatgtagatctacaaatatatagttgatttgtaaaaaaaaaattgttatttaattgaaaaagttgattttttttatagataaagttttgtctaaatttcttaaaagacgatttctaatgatctacttagtttagaatttctattctaatattgtgtacatattctacgatatttagactatttttctttctaacaatcttagaaaataggatatttaatatctaaaaattgtcgaacatgtattctaaaattttcttcatgttctaaactatgtgtgaaattgtattctaaaaatttctatagtttctgaaaacggtagaaaacgttttctaataaattttcacttttagaatttatattctaatcaaatttagaattttgtttctaaactatttagaattcctagatatagaaagtgaatctttgaaaaaggtaagtaaatatttattaaatattacattttaatagtatattttctgttaagattacgatttttactggatttagaaaataaattctaatttttttagaatacaaaaaaaaaacgcccaaaaataaattgtaaacaaacgatttgtgccctactcaatttgtggcctattattgatctcttcttcttcacgttcttccttttccatctcgcgttcttttttcattatgcatatctatgtgaggagtggtatgtggagattgtagaggagaaatttgagagtcagagttggtctttttttagggtttgaaaacctctatttcaaacaaaaggtttcaaaataggaaaatatatcagaattttgtaaatatattaggacatttttatttttttattaatataatttcgaaaagttaagggtaaattggattagaaaatcttaagaaaatctatttgactaatctacaaaaaaaaaaggaatagatggacaatttattttgtagatatcctttagatttaattttcccaaaatattttagtctccttaaaaaattccaaacattatacagagactgaaactcataaagcctagaatattctaagcaaaccccaagttatgtatacagtcggtaccgtgacaagcggaaagcaatgatacctaaagtatgaggttccaagaatttgaatagaaccaaaataccctatatgtaatacttgaattgtggactccaaacttgtcttcctcaaaccaaaataaaaagaattaattgaagtcaactttacatgaaacatacttttattagattcagttgagaactttttttttttcttgtgtgattctttacgtttgactggagatgatatagagtcgttcgttttctcaaagttttcaaagttagaaaacaaaacaaaaatcgtcgaatttgaaccctagattatgcctatacatacataatccattaatctacatacctgttttgtaatcagaccggttgggcctaaacaatccttggacttggcttaatacgttaatgattttataagttgtaacattgctttttttaacaacaagtaatactataccagaagcgttcatacggtcaactcaacatgtctttttttttctttctctctaaccatattgtatacatacagtagtttgaccgggtttagattctccactccggtttaatattccaagtgactcccggaaagtaaaaaaactttgcagagctttgtttccatatgcatattttttccagtgtatatcctgatttctcaagtaaagaatcttccctgtataatttagaaaaccctcctcaaccttttcacattcttcacaacacacacacatacactttattttaattaaattacacacacctctctgttcaccactctttccaatctctctagcctcattccatatcggcaaggattcagatagagctcacggcccaattcgagcctgcacgaaactggggacttccccaagaatccaccattttaaactagtcgcaggatccacaaatcccgcggaataatatagagataaatatttatgagaatgaatgttcaatcttggtgtgtagagtaacaacgaggtcatgtgcatcatcaaggagcttccacacatctaactgccctgccatactttggcactcccttaaaatctcatccatgctgttatacctttctataatacgtttccttctttgcaacaccgaggccgctattgcatagagcaccaaatcatcagtgggaggtgcacgttgccttatcctactccacgcggattttcccatcccggctctgattgcggcttgatctgcccacattacttcccatagacacaatgtctgatcaagtgtcagctctcgtctgaacatcacaacaaccattctgtatacaaagaaacagtcttcagcttggagtttctcaaggtgcctataaagctgagagtctttagatttgattatctttgagactatgttgagttgtcttctgattccaacctcgtcaagtctgaaattgtgacgagctttcttcatgaacccgacgaaacaccaaaagacttcatggtcatcagggattacagagagtataggagagagaagatcactcattccttggcaatatccaatgtcagggtcatacaaagcataagcttcaagaacagcaactagccgtgcagcttgaaagattttgtacggttccaggtgattgtaatctttcaacccaaccgcctcagcggcacgacatgctctatcctccgatataactgcctgggatggagaataggaggtccactctgagtcagcacgcacggcgtctagacggataatacgctgccacgtcacaaaatcctcttctgtccggggaatagatgaactggctggataagtactattcacatccggagtagcagaagattgaaagacctgtaccacttcactctcatctgaagaatctgaatctgatgactcggaattaagtgtagagatagtagcattggtgattcgtcttgaactactaccgtcgtctctctcaactgtacatgaaacctcactcatatacccaatatcttcagtaatgtcttcgtcactagagagagactcacgggcactaacaacttcatcagaacatgaactgtcagtgtcttgaactcgaggccaatcatactcatcttggatagtttcactgccgttgtataacttacgagtcccgttattgtgtttttgaagccgtttgcactgcctacgtagtctctcatactcctttctgcatttgtaacaaaaccgatgagctaaagaatcgaaaaaagagctataaagtaaaaaaaactatcccccaatatagtaattcaatcagtctatctcacctcctccggtttcttatagtaactctctcttctttagaactattaaaaccatacctgttagtataaaaacaaatcagcaaacataccaaaaagagtgcaacttttcagtttcttctaactaaaccacaactctttcatagaagcaatcgtagctaataggatttagctactagagttttgactgtatacttacaatccaagaaggaatggccacacctctagccgaatgcttggctcaataccctacaaggaaacaagagaaatataaacaatctttaaaatcaacaaccacaaaaatggctgtgactgtgaagttagttccatgaagctgtgactcactctacttcgaactttcttcaacaaatccactcctccattccgcaatctaccgtcaggagtaaaaaacctcttccattgctgaggtctaagtggccttttccttttcctccgagaccatggtgatttaagacgaggcctgcaacaaaatgaaacagaggttaaaaatgtgcctacttgatttcaacaagaccaaaatagaaaacaaaacatccagaaatagccttgaaagctttaaatgtacagattcagctaaactctaattaattatctaagattcgatgattatgaaagtctaacaaagtcaattaaatagattcgagatcttaagaatctaatttcaaacaatggagatctaatagactaaccgatcagaacaagaagcaggagatgaagaagcaacaacgaagagagcagaacgtatttggatccacgaggatgatgatgaagaagaaggaggagacgataatggcgatgaaggattagaagacgaagacgtcgtttgaatccgtctcaaagctttcatctatgttcctaacaatctaaaaacctcttcctctcctcagattaaaacctaatcaaacgatttcaccaaccaataacttgaactagacgataacttcaaatgtccggcgatatccgccgtcaatattaactttccgacaccgtcttcgccggagaccgatcaagaaaatgaaaatttgaaaaaaatctcctgccgcgtctggtcttcttcttctacaccacttgcttccttgcttccttgcttcttcttcgtttcgtttactttttgcttttctcttttgtctctgtagaaacgtgtgggcttacttgtaattttctctatctctttgagaatcttaatgaccaaaaaaaaaaagtcttcagagaaaaatggtggtgactggagagaggcttttaatggtgagaaaccttaaaatttacactttagtcctgtttctttcactaatatttttaatttaccccgatagatattatttagttgtttcagacttatatttttagtcattgtatctcaccgattcttttattgttttaagtatttttttgaccattacataatcagaattatttttgttgcgaaatatggtaatttgtaataatgtatttgttatttattttattcagttagaagaaaatttaaaacattgcaaaatttataaatagtgtagtcaaaatttagtgatttaaaatatttacttccttatttcgcatgttatttatgtattagctattaattagttgtttttttgtgtgaaaaagagctattaattatttgttgcatattttctttctttatcaagtttatatagtttaccctctccacatgttgttcccattcagattttgaatccgtattaacatgcagaccaactaaatttaaaaaaatggaaagaaaaatttatgaataacgtaaactatagttcatagaaaacaagttcagtgaattaagataatgttgaattattttcgatgtgtttttttttttgttattgaatatttctatgtttctaggttaatttttgagttaacaatttacccaaaaagaaaatatagcgtcagttgatagtaagtcgtacctaaatacaccattatttactgtgtatgagttaaatgttttaaaaaataaaattggtcgaatggatacaacgatctagtgataatggcttccaccgagtgagatgaaataattcccatgttttcaaccgaccaaatcaagcaaaagaaacatatttatatttcttggtataaattatattattgttgtttaggaatcgacctacatagcagttttgttcatatatgttagtatatttgataatacaactaaacaaatctgtaatcatgaaaacaaaaaatctgtagacaacaatgactatattggttctacgctgtgattattaattagctataacaatttcttatcttttcaaataaaattttgctttacgagtctcccgtttatggtaataatttgtcttattcaattgaaacagttagggattatgccatatttacattaatttataactaaaataaatgggtcgattacgctattatttatcaaatgcaaagataggtttatttattaagctgagtgatatgactcgtcaaccacttggattaggtttgggaatatcccagatgcaaagtatcacaaatcatgcgtctgttctggtatataccttacgtacaaatgttggatccggttttagtttcgtaccttttttttgtctgtggattctagaagtatttaaccaaaatgactttggaaaatgaaactagaatagagtttattgtgttatttatttaatttgacatggtttggctttgaatgaaataaattgattcactaaaaaaaaaagagtttaacaatcgttctctgagtctcttcttccgatctagtgtggtcaacaaaaacagacgcgtatatatctttgtcaaacaaaatacttcaaatttggtaaagcaaaaaatgtgattgtttggaagttactatcaaccacataactatcaatgtgtagattcttgtagcgttaatttattatatttctatcattgaagataaagacattttggttaaactaaattgaaatgactaaaaccgaaattagaaaagctaatatttgatttaatttgtctgacctcttcgaccatcttttattttttgtataatactttattatacatctcgttcgtcatccaaccggcaaatggatgttgatatgttcttaaattataacctttggaattatattaagcctttattatcattatcttctaggggggagtcatcaaaatctacacaaattgtctcaattgtaacaatgattccatttaacaagagtgcaggctgcactaattaatatttggtttaacaaatatatccaacagctacacgaatattttttatattttttttgtatttaaatatcaatgttagaaaaatctacaaagttaaaattttgattatataatacttaaaatgttttataatgcaaatgaaaagaacttccacaagcttaatgactactataataatataaatgattttaaatcctgaaaacagatattatttgggtttcacaaaaaaaggcatgttaatcaatataccattttgttggaagaaaagattaaaacaaaatagaaaggcatgttaatttatttttgttgtgtcatgtatttgtcaataattcgtcgataaaactaatacatttttttaatacatagatatgtatactgcgatggatccatcatgtgaattagattcgtgttctcgcttttgtctgctcatgtctttcatgatgtagacacaatcatggtgtctgacataagatgtccatatgacccataacccttctttagctatatgttatgtacattaataattgcacttacttgatctatttttgagttttgcatcatttgttgataaactatataaactttacaaaccaactcaaaacaaacatggcctcatggaaaatgaaaccaaggctgaatattggtagatatctagattaatgtttactttgatctaattttctggttcttctttactctcaattcgaaatttttctcgtccatctccaccaaataaccaattacttttgaggattatttttttcctctttcaatgttgatcatgttggataaacatcttccaccaaataaccaattactttttaagaaaaaaaaaacataagagaaaacttgtaaaccaaagtcaccaagatcaatatcacaatatggtgttgctacacaacataacaagtaattaagcaatacacggtttacaaaacaccaaaccatacgacttagtgagacaaaaacataaacgtttaaatcaaaggatggagcaccagccatgagggagtttagacgcagcagcttggtcaaggaaccaaaccacttcaacatccgcggttagtctaccagctggtaagtctttggtatgattaagagcagccgcaaccgaatcagcctgctctttatcacatacggccataacattataggaagcacaattgataaccggtaaagtcaatgtgatcctttttgacggtggcttaggtgaatcggttatagatgtgacccatttcaccttctcattgatctgagcatgtccagggaatagagacgccatgtgaccgtccggtcccatacctagaagctgaagatcgaactgtggaaaaccagaagatttgtacgttcggattatgttttggttcactttttgtttgaggcactcctcgtacctttcagctgctagctcggcgttgccttctgccccgagtccgttatcgatagcgtagatgttttcagctggaactggaacctgaatggtgggtgttttatattgtcatgaatgcaaactttgatactatatatggtacgtagctcataatttaacaatagaattgcattattttttgaataaagttacttgttaagcatctctaatcattttgagagatagaatttgggaatataaaacagaattttcctttgctaattaaatagttgtttttaacgtatacatgtttaccttggagagaaaaccatcgtaagcgagtttatagttgctatccgcatgatcccaagcacaaaccctctcgtcgacccaaaagatgtgccacttagaccactcaattgaatcaatataaggagcttctaacaatttcctataaaacaaaaatgaaaactataaattttagaagaatcaaacgaattatagattggtattgattattgataagagagttatgtatataaatcttgaaacagaccagagccaggctatgaggtcgccgccggagagaacaacggtgaaaactcctctttctttgcaaaatttggaggaaagatcagccgtgtatttggccagctccactgccatttcattatttgtcttgaacaccctcctcttcaccggtgccatctaattcgatgaagatgataatgatactttttgtgatgctgatgatgttggtatcgtacaagtggaggagacttgcttcttaaagggaaagtgagtgaaggattctttccaagtgaatgagacaaaaaaatctgttttcttctaagaaagaatatgattttctataaaactacatcttgatttgttttttggaagattagtatctaaatgtatcttatacctttcttctgtttgtagtttactcattacaaccttttattattcctttcgtcgttatggatttattctacataacactatatcttccgaaacaaaatcaaaattttaaaggaagataatgataataattaattctcgaattagcacaaaagttttattgtatctagacctcgatttattaataactccaataccatatgcttagaggaaacaaaagcagaaccgaaccacaacaaactcatctaattctttctatacaaaccggaatttcaatacaataaaaaaacatcttctttttgtttgtttggtttagaattggttcctctgaaaacaaaatgcttaatacaaaaagaggtaccttttttttcagtcgatgtttttgtcttgaatcgacagtataataatgagattcatgttttaatgattagggtttgatttgcaaagttaggagtcatctcattggtctcgagctcgagcttcgaacagtcacaccgtgcaagaacttggcgtaacctaagaaattcagcttcccatctaaactacggatccaatccttgagcagaggatacgcatttggtcccaaactcatctcctacatattccataataacccataattgatgcaaaagatgtcgttttcacatatctaagagatataaatattgaagtctctacatacctcggcgagttcttggaccgaaatggctcggcttccttcactttcaaagtgttcaaaggctaccgttgcgatctgttcccattcttcaagagcctcaagttgataaacgctgactgaagccgcacaaaactcttcaaaatcaagtttcttatgtgccaatggttgcatcttcaatgaacaaaaaggaaacacacagaagaaaagagtattacagatgtattttagcaccgactagaaatgatgggacttaaaaagatgtgttagtacgtaccatgtttaatatgtcaggaagtctagattcgatcatagcatccgtagcatatcttgtcagagcctgcatttaccacaagattttgtttgatcatcaattgaagaacagtggcattagaagttattgttaaacaaggaacgatgaaatgtggtaatcatccactgaccgtggtgaaattgtgaagatgcaagcctccatcttctggctccaagagcataaactgtgctttaaggaacacgagttcctcttcgggtatagctttggatagagactgttgtacaagtgacagcaaaattaagatacatacaagacatatagatgatcaaatctatcaagaacaaaagctaggatcaaacaaacagaggaagtattttgtcatgtgtgtctattcttttaccttttgcatgaaaattgtgatcaaaatcctaagaaaatcttgacaagatgaaaagcagacaattaccttaagtgctgctcttcggaaaggcgatgcacgaatataagacttcaccaatttgtagatagagaaatccagaagtaaaccaggattttcatctcgaagccatggatgagctgcaaaattattaatcatactcatgttttcatttcaccaatcaatgtcactagttttaacaatagtggttataaacttacctaaagcttgagcagctgtcattcttttcctatggtctttattcaaaagccttttcacaaagtctttggcaataggagatattgaaggccacggcaaatcgtcgaaattcgggttcgctctaagcacacaacgaaaaattgcagactcggttcttccgtaaaaaggtctacttccacagagtaatatgtaagatatgacaccaatgctccatatatctgcttcggtgctataggatctgtgaagtacttcaggtgcaacatagtatgcacttcctaccacatcgttgagacgctgatctagttaaagcccaacataaaaaaaaaaaaaaacattccatccttagtcttctaagtaaaatactacaagcagagtcatgtataagaaagaggaacaaagaattaccaaatctagcgtaatcagacaagccaaaatctataaccttgagtactgcatcctcatttttgcttgtaaagagaaaattctggatacaacagtatggcatttgttcaagacagaagcaacaactacttatgatattcacattggtagaagaacaatgtgtgtacctccggtttcagatcacggtgcacaacaccttgaagatggaaaaaagcagttgcagataaaatctgtacaagaatacgcttagcttctgcttccggatatcgaccacctctacagtaagatatagacatcacagaatcatcctccatatatatgcaacacaaagttacctctttaacctaagtatgccaaaattcaaggtggaaaacagaaaaaggactagttttgattttacctcgccaaaatactgtccaatagctctccaccttcacataacctggaatcatattggagtcaatatcttaaggtcatctcaattcctaaactttctcctaccactggtactattagaactatacttttttttttcctataacagaggcaatggtccaaatctaaacacaaggagattataaataaaacaacttttgatatataagaagcatgaaagagacatacttactccataacaacaaagacattatccgaatcctcaaacacatcatagaacttaaccatgtgactatgcccagacaaagctttcaacaacttcacctctcgacgaacatcttcaatcgacaaagctgatgtcatctgaaaacacattgtatcaacacaaagaacaaatctttcgaatgaaacagtaaccatttctatgttccaataatcttggaaccaatcacattgtaacaaaccttagatttagagatgattttgactgcaactgtttgacctttgatcttccctttcttagctttagcccaacaagtatgaccaaaatgccctcgacctacttctctcccaagctcatacttaccttcaaaattcttcgcaaatccgaaatttttatctaacctttctccgattccgccgccgcttccgccggcttcactatcctcagggatcggaccatcccgaggatgtggtgctgtacctcgtcgccgtcttaaagccgccataatcggtttcgcaggtgaaggaggcgggaatggccatttgaattttcttcccggagttctcgccggagatggagctactcccgccggtaacgggctttgaaatgggctgatgttgtaagggttgacttctgaagtagccggagactggggaattgatgatgatgatgaagtctggtggtggttttggtgtgaccgatgtggtaactgagcggttgcggaggggatttcgtcgtcgtcgtcgacggtggaaatgttccggctgtaacagtggcccattgttgccggtcaaagttttaattgatcggggaaaaaaaagtcaaactatcggacggtgaggagacggagttgaatagtagcttaacgagagaaacgaccgatgagaaaaattagagaaaaaaaggaaagcgaatatttaaaaatttaattaaattgactaacaaagatttttttgttaaacaaaaatataacggaagaagagacgggcgttgaataatggcggtgatttgctaaaagggaaataagccaaaaaaaaccatcatttaatcgtttaatacttgtagttttaaatttggaataaaaatatctcatttattttttgttgttttttaaaaccatcatatttttaattttggtaatttcgaacctggtacttaacagcggtcaatgaacataacggaattatttgacagtgttaaattttaaccttacgtattttaattatataataacaggtttacaaaaagttttgtttatattatcttgctatagtggtaacgcacagtttgagtaatcccaatttctcggttcgagtccacatcccactcctattaatttttattttttatttttctgattcacttcgtcttcttcacgggtttttttttatctccagtaattgattttatttttcaactctcatcatttatggttatggtgatggagagagatgtgattgaccgggggaaagacgaagaaagagttagggattttggttaaatgatatagattgatggggaagtgaagcaattgagggattttgacgaggaggaagtagcagcaggagatgaaatcgcaattgaaatatgagaaaatttagggtttttggtgaattgaaggaatctttgaggagagtgtgagatttgtgttggttttgtgaaaaaggggattttaatctctttggccccttttggttgaatcaatttttgaaaaaccctcacttattctcactacccctctccttcctaacctatttgaaatacaattttacccttctcctttacttttttttaattttctatttaatttttgctaccaaataatttattaaaatcaaccaatcatatgcattctctctcttatctcattaatcatttaaatctacaaaaaatgctggacaactgaaaccaataggcacaactatgttgatggacttctacgaaaacatataattacataccattcttttttctttttgattttcaagttataatcaaaaagactccagtcatacgcattgcttataatggatactattaaattttttgtcgtatttatacaaattaatatgttttgtattggtacaactaagtacaactcgcacaactaaggtctattcacttggctagttttcagaatattataaaatataaaaatttaaaacaaaactaagaaaacttaaataatgcatacacaatggtaatgaaattacataattagtttttgacaaaaatcatattttctaaattaatgaaactcttatcacaaaatctaacattcatacactaacaagcttataatttcatggttactttgtatattttaacaaaacaaattaaaaattttaaatacttgtatttagataaatataaatacaccgatacaaagtaatggtattttgatgggggaataccatatgttccacccataaaaattagttttgagttgataacaactagatttattatattctcgatattgtacaactatgagcaaaaatgtgcaaccgagtacaactgtacaactatgggcaatatatttttcagatatttatagatattttttagatatttgtagataatttataataaaaattagctttatttttttgtcataaaaatatttagttttttttttgtcatcaaaaatacttaattttatagttaaataaactattttttttcctttcaaacttttttttccttttcaaaacactgttgtttaataaaataaaatactaacattcataaattttttgtgttttgttttggatcaaaatacgttgatgtgtagattcatatttattttggagtttttttttgacaaaaaatcttagattcatacataaactcagatgcatagttgtacatgagcgtaccaattgtacctaaacgcttagatctattatcttaaaacaaaaagacagccgaacaattgtatctaaacgcaaaaacccaacataattatatctaaaaatttagccacaattatacctaaaaccaaaaacacaacattatctaaagactcaaacaagaagccttcttcttctctttgtcattcttcttctcaatttctttcttcttcttcccttttcttctagtttttatcacaaactatctctaaggaacaaaattcaaattcattcgaatcccaattgtaatcctaaaaactaagtcataatggctattagaagaggcttttaagggacaatttcgattttaaatcgatcattaattcaaatttgaattgtaatcataaaaatccaaattataatcaaaatttcatccaaaatccatcattttcaaacaaaatcaaagagaaaaaagatcaaactatcaaatctaataaaaaataaaaccctaattaaacacaacaccatcaatcatcatatatagaatagagatggatttttggattgatagaaacaaatgaaaaggtaaaaaagatggatatttagattgatagaaagaatgaaaaggtaaaaaggagacgaaagattatatatggaatagagagaagagagtaaagagaagaagaagaagaaacaaatcaaaaattttgtttttgttgaattgagagaaaaataaattgaagatgaaaaaaaaattgatctgagaaattagattttttttttgttgagaaaaaaatatccaaaattgttatggatctagatccaacatagaggttgggttgtaaataagtgaaaactctagttttacttgtcttttactattattctgaattgaaataaataaataaacatatatttttttataagggggctaactagagaatgtttgaagctgagggggtggactagattaaaatcctgaaaaaggtgaggagataaaggaaaaatcaattgcagggatggtgaagaagatgaagtgaaaaacaaaaaaaaacgaaaaaaaaataactaaatgggaaagaggcggggttcgaacccgcgaactgaggattatcctacattattgttaccaccagaccaagacaacacacacgtaattttctgcaaattcattgtttataaatatcacaacatgtagggttaaaatttaacactgtcaaatgattccgttatggccatcaacgcctgttaagtggtaggttcgaaactaccacaatttaaaagacaatggttttaagagacaataaaaaataagtaaggtatttgtattccaaatttaaaactataggtattaaacggccaaattaaaaataaatgggaattttttcggtttttttccctttgctaaaacgacagcggaggagacgtgacttatacgacagccacatgagcttagtgagttcatttttttgtgttggtggtaattttttgctgaaattaaaaacattacaatgttgtagtaataaaaattggaatcggacttatataaaaataattcaaacgttagaaaatggataggttttgttaataggtcacactcatagctattatgagaaacgcgaaaacatataaattcgacaagtacgacctattaatggtaccaaatggatttaaaccggtttagtggattaataacatttggtataaatcgcattcaaccaccggtttgtctttaattgcggacgtttgaatatgtttgacattgaaatagtcattagtcacgttgttttagcattgaagaaaaagtctaaaattgatcattgtttggtgcatattagaaaaataataaattttgggtcttacataaataaaataaaatatcctttatcgtcaatggtttaatcgtctgtccttaaccgattcggttagttttagtactgaaaatcttcgtgagcattcgttctcttgtcgatgtcgtaccaaaagtaaccatcaccggcaatataaccgtacgattgcggattatcattgtgaaatgacaatcgctttctaaccaatcttaatcttggttcgttgttatctaaacaggtccggtttgatctctgttttggtacgctttgtggtcggcggaacctagccacggttgaggcagtggtagacatgtaatttggaattgaatgggcttgccgtgtgacgaaagaattgccacgtggcgtctggtcgttgagttgttggtggtgtgagtacgtattattatacttatcgatctcgactatcttgaccggttcaacgatagcctgatcggttgacattctccttccggtttcttgataaccgtacccgtttaatctactcggtcttttgtcctctaattcactttcactatgagcttctctttccattgttctccacatctttgatcataaacccaaaaagaagatcggtttgtctattaatatacttaagaaatggaaaaatcggagtttgattttattgaacctgtttagagaaagcatgagagtaggaaatttcgtccccgagcttggtcgtgagttttttccggtgatctagagctagagcctgaatccgaaccaaagcctggacccgttgcaaagtaatgctagttcttctacgaacgttatggcctctcactagggcttgtagtttcacaactccttttagagccctaaccgctgttcttgccttgagttacaagccatcaaaaccaaactcagtttcgtctataaagacaatgttatcattaaaaaccctcaattgggtaacaagacatttttgaaaaaaataaatctgttttaacattcaactttgtgtggtgactatattagttaacatgcaactttgtgagtattgattttaccaggcatcctcggaaagctgtctgaatgagaatagcagccacgtgtctctttaggtagacagacgttcgacagaaaaatacggtttctttggccgccggcgaaacagttttctctgtttcctccgcggcaatcgcgttaatagccgtggaagttgtgtttattcctacgtttattgcacaaggatcagaagaaactttcttaaatagccatcttctttttcttctcttctgcaccaacaaaattattattattctttaacaaaatttatagatttcattaataaaaaatgtaaatcccaaaatttccaagttttaagactttatcaaaaatcaggttttcatgctgataaatattttttctaaagtaagaaaaaaaaaatgtgttttcttggggatatattgaaggaatcttacatgtaaatgctgatgtattttatatagtatgaattaatgaagattaaaaaaaaaaggtaattgagtgtgaagtataccggtcgttggtgtagttcgtcctctacttcttcgacgaggtcgttgtcttgtcgacgatttattcttctagggattaacttctccggcgatcggaaaacattcttaacggccgtgaaccatgagcttccgtcggttttccccatcaagatcgatcaacctcgtctgcttaatgtatgttaattgtataagatacgaaacttatttatataaaatggaattgagttatataagttaaaggaacacacactctcttttatggagaacaagaacctttttgttaccctatatttaattaaaaagttgggaacatgtacatgcatgtatattttcatttttgcatattgcaatggtaagtaaattcattaagaagtgaaactcgaaactcctttctaagtatgatcgtatgtgttcattgttttatttgatagtatgaacgtttcttagttatttttgtatttctacaattggaagcaaaatatgcattgtcatgtaacggccaaatgcaaaacgatcaatcatcatacaatgctttgtatggaaaagcataaaaagaggaaaaatgttggaagaagaagaataatgaagccgaaaatcaaataaaatagtaatagataaagataaagaaaaatgaaaagaggaattatattaggtaggcatgctttgtgtttacaaataagatagctttgtgtcagaaataaatatataattgtaacatgaaagaatgtgtcaatgtggaatgcatctctcgagactgcagaaagttgttccttctcttctttgttctttcgtatacactttcgtgtattcactcttatagcttgattgtttgggatagtgattgagctccacaataagaaagactactaaatttttcttctgaaaaacactaatatatatactctagtttaaaaaatattacaagttgcaaatgtaacagctctttcgtttgagtgttattgagcaaaatctgtaatttttaatatactttatgtaaaaagtaaaatttcgtagtattttggagatattactaaaaaaaatgaaacagagatattatttagagatattatttatttgaccggaaaaaatgataaagcaagataaacatatgatgggaaagatctaacgattgctaagcagaaaaattcaaagaacaaagtaaaatcaaacaagacccgaattcagaaaagagctaactgaaattaagaaataagaacagtgaaatcctttttttttcctagagatataaaatttctccaaatgtcttaaataagtcataaaaatatccaaagggtatttcaacaacaacaaaaataatcaaatttttgtgtgtttggagactaaagaaaggagaaaggtttagaccaaagttgttgagttgttcaaagataccgggcaggctctgcgaccgcgaagcattaacttaaaataaatctagaaagagttttatatataaacacaaaacgcctcaagtaccttcttctttagacttcttcttctgctttctctctctctctctcgtttgctatataattttaagatctccggctagagtttcacttgaactcagcgcggggaaaatgcggccttactggtgtcttcgatggacttacccttcaagaaacagataaatcaacacaaagatgaatgaatacatgtttcccaagaataaagataatagtaatagctaaagagatttaacatatgtagacccgagaaagatgtcacattatatgcaaataaaccagaaataggattaagtaaagagatagccaagtcaatgactaaaacaacaacctaccattcaaaagttgtcattaactaaagttagaaggtaaaatgttgaaatctttaccttattgggagtgcccccaagacaataccgctgcagtgaagcgcagcaattgcgctttccgcctgagagaagcaaaagcaagcatgaatctccagtgacaatccaaaacgaaactttgaatcttgaaccgttttacataaacttcatagttatgtttatgcatctaactctgagaatcagagaagctcaagaagatgttccttaaatggatcatactagcaaaactactcaatcaccaagactaatgtccaaaatgggaacactttaaccaagagaattaccatcgcaaactcaacaaaagcaatacgggtttggtggtgatagtctccaagcctcagacgatgaacctaaaaaagatacataacaaaaaaaaaaatgatgcagagcaaaaaacatatacataatggtcgcattccaaaccaaaatccatacctccccgcaaagcatttcaaagaagcctttcaagtcaatttgagtgatctgaaaatataagcaaaaggacattgaagaaagttagtatctccaatactttagcagttaacagtttccaaaaacagataaattctcatcaaggaaatggtgaatgaaaattgaattacccgcttgtcaatgttggtacagtaaacagtcctaacgcacatctcacgctcatcctcagactaggagaaagagagcaccattatgctcaagaatgcttatacttataaaaattattagtgccaagtttagccattatcatgtgaacttactcgtggaagaaaagtcgggttaacaggagcaatagctgttttggaaggaagaaccttaagagggtaaaaacctagcacagtacccgacatgctcaaagcagctctagctccctctgcatcaacatctcttgattagttaagaaacagtgctataaaaaaatctcaactagtaaacaaagggttgacacaaagagtaccttcattggtaaattcaatgaaagcgaaacgaaggacagaatttggatcaccgcatacacgacaatcaacaacctttcgatcccaaaatgaacaaaaatatgaggaaacgagtcactgcaaataagcaaaatatttcaaacatagtcaagatcgttgaagtacctgtccacagttaataaagacacctgcgaggttctcctctgtaacctacaaacaaaacaaagtaagagaggcagtggttataaaatggattcctttaatgttatcgaaaatagctttccgctttttacctgttggtcgatgtcagagacatatacagttctcctgattacatcatccttctgagccaagcttgtccttttgttcattcttcgcttcccttggccaaaactccttctctgtaacaagaagcacacgaattaccaacagacgattttaatcaatagtacagttttgcatactttcctttcacatatctgacagctaataccattgtttgaactttgaagaatgtcaccacagaaacgatgaaactttctatttaaaacccgaaaaattcaaagctcatacaaagtgtaactgataaggaaaagaaaaaccaaacagtaaacaaatcaaatcaacaacaaactacacacaaagtgaaactggttttgtatcaatgatcaagtgatagatgcaagaacacgtaaagctcgaaacttttttccgttatccatttgctgaacgtataagcatacaagctttcccaatcaacaagcaagctagcaaatcatggtaaacaaaaacacacaaaagctcgaaactttataccatcatttctctcacttcactgtaacatcaaaatactaacggaagattagataaatacaaagatcagaattcacaaactaatgaaaaaaagaacattccattcaccaaaacacatccattttctagagatgcaataacgtctatatactaacaatcaaaacatacaaaataactatatactcaacacaacacaaaaattttacaatcaaaaaaacaaaacaaaacatagagatcataattcagcgagaatgtgaaagaatgatgatatacccttctaggaaaatgatcattcccatcagcaagtttaggtggggctgcaaaattgttagtaaaccctaatccatttctcaaaaccccagattgacttcgagcaagagaaggaggaacaaactcctgagccatcggattaagcttagaaaacgcatcagccaaatctttgatctctccattgttatctctctcaccatttccactaaacccatttaaagtctgaaccttttgagcagtctcattgatccgatcgtcagtttcaggagtcgaatcgatggtaagaggagtggatgagtcagatttagggctttgatcatcatcaggacatggcggctttgtcgtctcggtagctgaagcagcagtgttgttgttgtctaaattctgaccagaagagtccactttgacaccagcattctcagcaacagccatgatcggaccaaaaaaggttgaatctttaaaagatcagacaacaacaagttacgaactcagtcgatttctgcatcaaaacaaccaaactaagaaagagaatttgagaatgagaagaaatggaaaaaaaaaaactcagaatttgatacgaaccttggagagttatctcgatcaaatggttaatccataaacggagagaatcaaagttaattaaaagatcaatgagcagaagagaggactgaaacaaagaaaaattggatttttattttaagggaaaatagttagagaagacaaaaggagaaaacttggaaaattcaaggggatgattagaatagaaggaacacaagagacccctttggttataaaattaaataaacttaagctagttttcttctgccctttggagtttggacaacattaaaattaaataaatcatcatcagaatatttttatctctttttactttatcttctttcttaggaagcttcctacttttcctttttaattaaaacatacatataaatatatatatatatatgcataattatgaacactctattaactgaaagttttaataatattggaaaaatgaaaatttgcaatctaatttttttaatcaatttttaatttaaaatctcaatatttttattttttttatccaaaaaattagaaatgatagatttaatttaataattgattttttattattattaatcaatgttcaaatatgctttctacaaccatataccgaaggggtcctcaaaccagtttcagttgttatcaatggacagatgttactagtagagctaaaccggtagtacaatagttcggtttgatatcagagttgtgttaaaagttaaaactatattgtaaaaccaaacgaaaacatgtactttttaaacgtaataaaaaatacaatgcctctagtttaaataataagtaggttttctctcgtaatctctgttcctttatgttcttgtaagactaacctttagtggggataattttttttagatttagacttatttgttagaagattaagtgattaggttttagattcacgatgatgcttaatatgttcggataatcgtttttagttgagttttgacttcgccgtttcctctatccttgggtttcctccgttggtgagtgaaggtcttctagtccatgacttttgagctcttaactccgcgactattgttcttctctgactttccaatgattttgtgaggtacacctcttgacatttgaaatgttttgtatttcccgtatatcaggcttttgttttcggagatttctctgttttctatcggctctttgtatttcaaaatcgcattccaaaaatttattacaaccatgtatttctcccttgttataaatgaaaatctttaagtgaaaaaaaaaccgtaacaaaaattcttaaaaggttaataaaatatatatatacaccatcgcctatgggacgatgaggaaattcacgagagtacatgttcatgcttatggaccatccttgtatatatatgtaaagtacaagtttacacaaacaataaaatacatgatctacttaatcatttataaataaccatgaagttatcacacaggtgaggctgagagcagaaactcaggctgctttctctgcaagagaactccacagaagaggcagaacggtttcgaggcaactttgctaaaggaagattttggaagtgatttgagatcactcgggaacgaaggcaatgcaaataaggtctctggagcgagttctaaagtcattcggttgcagcatttgcagaaccataaaggagttggtggacatacttgcattgagacacaacacctctcaagcttgtggctttcatcacatctctctttgtctttgctcttcttttttttttggtgcgaagattcgcaaaaggcttcctctgctgagtggaaatttactggcgctgcacaataaggacatttctcttcctctaatgcagtttctgtgctattacttgatctgtgatgaattaaagacacagaacatatgaatttgaaaacattctagtatctattatcaagggaagaagaagaaggtatatgagaaaattacctcgttcgactagattttacttctaaggaaagtgtttccagctgactatggacaatatcacgatttatctcaacccattgttgcaacagagccaatccagctggacgccaattccaagagggaggcgaaatagtaccctgagatgactcagcgagtaaataagccgagaaactgagaccaaccagtctttctcggagttctcgttcactttcttgaagcagtttgagccacagatcaatttctccttcatcgttcgttctctgaccttgcagttttctgttgatttcttctgttttgagttccgataacattacacgtctagagattacgttgagaatgtgtaacagcctggaaggaacatcagagaagcgtttggtgatctttggcacgagatcttccatggagatatcatcatgaaatccaaggtatgacacagagagccatttagttaatactaattcaacaaactctggcattgattgtttgaacgccagcattgcagctaccatatcccaaagaactagaggcttattcaaatagttgaattcttttaacgaccagagaatattggattcccaatttgcgaattcattctttgagaaacccagaatagcttcggttaccgtctctgtagaatcttctgactcaccagattgttgtgcaccattccagaggaattctacagcagccttctgcgacctggaagcaagaaggaatgaacagtcagcttttgtaagaagcaggacgcagaaacacttctcaatgaatgaatgaaaattacctggcttggtacattggattcaagagttcaacgttaaagttgcggacctgcaaaatttcaatgagaagtctaagttttctaattctgaaaagagatagtttaaagtcacagcgaaccaggtttcggggaagatcagaccaaagcaacagcaaggtttccaggtgacaatgccacaccaaggcatgatagaaaatcatcaggaagctgcagaaaattttcattgtttgtaagataaactagaggaagggataaacaaagagacaagattaaaaacatcacatacatcagtcgtgctactgagaccaggagtgtttgcaggaattggcacttcagagatggcattctcacataaaatccagctccggacataattatcctgcatattacaaagagtaatgcatcttaaaagctaagaagaatatgacagttgttgatagatcacaatgtagtttgtttgtctctcagaagacaagcattacaaagctgtttttacagagaagaaatataatacctgactgcaactgtacaaacaacggccatcatatgaccaagctagacctgtaacctaaaaagagtgccatatgtatcaataaatcgaacacgtatattttattttataaaaggtttaaagtaacagaataatgacttaccacttggttatgagcattagttgaaacaatttgttcaaactttcttgtagatatttcacacttccatacttcgaaagaaccagatcctttaccgattgccaagtgcattgcattataatggttgcttacaacaaaagaaagcgttgaaacctgaacaggattcactgctacaacctataaataagccgtaaaatgtcaaaacgcaaaactcttagtgtttgctcgatgataacagcctatacacttgaatagaatgcaattatagagaaaaacagacagatcctgatattttcataaacaaggaaatagatacaaacagagtcaaaagcacaaggatctacagatacaaaacgctatataaatccaacttcacttacagaaaaattacaaaaaggatcacaatcaaaattcaggatgatcttaatcaactcacatatcacagaagctatactcaatctgttcgtaaacagaatatttagaaaaagtagaataaatagagaagaaataaaaacttttacctcttttagtagaaagaatgaagatttatagacctccacagaattttgcaagtcttctttgttgctcatccaaattttcacactgcaggtatgaaaagaaatggactgaaaagtgtgataaaaaaaagattccattgagaagtatatgcaaaagattccaatcactgacgacattttttgttatggttttacaaatatcattttttcttgtaatataacactaacttacctaccatcacaactcccagtaaccaacaccacttgcggattcgaagaatcacagccaaaaattccccaactcattgttgaaacccatgagctatgggtctgaactatagcagtaagttccaccatgggagatacattgctgcgttcaatgtgatagcattcaggtgcatgaactttccatatggaaacgctcccggactttgaaccaattgccaaaagagagaatcttaacatattcccacaagaactttctgatgagaatcttagaagagatgaccaggcaacggaatgggaggataataatgcctcacgagacacatacgtttgcggacttatctcttgactgcatttttttagagctttaggcaaggaacgacgatcttggccattgcttgcctgtttatatacttcaatctcaagtacctgggaatataaggaatcgagttagatatgagtacaatgcgacgatttgattcttactagatgacacttgagagtgggagtgtcaaacttctaagaaccatatggtgtgaacgatgcattaaaggattcaggtggaattcaaaagcatgacaagattcgaaatgcatcaaatcaatgacaagacaatataaaaaccacacacatgttctttctataagaacactggagggaggtacaaaatgtcaaaatctactcaagatactaatttacttgatgaaatgacctagtttcttattaattactaatcctaacaaaaagagtttccacaaaaacaacggataagatacaatctgcaggaacagagttagaatctgaaacttgttacagaatacactacaaagtgaggaacagaaataagttggaggaatcatgatagtattttttcaaagcaatgcactacaacagaaagaagttaagagatatgaggacttacattatgctctgctttactgtcttgcttggaacatgatgctcgatctgtataattcttttcatgcaagttgctaaaacaaagaaagtaagttagtcaagtgatcaaaacagaaaaaagaatatggaaaacaatttctcaaaccactggtatgcatctgacgaaattgaagagtgaaagaaatgctctttacatgttatttgcacttgtttttcttcgcttgcgtgccttcagacttgaaatcctttcatcctcctcatggtcatgttctaccacttgatcctgttataaaagagcacaaatcatttcaataatatagtttggataaaaatattatgcagacaaacatcaacaattccatcaaaacgcaataccttccacaacaacatttgtccattaataaaggataactaaagatataaacgatttgtttagatgcgtctttatctaaatgtgaagagtacgaagtataaactatctacatatcccttataggaaacacatacatatagtttgcgggagtagtaagtcatccttcatggttatcaaacttccactgaaaacactttagagatacaagttaccttagataatgaagtagaaggatttttggactctccaaagttcatgcttgatagattctcataaagcattttagatatatcaacaatctgcgaaagagaggagaaagcaactttaaatgcataggttagttataaaaggcgaaagagaatttacgacctacctcaatccactcagcacagaaatcagaatatggaggtcggtatagcttaacccttccttccgctgtgcaaacagccagtaagcacctgagcagagttatttgaatcacgaatttaggaaatagagaaacaaaacaaaactgaacatgttacaagaaatacagtacccgtggtttggagacattcctatctcagaccatgagagagatcgaacacatggacttctttcccgcttcaaactcgaaggcaagagtccaccagttagcaaatctacaatcacatcatcactcacattgttatccgaaacttctgaatgatcgaaaacacagaaaccaacagaaatttggtctacaaacacacaacttcatgaagaactaaacagttgcaaaagattgaatttttatcttcaaatctgaattggcaaacatacaggcaggattttgaaatttgatctgaattttcataaaacaggtacaccaaaattctgtatttatcaataaaaaaaacagaccttgagagcgaacacgaccaatctgataaagctcggcgtcagagattgtgatcaatccacgagggccagtaggcaaagccggattctgacaattacaaaagtcatcaatacaatttaaaaagactcaaactttaacctcaaaaaacgaagcagaagaaaacttacaatgatgatgactagatgaccagcagcgacggcgatgagattttccgatgaccaagcgacggcgttaggatacgacggtgaagtaaccagtgaagcttcctgaaaccgcgacgccatcaaaaagtgaagatcaacttagaattttggagggaaaataaaacttgctctgctttgcttttgacaacgaaacgaactgatgaagttgattcagtacggaaaccctagttcgaatcgcagtgacgcagatcagatcctcaattatttatttcttcccgagtttaacaaaaagtcaacgtgctcgttttttaaaacggtgtcggttagatgatgggctaagcccaaatccttttgagtccaaatacggagaccagagttcgaagcgcaagtgacggctttataatctctttatttaataaaacgatgtcgtttttgcttaagcaataggcccaaataagtaaaaagttcaaattaagggttttgaaaatattcgccgtcgccgatgtcgggaaaccgaagaatttgaggcaaaaaaaattcgtatttccggtgagtctgaagttcctgaattataaatttccgatctttgttaaattcaccattcgttttcctaactctccgtcggcaaaaggcgacacaatgaagcacatataaaactgaaaatctataggaatatatatacacattataattctctaattgcattggcattggatttatctctttgttttacagaagagagtaatctctggaaagaatcaatgggaattatagaagaaggaacaatctcaggtaccttgccaagcaaggaggcgtttgtagtacacttccctggttacccatcttctatttctcgagctattgaaacacttggaggtatccaaggaattacacaagtaaaatctttcaattttggttttaaagtctcttccttttactgagattgtcttcatatgctagttcatagagtggttttaaagcctatatgttgttacagtcttggtatatgcatccaccagcttttgttaaatttgttgcacgatttattcagtttgagtcttttatttttatatggtaggcaagggaatcaatttcaaataagcttgagctacggtttcggcctgaagatccttatgcacatcctgcattgggagaacaacgtccttgtagtggttttttgttaagaatttctaagcaggatatcaagaaacctgaaagtcagtctgttcttgacactagtagggatgtatgtttagaggaagctagtccagttctatgtgcagatatcgtagctcgtttgtctgaatcgtttcactttgatggtaaaaacttacctctccttttgcttggttcttatgcctctaaaagtgtttcaagatttttccctcttcttcgttgtctaggcatggctgactatcagcatgttattcctattcacgcggacattgcgcagcagaaaaagagaaagtggatggatgtggatccccttacaggtacaagatcaacttcggatattgattttctctttttttccaatttattccagatttcttgtggtgtgctcacctaaactagatcggatatatatgcaggaaaaagtgatttgatgggcctggctgatgaagatgtaatgatgttattgccacagttctttgcacccaaagatataccggacaatgtggcgtaagattacactgcctttttctatttcttattcggtggcataagccatttacttatagttgattacagtgctgatttcaattttcttgtgtgattacaggttgaaacctccggcgacatctggtcccaagaagaaagatgatgcagcgactcagaacttttatgaggtaaaaataaagaaattgaagcatatgagctttctaaataaacaaaacatcttgcggaatagacagttaggaactcatgactttaaatatctaaccttcatcttgcggaaattagagaggtttggcatgaaattagagaacttatatctcaatccttcaaatgcagtagtaaaagatttgaagcatgtaaaaactcttggtttcactctaatgaaccgtcaagaatgcgttctgttcatttttggatttcaaagatgccatgacagcttccttatagtttattttcggttgccatatcctaattgatctatgtcatgactattttcttttatgtgcagattgatgttggcccagtgtttgcaattgatttcagcgtcaaagatatcctttttcttatatgctagttcttcttccaatattctttgacattttcttatctggcgagtagaaagagctgtatttgcttggtctgtccttagctttcaatacagatcccaaagaaactgaagtgggaagactttgtttctcgcagctccaaccactggcaatggcaggtagcagtgtctgcattgtttgaggagcggcctatatggacaagggattctgttgttcaacgactacttgataaaggtcttaaatgtacacatcatatgttaaacaggtgatatagctttctaatacggggttcttatactgaggtgtttttagtactatattgatcaatttggtctctctgcaggtttctgctcagagctgcatattatttctccagtggtccgtttcttaggttctggattaaaagaggctatgatccacggaatgatcctgagtctcgtgtgtaagttctcttttaagacattgatttgtatattcttattgtatggtttgtgacattttttaggtgaaatggtaatacacacagatgggtgcataatgactagttttcacttatatctccattgaataattgtgtttcagatatcagagaatggaattc

SEQ ID NO: 89 - DNA, 104204 bp, Arabidopsis thaliana
aagcttcctgaaaccgcgacgccatcaaaaagtgaagatcaacttagaattttggagggaaaataaaacttgctctgctttgcttttgacaacgaaacgaactgatgaagttgattcagtacggaaaccctagttcgaatcgcagtgacgcagatcagatcctcaattatttatttcttcccgagtttaacaaaaagtcaacgtgctcgttttttaaaacggtgtcggttagatgatgggctaagcccaaatccttttgagtccaaatacggagaccagagttcgaagcgcaagtgacggctttataatctctttatttaataaaacgatgtcgtttttgcttaagcaataggcccaaataagtaaaaagttcaaattaagggttttgaaaatattcgccgtcgccgatgtcgggaaaccgaagaatttgaggcaaaaaaaattcgtatttccggtgagtctgaagttcctgaattataaatttccgatctttgttaaattcaccattcgttttcctaactctccgtcggcaaaaggcgacacaatgaagcacatataaaactgaaaatctataggaatatatatacacattataattctctaattgcattggcattggatttatctctttgttttacagaagagagtaatctctggaaagaatcaatgggaattatagaagaaggaacaatctcaggtaccttgccaagcaaggaggcgtttgtagtacacttccctggttacccatcttctatttctcgagctattgaaacacttggaggtatccaaggaattacacaagtaaaatctttcaattttggttttaaagtctcttccttttactgagattgtcttcatatgctagttcatagagtggttttaaagcctatatgttgttacagtcttggtatatgcatccaccagcttttgttaaatttgttgcacgatttattcagtttgagtcttttatttttatatggtaggcaagggaatcaatttcaaataagcttgagctacggtttcggcctgaagatccttatgcacatcctgcattgggagaacaacgtccttgtagtggttttttgttaagaatttctaagcaggatatcaagaaacctgaaagtcagtctgttcttgacactagtagggatgtatgtttagaggaagctagtccagttctatgtgcagatatcgtagctcgtttgtctgaatcgtttcactttgatggtaaaaacttacctctccttttgcttggttcttatgcctctaaaagtgtttcaagatttttccctcttcttcgttgtctaggcatggctgactatcagcatgttattcctattcacgcggacattgcgcagcagaaaaagagaaagtggatggatgtggatccccttacaggtacaagatcaacttcggatattgattttctctttttttccaatttattccagatttcttgtggtgtgctcacctaaactagatcggatatatatgcaggaaaaagtgatttgatgggcctggctgatgaagatgtaatgatgttattgccacagttctttgcacccaaagatataccggacaatgtggcgtaagattacactgcctttttctatttcttattcggtggcataagccatttacttatagttgattacagtgctgatttcaattttcttgtgtgattacaggttgaaacctccggcgacatctggtcccaagaagaaagatgatgcagcgactcagaacttttatgaggtaaaaataaagaaattgaagcatatgagctttctaaataaacaaaacatcttgcggaatagacagttaggaactcatgactttaaatatctaaccttcatcttgcggaaattagagaggtttggcatgaaattagagaacttatatctcaatccttcaaatgcagtagtaaaagatttgaagcatgtaaaaactcttggtttcactctaatgaaccgtcaagaatgcgttctgttcatttttggatttcaaagatgccatgacagcttccttatagtttattttcggttgccatatcctaattgatctatgtcatgactattttcttttatgtgcagattgatgttggcccagtgtttgcaattgatttcagcgtcaaagatatcctttttcttatatgctagttcttcttccaatattctttgacattttcttatctggcgagtagaaagagctgtatttgcttggtctgtccttagctttcaatacagatcccaaagaaactgaagtgggaagactttgtttctcgcagctccaaccactggcaatggcaggtagcagtgtctgcattgtttgaggagcggcctatatggacaagggattctgttgttcaacgactacttgataaaggtcttaaatgtacacatcatatgttaaacaggtgatatagctttctaatacggggttcttatactgaggtgtttttagtactatattgatcaatttggtctctctgcaggtttctgctcagagctgcatattatttctccagtggtccgtttcttaggttctggattaaaagaggctatgatccacggaatgatcctgagtctcgtgtgtaagttctcttttaagacattgatttgtatattcttattgtatggtttgtgacattttttaggtgaaatggtaatacacacagatgggtgcataatgactagttttcacttatatctccattgaataattgtgtttcagatatcagagaatggaattcagggttcctcctgaattacgaggttattgtgatgccaatgcaactaacaagtaagtctttttctatttctgtggttaactcttcctgtatgactgacacagcctcctggagatttaagcctgaatactctctatagcattctatggtacttgttgtaggattgtataatagattaagcgtgatttgttttgcagctgaaccattggatttatgcaggaaaaagtccgatttatatgttttttcttttctttgctacagctcaaagccaagctggaacgacatttgtgcttttaagttatttccttttaaatgccaaacgtttctgcagttgtttgaacttgacgacgagtacatccagcgagagataagaaagcctcccaagcaaactacttgtagtgtgagttctcagcttagtttttcatgaaatcaatacccatgaatcatggtcttttgcctgttgaattaaagcttaagctcagacaaagtgtcgcatctacgccaataaataaactttggcaagtactcttcaagcttatgatctgattcgtttcttgtttgcagcataaatcaggatggttttcagaagccatgcttgatactttgagactccgtgtagctgtgaggtttgtgtctgtgtttcctgagacaggtttcgaagatgtatttaaatccatccaagaagaatttgagagatcagaaaaagtacaaattcagaaagagacacttaaaccatctttagtgaagcaccgggaggcaactaaaggtaagatcatcaacaaaattgtgtgtatatctcttttagcgtttaggaagtctagtgagtgctttttgatgtgcgttcagcatattccctaatctctagtgtgttagacccttattcctttgcgtttgtcgagtattttccggagtcatcaaatctttaacagaaacttgagcctcaaaacctaagtgaaattgacaggaaaaattggctgcttatacagcataagttatactgctctacgagatgtacataaatatatatgagataaaaaaaattgtgtaataaatattctgcaatgagctaaactaattttgatacgtatcatgtgttatgcttattgtcataagtcaatgaacatgtttccttgaatattctgaagtagcagttactgaacagttcgtttaatctgcaggctctgaagatatggaaacgtttaaaagcgtaaacgaaaatgttgatgctaatgttaatgaggatggagaagatgaaaacctggatgacgaagatgaagatgaagaagaagaagaagaactcgatatggtaatattactgttaaaggaaagttttgttgttttcttcattcgctaggattcacaccgtttctctgctcctcttcttttgcaggctgcaggagacaatgagatatctcttgattcccatggatgtatccttcaaagtttagcgttttcttgcattgcaggaattaagaccgagaaattaagctgtgtgtttggttctaacacccttttgacactctgtttcgtttaaattttcctatacaatgataagatcttgatactgagaacagctccaggacgtaccttcaaggcttgtttgatagttttccatcgagtgaacctaatttatatggagactttgctgttgatgatgggagtgatggagagtttcagatatacgaggaagaatctgagggattgtattccattgatgatgaccacaatgatgacgatgaagaagaggatgatgatgattagtgatgagtaaagatcactagtccacaccacaggtactgtttcttgtcatttccattacttaatcaaattgatgatgtaaaatgcaatctagttgattcatcttggagcattttggtgtgttagtttgttgatatagtctcgtgattggtaattttcacattactttcttttgttatgtttcaggtgaagttagatgaatcttcgtccagatttatgaaattggttgtaaattgccacggaatgttgaaaatgtaaagttttattttttgggttaattatataggttacacctcaattttggaaactaattcaagagaacaattgtttcttttcacaaaaactcattgtaaccattacgcattggggaaaatgtcattaaaatcttcaacttatgactggttctatttgaccaaaaacaaaaacttagaggttatattgagaaacagattgcttaaagagggaccgaaaaataaaaacactaaagaactgaatgaatcaacttaagggtagttccggtaattcactaaaggataaagtagaaaccctagtttgaattttcacggccgacctctctctcatcctccgagtattgttggcttcagaccaaatcttctccggcgctgcggcgtttcccccggtacggagtcattcacctctctcttttctctctcgcgctccctctctctctctctctctatctctggctctttttgattgtacaagtattgttaggattatacgtttgattctgtatgtagcatctgtctagtcgacgtcaaatcgatattatgtttccaaatattgattggttaccaaaactgatacgagaatattgaatctctatgggctatgtatgtatatcagagtcatggctaagccatgggcacattttgtaaacactaatgttgtagtttcaactttcaatggtctaattgctgaacttcgacatgtttttaccatggcagcaaaaggtagaagtagctgattacaggaacaatgatgtcctttgaaatgaatgaccggaaaagtaagttcacattgtgagttctataaatattttctgctattggaagacatacctgttacttagttatacttaattcttcttttgcttatcacgttcttgagttagtagatcattcaatgtcatgttgttgttcggaaccccatttagtttcagtatatcttattaccaggttacgaagttactcatgctgtacttggatatacttaaacgtttcttatgtgatttgaaacagaaatcgggttaggcctgacaggatttggcgtattcttctcgtttttgggaatagtcttcgtctttgataagggattacttgccatgggaaatgtaagtatctcatgtatctttgtttctatactttgaccactattattgcatacacgtacagaactagtatgagagcttgtttcttttcatattttctcagattcttttcatctcgggggttagtctaaccattggcttcaagtctaccatgcagttcttcatgaagcgtcaaaattataaggtttgtttctgtctttgtctacattatcaatagcttgggccagtctctgctggatttttacagatttctacttaatgtcatctatgtgtgttcatttggctttatatgttatccactcagggaaccatctcttttggcgtcggtttcttctttgttatcatcgggtggcctatcttgggaatgatgttggagacctatggctttttcgtactcttcaggtacttttgcctattttcttcttctttactggtattgcttgaggaaatgtaaactgatactaaaaacgttttgcttttgcagtggcttctggcctaccttggcagtctttgctcagaagatacccgttctgggttggattattcagcaaccatatattagatcggtatgtgtccaattgcaaacaactatagcaaactttgcatgaaattcttagatctcgaatacaacacatacaaaactcataatgactcccagttttgcctttccaaattacagttgataattctctctttgtttctgatgatcttgagttgctaggccttttctcagtttggcttaactttaatagtaattctgttgcatagtctgccaattgttggctaatgcgattactttacactttttttttatgtgatgtgtagttctttgacaagtaccggggcaagcgagtgccggtctagtcttccatcccgagcagagagacgattcactgagctagatgcagctgaacaggcgattaaagtttttggaagaagaagtttcgtgatcctgtagaaaactaaaaccataggagaaagaaaataggaaggaaaagaacgtacaatttgaagctgtgtgtctatgtttcaggtgaagtagatgaatcttcgtccaggttgcaaattgcaacagaatgttaaaaatgtaatgttttatttttgggttagttataggttacacctcaattttggaaactaattaaagagaaacaattgtttctattcacaaaaactttttgtaaccattacgcattacataattttaatcatattgttattaacttaatggttctatttgaccaaaaacaaaaacttagaggttatttgacaaacagattacttaaagagggaccgaaaaataaaaacacaaaagaactgagtgaatcaactaaagggtaattccggtatttcaggaaagttttaaggacgacccctactaatggataaagtagaaaccctagtttgaattttcacggccgacctctctctctcatctactaagctctcctccgagtattgttggcttcagaccaaatcttctccggcgctgtagcgtttcccccggtacggattcattcacctctctctctctatcgctctccctctctctatctctatctatctgttgttttctctgaatttggtttccgtgttcttatgaattcgatggtttggtgtttcaatttcgttaatttcactgataattgttggtcttttggctctcttgaggtgaatatacttcgctatggtcgtgggggtagtttccttgacttcaattagcttttttatgtcgaatgttcttgagttgtttaaggtgatttttgattaaattcagaaggtcttatgtttgttagaatctgtcttttattcattgtccttactgaggaaatttttttacttgcattgaaaagaaacataatttaccaagaggttctatgtaacgatgatttgtgggtcgatctgtattttaaatagtcgttaaaagtagaatttttgttgtatgtttgaaaggaataatggtttgagtaaggaagaagaacaaggtagatgcatgagtctatgttacatgatgtcatgacacatgctttctttatgatagatggcaagagcttggaacatgagcattgcaatggttcatagggatatagagagggattggggagatcaatgtggatattgtttttattattaatggagattcatgggaacgatctggagaaatatatatatttcaatattttaaatagcttttggagcatattggagcaaataagcatttggagcttgtggagcactgctctgacccaggattgctctcacttggtttgcttcatatatattttggtcttaccatgttttctttttcttttcttatcatcgtctcattttgatgctggggctatgtcgaaagctgtttgagtggaggttctttgtctatagcagtaaattttgatcctttatttatttcgtttcctttttattctcatgtgcagtttcccctttttaacctttgcaaacaatgagtgggcgattttctcggtcaatctatgttggtaacttgcccggtgacattagggaacatgagattgaagatatcttttacaaggtcagtttttggttatttgtttgattcagttacgggtcctctcttgaatcgttatccctataagacagtgaagattcttgagcatcttttgtattcatatttaatgctcttgtttgcagtatggccgcattgtcgatattgaattgaaggttccacctcggcctccatgttattgctttgttgaggtaagtgtattcgcttacattacatgttcctaaccaactttaaatttcgctgaaccaagctctgttgaatgtttgtagtttgagcattctcgggatgctgaagatgccatcaagggccgtgatggctataatttggatggctgtcgcttgagggtaatcagttacttccttgctattttttcagcagacaatatgggcttatgcttcacatatccttacagcagagtctaaacttttctggctgttttacattaccttgtgatgtttctttttatttttcaatagtttctaatcattatgaatgcaggttgagcttgcacatggtggtcgaggacagtcttcaagtgatcgtcgtggtggctacggtggtggtggcagcggctatggtggtggaggtggtggtggtggatcagctcggtttggcgtctcacgacactctgaattccgaggtttgtgtttcttgctagaagttggtattattaaaatttggtttcacttcacttcttctgattcttggatggctattttgcagttattgtacgtgggctcccatcatctgcttcatggcaagatttgaaggtctgatgacacttaatgttttgctgcaacattttggtttctactccctagtcttgtttttcatataaaatccatttttttcaggatcatatgcggaaagctggtgatgtgtgctttgctgaggtgactcgagacagtgatggtacgttaatttacagtttctgatgcatacttacttagcaatatatttactttttcagctttgagcagagttttgtttgggatattatacttacgtttttctcccacaacatgactatttataataatatgatcaggaacttatggtgttgtcgactacaccaattatgatgacatgaagtatgcagtaagtgaactctgtgcgtctctcttactgtattgcatgctatggtttgtataattactgatgttcaatagttgtgatttcagataaggaaacttgatgacacagagttcagaaacccctgggctagaggttttatccgggtaccatttctctatgcagtctcttcttttttccctctttgaccataattaacagatattagttatctctcaagtctctcaacattttacttcgtttgatgcttcattctctatcttcccattcgtaaaacatctatgacttttgtagtctcaattggttaggctaatttaaaatcatgatctcacaagtttgtattcatcttatgtctgtgttttctgctcatatgcaggttaagaaatatgaaagctcccgatcaagaagcagaagcccaagcagaagcagaagcagaagcagaagtcgaagtcgtagccgaggccgtggtcgcagccatagccgcagtcgcagccttagcaggagcaagagcccaaggaaggatctgaggtactacgtttgttatcactgaacctttgtatatctcccattttcaatacctaaaaatggagttgtgtgtttaccaatctttattgcagtaaatcaccaaggcgatccctttccagatcgatttcaaaatctagatcgccatcgcccgacaagaagaagagtccccccaggcaagtcttctgcccttcttttgtgttctttctctcaaccatcatgatacttttattcgttcttttatttctcctgtgattattgtgacatgttgctttttaccaattcagggcaatgtcgagatcaaagtccaggtccaggtccagatcgaggtctccgtccaaatctcctcccaaggtatagaactaagctgcctgcgttttagcatcattttaccaagttataggcaaaacaccaaacagaccaatctaaaaaaatctttttctcaggttcgcgaaggcagtgtgtgattttgttaagcggtgaaaatggccaaaagaaagagtgcgaaaaattctcaagtcaagatccattctctgtgtttttttttttgctgttttcggataattgacattttctgctgttctctgcttctttactcacaaatgatcatctttatactattatgacctgttatgttatggatgtttccgtgaccatcacaatacctctgagttttgtattgttagtcctgttcttgtttaaaccctatgaagtcttagcgaacctggatctctcatctaaattatcaaatatttaactgatttgtatgaaatgggcataatattaaagaaatcaaattaaagttaagatatttgacatggtttatagacggtcaaatgagttgtttacctaacaaggttcttccacaaagtcgacaaaatttatatatttgacatgatctgtttgtcggcatcttttagtattccatcacaaacaaaagttgagaattaggatgaagtgcgcatttccttgcataagtagggatacaacttcaacatcttaggtataatgttaaaacatttttgtacaaacttttagctaatatgtatctttacaagaaatatcagaagagaaaatatatctatcttaatacgtatttttggataaatagtggccatatatataaggtccccaacttagaaacgaaacaagatgttataaattcttatgtagcccggaccggctaagagaaaagtgggatcatgtacccatttaaaaaaaaagtttatctcttatactatatgtatagatttgggccttttgtataatttttgaaaaatagggctataattgcttaaagaaatctgactaaaaaataggaccctattcaaaagcaccctttgcacaccctctcagccggccttggtagccataatcgcttccataagcctcacatcttctatatggtcagtaaatgtaaaaatattccgacccttaaaagcttccatcccttggattttgattcttgtaatagtcttcctcttcatattgtaacaaaaagtgtagaaaggatcatataactcgagtgaggtcaacacaatctcaccgttacgagtcatcctgacaatcactaaccagtaattttcaactaaactctcccacaaaggcggtatgtaatgtctccaccatttatgttcctcaacatcatctaaaacccaaaactcaatgcatgtagtcgctctagaaaacataccatctaaatcggtgataagcgcacctaattttaccttgtaatctatcagagtccgaagcaagaactggatctggacagcttcataattattaatagtagtaaacttgaacttctcagacctaatgtcaaagcgaactatcatcaactgatattcatttcccatagctttataatacaaatgcccgttgatgcatatcccaacacatttaggagtatgaggaatggaacaatcaacaaattctccataataattttcctccattttctaacgtcaaaacttgatgctttcgagcttgacttgacacacacaacaccttgtattgtctttcgatcggatcatacacaaaatagggtttctttattttagtgctttcatttaacgtgttggaaaaggttatgtactctacagtgctagggttatatatcatgatcagattcctatctttattacatagcaatccgcagacaggaggacaaaccttaaaaaaactgtaaggaacctgggaaacacatgtggcgatcggcagctaaaacggaagacgagttcttgtctagatttaaaggctgagttgacgtgaagaagagccacgtatctcaacaagttaggtgaagagaagaagtggacgagccggtgagatggttaggcaacacgatgactggtgttttccgacaaatatttgatgctcaagtcagaaaacatagaaatgtaagaaagaccacatgtaagtgaagtggaaaaagtgagaaagggtcgaaaaaagagtaaaatgaaggtttgttcacaccataccgaaatatcctaataaatgttgggtagttatttaaatggatcgagaagttacatgaaaacgacacgtcaacatgacatttttgttaatcacacgtgagaataaagttatattttaaaaatgtttctcaattaatatctatataggggatatgttgttatgctaatagatacacaaaatattaggtattttattttgtatattttaattgtattttcgcctgaattaattgagaaaaataaaagcattaaaaaaaataaaaataagtaaaattaatgacaaaatctatagatatcataataaatggatcgaggattttagtgaaaatgacacgtaaacatgacattttagttaatcccacaaaatgcttctcaataaccagacatagtacttatgaaagattaggaggaaaattacatgatcactcatatcttaattataaaaaaaaaaaaaaaaagaacttacataataagattcacattctcgatatggtttacaaatgtgtaaactgcttgaccttcaagaggtccagtccctttgatttcaactcttgtgatagagttgctcttcatatctaagtgaaagatgtagaaagggttggacttgacgaatggagaaaacacaacttcacaactaccgattatcccaacaaagtaaactctagtctccccaacgacatccttccacataggtggcaatacgtgaatagaccttatccattcctgatttacaacatcaagaatccacaactcaaagcctacatctccaccatccataaagccaaatgatttatgacgaattcctcctaagcgtcccttgtaatttattaatgttgacaacagatcttggttcggtataaacatgaaattctcatccttcatatgaaaggaaactgtcatatattctttagactcactcttcatagctaagtaaaacaaaacgccgttgatgcaaatcgagccatgataataagggtaatgatcgacagaacattcaagcattctccatttcagtttgcccgttcctagtgtaagaacttgatgctcttcagctttgaacttaaatggcttctcacgaatcgtcatgcacaataccttatattgtttttcgattggattataaccgatataggttataacattacccctacacgatctcactttgggtaaagatttgaattgtcctgtgctagggttacatatcatcatccttgcatccctctttctacttaaaacccactcattgctagtacacatcaatccacaaacaggaacacaaactccaaacgagtaatctttagggacatccatatgattatcaacaactacaagatttgagttctggtctgaaatcagatactcgggggatgagaagaaagaccacttaccctcagcttgaaaagtgattaggagatgtggccgagccgaggacctcttcaggaacaggttggtgagatatggactgcggagaagagaattccaatcatttgacacgcaacggaacctcgcggccgatttcgcaggcaccctggagagtatttcgaccatgagatcagttggcaacgtacccgagttctctccatattcacccactgaagaagatatggttagggcaacattttccttggagactttcctcttccgttttttcatcatggcggacattgcacatgaaaaagaaatgaaacccttagagttctgagtaccgatagacaaacacaagacgaccttataaatgaaacccttacagatccactagacagacacgattttgccacctttcggattatgtctacctaccacattttttttttttatctttctccctttttctaaccttatctttttttctttaatttcctttttgtagcatccttattagataccattacatatatagataattttatctataatttttcttcttttccttctaaattcattgataccaatcgagattacaaagttattatacaaattatttatctataattaggtagtactttttaatgtatatatacatacatacactatactaattacccaatcataccgttgctttcacgcctttttgtatatttttaaaatgacttactaaaatattgagtgtgattatcttgaaaagatatcaaatttctatttaatcaaattgaataaattttgagttcaatttattatatgcataaaaaatatgaaaaggatatgactatgaggggatcatatagttttatgaaagtagatgaaagagaataacatacagtaaaagtaggttttagattagagaaagaaaagcaatggattaggtcgatgaaccgcgaccaccacggccaaatcgtagtacattgattctcttgatatttttgcgtaggcttgattggccttcctccttgggcttttagagaggagtcacccatctcaaaacaagtatcaccaaatcctgagtttaaggaagcaaaaatattgctttcaaaaacattaactagattttcatttgccaatgaacctcgttgggtaggaataaatagggtgtccacagatgaaggagtatcaaccatagaaagaagcctcagttggtgcagcatttgaaaaggctagtaaatttggcgtttattgacgccagtagagagagagaagctaagtatagtggcagatggcgttgctgggggggcatactcgtttgtccgtgatataacgtgcttaacaatttcattatggtctctacatttttgacgaatgaatgcctatcacctagggttttcttgtgttttaggaaacattcttcctcaaaataattctccgcatatcagatatatatcaacttaactgagaatagcgattagtgcaatagtttcaaattaaagaatgatgtcctacaagtaaacagcctattaatttctcagggacaaatctgtcagtaaacctcggaaacaggcgtttcggtatctaaatacaatccaaacttagtcatatgtagggtttactgtttaggtaagcgagcgaaattaaccgaaaaagtgttatagcccaacattgttgcattgattatagctcaaaactcatgataaaacctgtcccaagtgtttgccaaaaaaagacatgttccaagtaaaattactaggctttcctaagaataaaataaatctcaaaaaattgagtcgactaaacatcaattgccttcaaaagataggttaaatctattagtcaacaatccggatacaaaatcatcgtcactctctcccttcacgtcctcctaaagatgattcatcacaagaacaaattaaaccaagaaattagatatttatattgaatatcaacagtaattacaattatgaatttatgagtatagtatattaattagtaaaagggttcaaggagagaagaatacgataccttatttttctcttcagctactggggcagcttgagtggcacttccagatgaaagtgcagaagaaaaaacggccatgggagaagcagcagatccaccggcaccagcattcatgatgagatcatccatgtttttgttctggcggaagactaggccagtatgattcaatgttcaaattggctgttttcaccaatgttgacatctttctcagcctagtttacaagtaaacaaaatagtttgagtacatgttaattaaaacaaacaacctacaagttaattaaggctccagtaggattgatgtcaagattgagcctagaaagtacatacggtgacatggtcatggaggaggagagctgcgtaagtgcaagctagctcaccggtggccattgtaggctagctcgcgtcccacgaaagatctacaaaaccatcaatagagctcatcgattcataatctgaacttcaagtgaaacataaaaacaaaacgtgtagagtctctgaatcgaacctgtaaccaaacagaagattaggggttaacgtacgaggtcactatttatttcgatagagttattagggtttctagaggattattaatgtttcgaaatgggcacgtgaatatcatgtgcggcccagagaaaatttaggactggaatttcatggcctatatagataaccaaaattgttcttattaagcctcagaagcccaataaaaggcccaattggacaacgacaaagcagaacccgagtcgttaccacacacacagtcgtcactcaccacctcaccgttccttatccatttggctgacgcaaaatcgaatcggaaccctaaaatctctccgaaagccatgtctcctcctcctgctgtagtcactgaatctgccgatggacaacctgagcaaccaccggttaccgccattgctgaagagctggagaaaaagcttcaggttaagacgattttacgtagatttgtcacggtttttacttcttagtctcacgctcgaggatttgtttttgcagactgatgaaccgattgtagaagatgttaaagatgatgaagacgatgatgatgatgacgaagaagaggaagacgacgatgctcaaggtgcttttgattcctccctcttttctcaccagtgtagctcggcttttagagttttgttcgtcatcaatcattacttaattttccagatagtgttctttagaaatgtcattgaatattaatcatattaatcattggccttgttcgttctcacatttgtagtttcgtgtatgcaaagagtgtcacatttcaagaattactgcatagttatgtagaaatggttgatttagatgtttctgttaacatatagagatgtgggagatgaatcattttgctgatagattgaggccaagatttatggatttacttgactaagtttcggagaatagagatcccaatatgtttatagcatagtgaattgttcttaaaattgaatgaagttttgttgttgtaggtgtaagtggaagttcaaagcagagtagaagtgaaaagaagagtaggaaggcgatgttgaagctcggtatgaaacctgtcactggtgttagtcgagtaaccatcaagagaacgaaaaacgtaaacctttctctgttttctcaataagtttagatttttttctgcgtgtgtgattctaatgatacactacattaatgttatcaggttctcttctttatctctaagcctgatgtctttaagagcccgcattcagaaacctatgttatattcggtgaggccaagatcgaggatttgagctctcagcttcaaacgcaagctgctcaacagtttaggatgcctgaaattggagccacatctcagagagcagaggcatcgacagccactgtagaagcacaggtggaagaagatgaagaggaaatcgatgagaccggtgtggaggctcgtgacattgacttggtcatgactcaggctggagtttctcgtagcaaagcggttaaagcactcaagagtcacgatggagacattgtaagtgcaataatggaactcactacttgagagttaagagagattgagtctctatgctttattcacttgcagattgttttcaaatacttttggatttatcaggaaattggattattgttgtccttacgagtatctaatctagtttgtttgttatgatgcttatgcagtatctgagttgtactctgtttttcacgacaatgtattggagaaaatacatatcaaaattcgactaaacaaagttcgagaaacttccaaattctaggattagaaacatcacctactaacaaatagacagatatactaatatctaaatgacattcgagcagaggacagaagcacagacgttggagtcctatgcattgattctaactcctccatcttctgtttctcttcaccactgaaggttgaattcggtgagattcccgctgtttttaaatatttggagttttctagaatgtaccttatgatttttttctcatcttctcttccaacatatccgtcccactcaaagatctcgagatgcgacgacaaacatcttggaatagaactcggttgattccataaagctgggtcatgattccatctcggaatgtcggagtcgaccagaaaaactttaagcttagaacacttagagagcaaaaccaaaagtgattccaacaagtcatactcagatagatgtatcatacattcaacaagtcgagagtagttattaactgcgtcacaccacggaaccattgtatcgaacggagatagcgcaagatacttgaccgaagagagaggcctcataaatttttcactagggaacagctcatcagtaactactgtgacaagatggggcatgtaccaaactgagagagagtatcccacagtatcaaagatgtgaagagacaataaattcggagtgtctgtaaccaaaaacggatcagacatatcactgtcttctcgaaacatcatacctgctttgtagtctaatctcaataaagaaggcacttcaaccctaaacgttctcacattatcttccacacgtctatttcgagtcacctttagatgcttgagaacgggacaacttgatagaagcttaacatgagaatcttcgtctttgtacacaacacagaagagatcaagttctctaagtgatgggagagagacttgacaaggaacatccacaagaatcttgtcggagagagtcaatctctcaagcgttttgcaaaagtaaaagctcttaggcattctgatcggctctcctttccaaaggagcctgaaagttagccaacgcacacgagtatcaagcagtggcggacccacgttggaggcaggtggggcacgtgcctgatactaaattctataaatattttataagctactactaaacaatgtaatacaggtaactcaaatggttttccagcaaaaagtgcctcatactaacccgagttcaagtctccgcactgttatttttgtaaaaataatttataatcacaatacaatttaggtaattaaattatacttagtactatttatatatatggtgccccacattaaattacattctagatccgcccctggtatcaagtacttttgcaacccactttacaggattaacattaataggacattgtggaccgaggtcgatccacaaacgttctaacaaaggtgccttgtgaaaacggaatgactcttcaagaaaccaccaaacagtattgctttttacgtcactagtggtttctatgtaattaagtctaggtaacatcctccagacaaaccgccatcgtttggacaaaaacgtggtggccgctgcatctttcgtaggaacgcacaataaaatctttacgagaagatcgtcaggcaaagaactgattctatcttcacaaactctatgttcgacgagttctgtcataattaacaactaaaccctagacgaccttagggttgagtcaaaaaataggaatcttttccaaattattcactttttttttttttttttttgtcaaccttttcccaacctcttttattctttttattttttttaaaaagaagttaaaagatgtattattgtttttttcggtctcggctctacatacaaaattttgttcatcttttccaaaattactggatttttcatgtgaaagttgcgtaaattttgtttatatttgtgtcacttccatataataattaaataagtgggagttgaattaatcaacggtaaagagagagttgaataaatttgatggttgtaatgtaaggttgtaaaatatcataacctaaacttgtactataaaataccaaggcttagaggtatgttagaaccaagctaagtaagtgactttgagagtcctcagtcttgtaatctatcttaaacactttgtttccttatttgatcctaaatacctcctacgtggttgtatatactacgtgtctaatttcagagtattaagaagtttgacagtagtttttaaagatatgtcttaaattcgttttgtagaacaagaaaatatcatattttgaaaatcagtaacttaaaactatcatattatgaaaatcagcatccaagcagttttatccttttatcatacataacaaacgttttcataatggccgttcatgttattctacaaataccttttatttataataacaagatttcattataggatcgaaacttcttgtccaaggaaatttcactactcaatcatccttgatgacatgttcccagtccgaggtcgggctctcgtatcctttgccagatgcagattgttcagtgtccgcggcgcatgtttctctctgagaatgtccacgtattgggaataacgaatctgaccagagatgatcacgcttttgtggctggtcattttctgaatccgaatctacatccatgctgttgagagatttcttcacttgttcagcttcccggcgtttcagtatctggaatctatccataacatcactcacatcgctgcttctgcccatattagccatcactgaaccttctagtttgtcctcctggtcacccttttttgtttctggacatttttgagccttgagtttgcgatttgtttcctgctgcttgagaatctgaaaccggtctataacatcaatgtctgaatcagggagcttctgagacttgagcttgcgctctgtttcctgctccttcaatatctgaaaccggtctataacctctctatgtttgttctctgtagtggatgcagaggtttcctgccatatcgcatccggtatctttgcaaaggttgcatcatcaggccttaagtttccacgaatggtctgctctaaaccaccagtaaagcttctggacataaccgataatactgcatccacaggatctgagttgattctagagctttcggatgcatcatgactcattgttgctgcatttttcccacaattgcttccatgtttgatgatagattcaggtgtatccttgtctgcatttgcattcatgatgggaaccgatttctgtgtgttaagagaaggttcctgcataaagcttactgcatccgcagagatctctgagaaagaaagcaagacatgtacgattaaaacataggtaaaacaaatattttcgcaaaatgaagcgcagggtaagcatttctgatactaaatccaaggcatgactaaacaaccttttagtcaatgtttaaatttggtaaaccaaagttgacctataactgggttaaatctgatccataaaggaactactgccattctcagagaaagatacaaaactgatcgtagacagataatttacttaaattcgtaaaggacccgagagaaacagcatcctaatctcctctatgacatttttagtatttaagtgcctgtggatctgttataagcgcattaataaatatcaaacagatgagacggttggtttgaaagttaccaacctttattgttcaatttgagattaccaatctcgttcttgatccgatgataccgagccatgcaagttgtggaacataaggcagcttcagtttcgagccagagattcttgtacaagagagtttgtgggtggttttcttcaccatcaggaaagttggaagcaagtatgttcttaatactctgcaaagttaagattcagtaggcaagactttataaatgatgcacaaaaataatatgcaagtatatacctgggtcatttcattcttatccaccggttctttgacaccaaagctgtctagtggcttgacactaaacctttgaaagtctttagcaactcccgttgcggcctgaacaagggtaccgttaaacaacaaacggcaaacaagaacaaacaatgtgttttttatcaaaaaccaaataggtcgggaacataacacaaagtaagacattacctaggctcatgtgaaatactctagatattacaagtggtgctctagattataaatacattaatatctcacatagagcatgcaacctattttttctttaacttctagctacgctataaatcacaaaatgccggggtaaaactgcagcatacctcatgaaggtcaaccacgtttggacaggtgacatgcatagattgcgttggaagtgttgcttcccctgctgttgtcttattatcagtaattttcttcaaacactttgtgagattatctactactttatcaaggttctcaagttgctccagcttcagccagcttccattgttaaagcattcataaacaagcacttctgacaaattatgcatggcgttaacaacagaagaaactcttggataagaagttggagatgggaaatctccttgatcacagaagtgcctttcaggtgatcggccagttgagacatcatctgcatttgatctactactcaaatcgagccccacatctgtcaacgatctgatcttcttatctctatccattatatcaaatgtttgtttctggagattacaagactcttggttggttggaacatcttcactaggttgagtagtactaccttcgaaagggggtttgtagttgccagctgactgagcattctcattatccgctttcatcgtaggagctgaaggtccacctgactcacttcccatagaaaacatcgtgggagctgaaggtccctcagaggttaccatgaagtggctccaagatcgaggctcgtgacaatttaaatcctcagttgcattctttaaggagctctcagaaacaccattctcactgtcagcaaccaaagtataaggcctctgataaagggaggagacaccactaccttctacttcatctttaatcagtgacacagaggaattaataatagatggtaaggggtaggaagatcgcggacttctcgaaccttgcgagccaactaccggatagggaagatttggattctcgggcaaaggcttgatatgaccagtagcttcaccatatcccagtaacacatcgaagttaactggttcaacagaggaactctgcaagctggattgagctcctaaaaaattctgaggcgcatgactacaaacatcactgttgctcgggaatgatctcccatctcctacacgaagcccagtctgacttccatcaaagagagcttgtgttataaaattcggcattggaaaagaaggattacaatctgtatcacacatgtaaggctccacacgagaagcagagacaacattcatagtttcagatctatctgagccaagaaagtaatatccaggacgtttctcatcaacagcattgctagaagagtaaacaccagatgacgcgataggagtaaagaatgagtcctgagaatttctgattagcatatctgcataagaagacacaggagctaaggtagctgagctgtaggtaggctcaaagttcaaacgttgcctctctgagaaattctcagtgggaggaagtgacacaaaatcagatgatgattcccttgaagagtaaaatccactcggtgataacatatctttataagaagaatcttcacctcgaagaccactatttcctgcaaatgcataatcttcatgcgttaaaactaagatcaaaccaaaacgaatcaaaatcgtcctaagaataaattgatcaatcctcaaatccaaagttctgtaaccatcacagtaccgttaaaccccaaattttgtttttaaaaagggatttaaatcataccatgttgagtgttgtcagcataaaacgatgaagaaggagtctgagagcgagaattttcacgatacgatgggttatttgaccaattagccggcgatcgttgataagagtcatgatacaacatcatcggatcaaacacttctttggctggatcataggattcaaccggattgctttgttgaaacggcggcgcagaagctggatgatgtggaggtgtaggcggtggtggagatgagagccaaaacgggtacgctattccagagaaaccattatagcgaaatccatcggtcatcgttttctcaccaaaacgaggaagagactggtgaaggaaaaagtgttgttgcagctcaagtgtttcagaatgtcaatgtttatcggaattagcttctcaatgggcctttaaggccttataaggaaagccctataatgtcactaaaaaatgaatttataagtcatttaactgtttaattataatcacagataaatacaggagtcaataaaaatttaccaattcagatattttcctaatcatataataagtacattttatgtatttcacattttgattataaaagtctcaagactctcatttgattcatcttaatcaaaccagttaaccaacatcaagtataataagagcaaatcaaatttgttttgaaaataataagagcatatttgacgataatatagtagaatacattacacaaacaatggcaagcagttgagctatacaaatcctgaacagcaagcagtttttgcaaagacaagatgtttcgtcacacaaaaaaatccacagatacatggcagagtggccttacggcattaaacataaccttttagagacgctgagcaagaaacttagccaaagaatcaacaggcttggctgagtcgatacttcccatttcccgtgaccggattttgattcttgcaagataatcagctgcaatccaagcaaaactcagcatcgccgcatgactggactcatctggatcttgcagctctaaagacttcttcacccactcgggatggtaagttacatgataccaagctgaagccttcttctcatacaagatgtttttttcctcctcgctgagattttcatggtcagggattgtttcctcaaatactttcctgaactcctttttaagggaattataagaatgcttcagtctttctttcagttcgccttgtttcttgcttgtgtatttgggcatggaccagatgtgacccgtcacaatctcttcctctttctgcaccttgtattgcccaagaagaccaatgagttgcccgtcgtacaaacatttgtgaccccatgcctcagggatcaaatcttcaaatcccggtatttcaagaacagcgtcataagggatggcacttgggtctgtgctttcttctgaggaagcttctgcatcttcatcataaacctcttttacccgtctgtaaagccgacccaagattttgttcgacttgtaagtttggtagtcttcttttcccatgaaatctgggtagagttttggttttaggtggaagggcattgacacaattttccctgtctttgggaaatcaactgcagtggcagctagttctgccagtagcaaacattcttcgtccatggctccatactcacttctatcagcatgaacgacgtgtgcattgcaaattgtgcccaactgctcattcgccaagtttcttgcaaagaaatcgattatgtcctgtaacaaaagcaatcaattacccaagacttggcaagcacagcaagaaaaaataacaaagaattcataactacattggcagaagctactagcatcatgatactgcccttgatagtaactaaacagtcacagtcacagtaaggcatgcgaaaaatacaaatcagaatcaacaatatatgacaaagttttcttaaatgtcatcatcttagctcctacaggatgaacacagtatgctgttaacaacctatgccacgcaatctatgaactcagaagcaagcaaaagtaatcactacaagcatccaaaaacaaagtttccaccacttccagaaatatcagagagttatactggaatcacttgtccattttatcttaagcgtcatcatctcagctaacagaaaaaaagtggggaagtagatattgacctggtggttgacagcacggcctaaactcttctcttcagctgcatcataatgcatggccggatagcttttcctgttgggagggatgagtttctgatcccaagccacaaagtacaggtccccgtcaaggtcactgccagaagcttcgtttgtatgcggcctatcacctttctgagggaaaataaggcagtcatacatgtgatgcagctggggtacatcaacagcttctaaaatccttacatcccctgggtgaagacaaggattcttagcaatggctacatagcctttaactacttccagatctgtctttgtctccttaaaacgagacccatgtttggagaaacaattttctatagacggtttagagacttgaataaagcattggccatgttcaagtatccctgcttcgtctaggcaacccattagccaccttcctgaagtaacaaaaatacgagatttttctctgagaccccagagttgtgcaattctgactgaagacaacatcccgcgtagatgcggctcggtttttggtttgaaacctgcactaagcatgatagctgcagtgtttccctgttcagcacatgatgccgtgagaacttcaaatgccacatctgtatcatcaaggatgcggttcagtttatagagcatggattcctgcatatcccagaatatttcatccggaacacctagtacggatagaagggtaattatctgccgatttaagaacccaggttgaaacctcgtccaggaacagatctccaagatcgtatgtttggaaaagaacttcttcatactgtctcgaagggctagcctgattccatcactttttgatggccaacgagcaacaacccctttgaaacctgcgtaacgtatctgataagcacaagggctgtagtgcacatccaacttaagtttctccattacttcgtcagcgaggtcaggtgtgattgtaccaattccgtcagagaaaacatacccatttctctcaatatctggaacctcagtgtcaacctcgtgaggcatgacatctacagtggcatatgtggaggagaagcacaggcccatcctagcagcacattttgccacattcttgtctttgaacttccccatccatgtttttatatctgacacacgtgttttcccgtcttcagcaaagaaccatgcagagcggtctctcagttgattggctgagaatgctagaaaactgtattttctaccacatagtttaaacccatcggttaatatgctcttcactcttttaaaaacgtaggtcttctgggagaaagaacttgatgtcaaatccttcacaataggagcaacaaagtaagagagaacattcgaatttatggtctgcatactttcatccatgaaagttacccgcaaaaatctttcagcaacagctttgtatctcctgagtaccctgttggagagctcaacttctgggggtaggcaataggctctggttggggtaattactagtcttctgatctcagagatatcctcagattgttcatgactccctaaaagctttggatttttctgaatccattcctgaacaagcttcaacctcttgtacgcatcaaaaactggtcgtttataggtacagagatgcttgagagaagctatattgacgtccttgggttggtttcttagaagatcaaagaatcgctcagtcaactgaaactggttaaagacacccctgtgcaataccgaatttactagaaacatgatctcaaaagagattccttccttgtgatgaatgcagaagaaatgatctgacacaggctccccaaaacaaggctcattacggatacggggaggccacctcacacgttcctcttgcaccctccgcatcctaaaataatctaaggctgttctcagtttattttcataccgcggagatatgagcactcgatatgaatgacatcgaccaattgccccaacttgagtaaaatcagtggtacggatccaaggatcatcatcatccaagagatcgccagggacagtatcgtaaatatcatcatcagcagttctgtaccagacacggggtgaagaagccagctgcaaaataagcacaaagccatgcaaggttttatactgcctgactgtttgtatatctctcaccaataactccaacttataatcacaattgatcacagcatgcatcactgcatccttgaaagagaaggcagtgctctttctgaaacaaaacttgcacgtgttgtcaaaaggatccaccaggaaatcaaccccttcagctctccaagaaacaaaaaaatcatcccgagaaaccaatgtcccaatctcaagtgtaataccagccaacttataaggtacagtcgttcttcttctttgattaagggaatatggattcttaggacccaaactgacttttaacggctggccatccaagatgaggttgcattgccctgcagcatccatggcacgaccagctgattcaaaaactgcgaaatggacaaaggcatgaggctccactttcttatattcatcaatactggggatatttgaagtgtctgcgatttcaaaattaggataagacccaggaggagtccacgaagtttttaatctgcaacgccaaacaattcctacttcatcttcaaggtaatctgtgagttgttttgcagtagtggattccccaaatccaccaatgcttacttgtgtcacaaccgacttcttcatatttccctctgaccccatttctcctgaaaaagaaacatactaaacagaaataacccccacatgataaggctgataagagaaaatattgaagaaaagccctaattcgctactccgttggaagatctaagaccataaatatcaaattaagagacaatatcgatgattccaactacaaatactattgaaatcgatcacctaatacattgttgattgaataattttggaatcaagcgggaataaatacaaaagcacttacacagtgaggttctggagacttacacagtgagatctttttcaatctaatactggatacgaggtagaaatagaagcaatgcggagactggagagaggattagtgagtatgcgaaaaagggagaacccgccatagctgaaaccatctctcgtttttatttgacttcggcgagtaaacgaaagagagtctgagactgatgagggggaaaatagactggagaagaagtgcttgtgctgctcacgtgctatttgtctaattaatgggcttttaaaatatattcctatttgtttccattattgtacataggcccatttaaacaacctgggccaaaccaaaccgttatcaagaaaatacaatcgagagatccgacattgacacagtaaaggtagcaacagagaacagactgaaggagaagaacaatacacaaatttctggagaaagttttgaagaatgacgacaatttccgatctatcagatgatttggtaggtgatattctttctagggttccatttacatctctaatctcagtgcgatctacttgtaaaaagtggaatgctttatcgaaaaatcagatctttggtagaaaaacagcagcaaggaatcaatttctagagttcatgattctagattctagagtttgttctttgagattagatcttcaaggaatccgtaacgaagacaaagaagacttcgttgatccatctatgaagctaataagtatacctagtaatgatgatcaagtcgagatatctcaagtctatcattgcgatggcttattgttatgcatcgccaaagagaactcgaatgtctttgtgtggaatccgtatttggggcaaacgaaatggattcgaccaagaaacacattccacagatatgacaggtttgctcttggatacgacaacaaccgtaaccacaaaatcttgaggtttctctatgatgaagagagcaacgaaagcagtcgaagaactcacattgatgtatacgattttagctctgattcatggagggttcttgatgtcaatcctgactgtgatataccgttttatcagaccggagtgtctttgaagggaaatacttacttcttcggtcaagaagtgacacaagcgacgaaagtaacagagattgaaacttgtttactctgttttgattttacaacagagagatttggaccgtgtttgcctctgctgttttaccctccctgtcctagttttgaaactgtgactctatcttgggttagagatgagaagctcgctgtgttatacaaccactacgtcacagctgagattatagagattaggatttcgactaagattgaacccaatgcggtatcctggagctcttttttgactgtggatatgtcactagtcaatggtttaccggatcatttttcgatgtactttgaagctaagagcttcttcattgacgaggagaagaaagttgttgtgctttttgatagtaaagagatcaagacctgtcgctaccaaatggcttacatcgttggagatgatggatacttcaaatctgtcaacattggagtaagtccgaattcccagcggaaaccaggcagacttgtgtgctcttcttatgttccaagtttagttcaactgcaagattagtcacttttcaatacttttgtttgtttcttgcatcaggttttcttttgaacaaaactgattttagtttgaagaaatagttgatacaagtatgagtgtatatatgacaaaatctcactttttcaagtatagtgtttgaagttcattttgaaatcttggtttcagactgaagatgaaaatatcatcgatttgtcttatagaggaagacttcattggcctgccgttctatgcaatagagtacttaaggtccatagtttacacatgagcttaaacttgggatttgatctctcttgatttcttttagattttgaattgtcaaaacaccatttcgtagaaaatgctagtcatctgatgaatatgtactctctcatctacctctattatgttctttatctcaatatactctcagtcatagaagcaatgcagaggccggagagaatataaagttagtaggccattagggagaaactgccatagctgaaaccatctgccattatttgttctaaagaacctccatccattgtctcgatatgagatactattaaaaaaaggaaaaagtaggagatagagaaagaaacggttctcaaatgaaaacctctcttttatgcatcgccgaagacaactcgggacttgtggtatggaatccgtatttgtgtcaaaccaaatggattcgacttagaaacacattccacagatatgacgtgtttgctcttggacacgacaacaaccgtaaccacaaaatcttgaggtttctttatgatgccaagaagtacagaaccggtcgcggacgcgacaatgatgtctacgattttagctctgattcatggaggagggtttttgatgttaatccccacaggggtgaactgttttattacagtggcgtgtccttgaagggaaattcatactttttcggtcaagaggtaacaatagaggaagaagaagaagaagtgatatcacaaccgagagattatttactatgttttgattttacaaccgagagatttggaccgcgtttgtctctgccgtttaaccctccctctcctaattttgactatttgactctatcatgggctagagatgagaagctggctgtgttatataaccactacaacacacgtgagattatagagatttggatttcgactaagattgaacccaacacggtatcgtggagcacttttttgacagtggatacgtcactaatcaatggtttaccggatcgtttttcaactttctatggacctaggagcttcttcattgatgaggagaagaaagtcgctgtgttttttgataataaagggaccgagaccggttgttaccaagtggcttacatcattggagataatggatacttcaaatctgtcaaaattggagtaatctcgaactcccagtggcaacaaggcatacttgtgtgctcttcttatgttccaagtttagtgcaactacaagattagtctcttttcaatactgcatttgctttgaagaaatagttggtagaagtatgataactaaagatcactttttgcagtttaatatttgaagttccatttttaatttttttttttctttttttttaaacatcttgttaatgaagatctttctatattgaaaagatcattgatttgtaatagatgaagtcttcattggcctgccgttgtatgcaatatacagtattacttaagttccatagtttacacatgaattgatgtgactcttgaattccctgttgcaaccctgtgtcctcttttgctcatattgcgaatgcatttacattaaacttgggatttgatctttcttgatttcttttagattttgaattgtccaaaacaccatttcgtagaaagcgctagtcacttgatgaattggtactctgtcatgtacctttaaatatgctctttatctcaatactctcgacacgtatatatgaagaaaccgccatagaagctaagcaattatatgctaagctattatatgacgtatatatgcagagactggagagaatataaagtgactaggccattagtgagaaaccatctaccattatttgttctaagatggtgcaaaaaatagtagtagagtaaataataatggtaaataaaaaaaaaaaaaaaaaaaaaaaaaaaaaaaaagtaaacaataagaaaataataagcaaacaataagttatgtacttcactaattctctaatgcgttaaattttctaattctctcgaggataaaaagttttattaactctcttcaacttcaatatatatttatgtttctctagaggaatctcgtctagaatctcaagaaactcatatatgtttctacttcatttgtaccgtagggagactggatttgtaaattgttgtgtgcagttcccttcaatttcagattggacttgaaatttgaaggtgtaatggagagaaaaccttgtagtccagaaactcaacctctatataccaatcaaaatatatatatttttattttatttttgaattccatgaggttctgggccgaattccgtaatcctctcaggcccgaaaccacaacatgtaatattagtttcgtctcaagcgtcactcgaatcggcgacctctaagcttcgcctaggatctttaccaattgagctaacgacagttggtaagcaatcaaaatatatctacaagttacataacacgataatggtaattactgttcaaacggctcttaagacaatcatggaagaaaattctggaatgtcctcacctcgacaattgtaacctcatcgcaagcattgctatgagaatcccggagattataagagaagattctacaatgccataacgcttcacatcttctgttttagtgaacacatattattctctaattttccatcaaaagcatgtttttctaccacaaacgtcactaattgcatttcttaggtgattacgcattttccgttagaaatatgttttgaatcttttcatcaaaatataatttgcatcctaaaattttacttataaatgatttaacaaataactccgaaggtactaaaaaattaggatgtgatctctataagttacacaaaatatttacacgattaaaacattgtgtatagtaaattttagcctcaggtgttattaacaaacttgtcatgttgacatgtccatatcagagtgacttttcactatttaaataattgtctaaaactatttacagattttgtcattaatcttataaaaacatataacacaaaaattaaaaacagaaattctaattaaaataagaattaattaagcatttaatctttaaatatatattatttcaaatactttattttcgttttttataaaattaagtaaaacaatatttaacatatttttgtattttgatattgatcataaataagtattactgtatgaaacaaataatagtacagcttcatatgaatattatcttttaaaaatatactgttatttttgttttcagattaattaaaacactataacatattttgtatttgaagagagatatacatatataaaatacttcttagatttattgacactaatataaagttaaattcagtgtttaatttgatttactaatttttaataataaatcctaacaaaagatcatgtattcaacattattatggttttaatcttagatcttagttgaatacactataatcactgttactatgttttcaaaactaaatgcaatcataaccataacactaaatctattatatatatatatatatataaaaacatgttttcctataaatagagtgtcaatatcatcttcatccacaataatacaaaaatttcacaaacatataatacataaaaatcgttttcaccccacaaaaaatacatcaaatagtactactaatgctctaagagaactattttacaatattatttatcatataaaagataagctataatatcaaaagaatcattattttatagacaaaacatattaatagaatatgaatattatgttccatatttgccaatatattattgatcatataatggatatcacatatagctatataaaacctaaagtcattatagattttggtcactacaatagattatatacttaatctaatgttaaatttatttaataattatttattattataacaagcattggtttagaattatagaaaattgtaaatcacaaaaaataatacatttgtaatcaacttgtaatatgttttcttaatatgtgtgtttttgctagaaaatcaatcaataaaaaacagagggtatattttacttctttatttttgggtgaatgatttgtttccaaactcattttctaattatttattatattaaattgaattcttatttgtttctgtttttgtaaattttgctttgttcaacttatataagcccatttaaacaacttgggccacaacaaaatattatttaaagcctatcaagagatacaattattcgacattggttgattgattgaaaagacaagacgagattgaaaaagaacaaaacacaactctctcggagaaagttcgaagcttgggagaaatgacgacaatttccgatctaccatatgatttggtaaaagagatattttcttgggttccatttacatctcttagagcagtgcgatctacttgtaaaacgtggaacgctttatcgaaaaatcagatctttggtaaaaaatcagtagcaaggaatcagtttctagagttaatgattctagattctagggtttgttccttgagattcgatctccaaaaaatccgtaacgaagacgaagaagacttggttgatccatctatgaaacaaataagcatacctaataatgatgatcaagtcgagatatctcgagtctatcactgcgatggcttattgttatgcatccccaaagataactcgagtcttatgttatggaatccgtatttggggcaaaccaaacggattcgacccaaaaacacattccacagagatgacagctttgctctgggatacaacaaccgtaaccacaaaatcttgaggttgaacgaggaaaacgaaagtcatattgatgtctacgattttagctctgattcatggaggacggttcctgatgataatccctatagggatgaactcatttatcaaagtggcgtgtctttgaagggaaatgcttactttttcgatcgagaggtaacgacagaggcagaagtggggacagaagacttgttgataacaggcattgaagattatttacgctgttttgatttcacaaccgagagatttggaccgcgtttgcctcttccgtttatccttccctctcctagttttgaatatttggctctatcttgggctagagatgataagctcgctgtgttatatagccactacgacacatttgacatcatagagatttggatttcgactaagattgagcccaatgcggtttcgtggagcacttttttgaaagtggatatgtcactaatcaatggtttaacggatgattttttgattagatttgaacctaaaagcttttttatcgacgaggagaagaaagtcgctgtactttttgatactaaagtgacagagacctgtcgctaccaaatggcttacatcgttggagatgatggatacttcaaatctgtcaacattggagtaatctcgaattcccattggataggaggcgaacttgtgcgctcttcttatgttccaagtttattgcaactgcaagtttagtccattttcaatactgtatttgtttcttggtttgaacgagactgcttttagtttgaagcaattgttgacattagtgaagtaaagatcactttttctagttttttgtttgaatatttcaatctgaaacctttttagaaattgaagatctttttagatttcgggtatttgatgttctaaacatggataatatctgcatcttgaccagagcaaacaaacagagtatatgattatgaaaattgaataccttgtataacaagtcactgagatatgaaaattgcataccttagaagcttctctagaagctctccgatcatcactttttgatctcatttcacctgtccaagaacagtgtttttcggtgattgtagtattcgatctataaaagctacaagctttttttatcatcctttctttgttgtctcggacttttggcaacacgctgtcttttgtcatccttcaactttccctcttcttcttccctctgtctcttcttctcagctattgctgcctccatcttctgcttcaaagtcatttctgactcctttttctttcggtctaaacggaaccgcttttgactagggtttcatttccctgtcctctcaaaccaaagggtgatacacaactagctccaacacatgacaaacggtcagaattttctgatacaacttggtgatcttcatcaatttgactcctctctacacttggctgttctggtttgaaggagcacgagccatgactcatcgatccagtttcctttgacaaacttttcctctgcatctccgtctctcttttttctcctctcattttttagctcattgttcacaagctaattagttgcaagtgtgatgcatagaacaaatcgccacgaggaggatcctagacaaaacttttcctctagggttggttttagtctttgcctcatcctagacaaaaggaagcaagagagaattctgaatctttcacaagtcactgttaatatatactgtatacacttttataaaacgttcagaatcaaaagacaaacactaaagacaaaacaaaatcaaaagacaaacactaaaaagacatttcagtggtatttttgagtaaaagaaactaatgatgatatttttggaactaaaactcattctaatggtaatttaaaaaattgccaaaaaacatttatagcccttccaattttgtgaattattgacacgaataccacacagtgaatgtatactcctctgcgactccaccacaagctccactttttttcttgcgtctagcgttgtaaacccaaattcataagttgtattattaaataaatgcttaggtactaatactatttatttccgttttagcctcctctccggtaacgtctgacctttgtattcctccgtccatgagattgctgcatttgctatcttgtttgtggtgttgggtggtacaaatcttaggtttaggcaattttagaaagtgtgtatgttagtttatgttcacttctacgggtaatccaggattatggtatggttgcctcgctctcctttctcttgttgatagccgctttggtcatatagtttgcttgcattattttggttttgtgataaatgattttgttgaacttacttttgccctttgatgagttttattgtgatctctccggttcgatcgcttgacttctctcttccgagttttgtccagaatgaactcatgtgagaagaactctaataagtcaaagaagtaaatagagtcttgacctctctgtcatcataacgtttacataagcagcctaactacatgtaaaaactacaaacaaatatatcttataaactggcgaaagcctgaaaccaataacagaagcaaaaacacgggccggttcaagcactatatttacaaaaagtttcagttttcaggacactgcagatgctctgaagtcgacggttagactgcagactgacatcaagaacacaactgcaactactgccgccctaaagagtcctccatatgaacatttcaccgacgtaatctttttaaacacaaaaccggtcacgttctttgatctcattagctttccacaccttttctttatactttctccaaccgtgtcctcagcctgcatagcattaacattttaatgtcatggatcgattccactctgcgacgtgaaaccacatacacgctaaaagaaaccaaggatgagtaattcatcagaaggtgggtgttattctcacctctctctttatagcttgaagctcaggattcttcgtgttaatgccattaaagttactttgcagacgcagccttcttggaccatttccctgcgctatatagtcattggtataacctgagggttgtgcctggcgactcttaatctggatacccgtcactgaaacatcattgctcatgtcaactgctgagccctgttgacacacttgcgcaatctgcaatcaagtaaagtagttaagagttaatacgatttctgttttctagaagtacatacaaatgatataatgagttttgaggaatcttcatgtacctgatctggtgctacaacatcaaaaccactttgcaaaacatacttgtgcttctctggatcctcgtctgggctcttgagaatcgaatcaagaaaatcagatatatacgtatctacttcatttgtaccatactgagtctggatttggaagctgttgttgttgttccctgaaaaattactcgagccaggctggaatgtgttgtaagaggatccaagctcagattggacttgagagtgtaatggagagaacagcgtgaaatctaaggactccaattccggataccatttaaaatctacaagctgcatgccgaaaataaacatcattagtattcaaacagacactagagacaatcatctaaaaactgtctaagagaatttttcaatgtcctcacctctgcggttgtagcctcatcacaagcatcactatgagaatctccagagattacaagagaagattctgctatgtcatgacgcttcacgtcttctgttttaattacctcagatacttctgacttagtcacttcgacagttggagacgagacagcaggttcttcaacttcatctgacttcgaatcttcttcccctaaaaccagttcttctttcttgaacaatttgcatataacaaacggactctgcatatatatatatcaacacaagcacacaataagctacagagccaaatttagttttccaatggttacacatctaaaagtatgcattatttacctggccaggattggtaccactaagatcatcctccgtggcacgatactcatgaataatccaattggttcgtgtccccctaggagctctacccgcgtggaaaactagagttctcttcacaccaataatgttagtcttaccggattttatcttccggtcttttcctgtggctttccagtaccctgcaactgttgcccggttctgtctacttccactcggatacttccgatccaatggacagaagtagagccactctgagtctttagttttgatcacagaaaaatctacaacaaaaaaaaatcacatcttttaatcaaatttcagtcacttacactacaccttaacagagatataaccacatacccaaaactaaactatatcaaacacatatgatcggtttaaagttattaactttcttcaccatagaaactaaagctacaaattttaagttctaccatttctcaattcaacataatgccagagaaatcaaagaggatctatagaaaaagtgtaaatttatgaataaagagatgaagaagtaagtaagtaagtaccaggtaaatcccaaggttcccatttgcaaatatcgatctcacggatagctttgacgtcgtcatcgtgaccgttgattttcctacggagatagtaacggattagctcctcgtctgttggacggaatcttaatccaactggtaacgaatccattgataatacatgaagattctgattcattgatgctgctcttttaaacgaatcgcgagaagaagaagaacccaagatttaaagatacgaatcagaattatttatctatctcagagatgcgattccaaggtatcgcgaagaagataacaataaaaatttagagagaaaacaaaaaccctaaaaatggattcgatgattttggtaaagtgaagaagaaggcagatgtgagctttgatttggttttttctttccttttgtgagttctatatggtgatggcagcgcgtggtgtgtacacgcggcaaaccaagtacgttacgcggtttggaaattgttaaagtatggttttgcccttgagcgactttgggatattaactagatgcaggggtaaaagcgagaagtgaatgactgttgtaaaagaaggtgatgagaaatgtcatagaacgaatgatgtaatgacacgtggaaaggaatggaagtttcggtgcatgtcactttgtttttgggatggtgttacgcttttcttgacttttggaaacttgtcttttttaatttatttagattttttcgctttctttgacttttggaaacctaatcaaaacttctttcatgaaattatgtattagtaaaaagctgcataatcattaggatattcatcatcgtttacacggcgtaatcctcttatctttgcaagttacaaaattcaaaaaatcgaattaaaattctggagctaggaccggctaaaaatagagctagcaacaagagacgagagaggtccacaaaacttccaaaagtttgacgatatcaatgaagcttttcaaatacagagaaacatctatctaaatttactcttacctctctgctaaactctattcttagccatccccaatttgaatacttcaacacacacaagaaaaaataccaaaggctctccataaaaatcggaatcatcttcatctatataaccatgattatgttctcttcatttgctcaatcctcgggtcaacattaataaaaaagaagagaaaaataaaaaagtttgtgtaaattttttttgcacactccacagcctaaacccaacccaaaatcacaaaaaccaaaaaaatatataataatgggtggctgtgcgagtagacccaaggaatcagacatgcaaaacgaagaaggctctgttcctaacaagcctgtctctgaaaacgtagtagccaaggtaacaattaatctctaggttttaaatatgaaaatttaattaggttttgttaccgaaccgggcttaaccggttatgatcttttggtatgattaattaatacaggagaacaacacagaaagcggtgagaaacagaaccagacagtggctgagaccactgaaacaacttctgtcgaagctaaggagacatttccggtcgagccgaccaaggaaacaactcctgctgttcaaccagaggttgcagccgtcgaagagtcttcttctgctgatgctggtgaggctgcagtagttgcacctgagaaagtggagaacgctgcaacagaaaacgctgaagcaaaggtggaggcggttgccgtagctgcacccgaaaaggttgaggttgcagtggaagcggagaaaaaggctgaagctgaaccagtaaaggctgaggctgaaccagtaaaagctgaggctgaaccagtaaaggaggagagtaaacaagaagagaaagaagctgttgtcaccgtttgatgattaattaaatttgtgaaagtattttgaatgttgttgtatgtcaccttggtttgatttgctactaccagattggtttggcttttgttgttctttgtatctcaaaatgattcttctttgattcaattaaatataaatcagttttgcatcgtgaaaatttgtaatcaacatttcttaagtcgaacgtgttcgtgtgtgaattacgatctctgattcttttttctccggaagatacaatcgaaaacattgaaagatgcaaaatcccctgaaaactaaaatctttcatttgatcattgatctttttattcttgtgatgtgactccatctttcatttgattgtatatgcaatcttaagtcctgctcataaatcgtaattggcagtgtcaaagaaaagaagaaaaaatatcaaatattactaaatgatttcaatttaatgttagaatgttaagagatgtttgactacttcacgaggagatgggatctgcattgaaatactacatcgaatattgaggatttggagactgaatattaacacttagaggatgaatgttggcagttgttgacaccggaaatcaacattgcatctgttggagtatattcgaatgttttcaagtggcaatgaatccctttgattctgatattatctatctatggagtcaaaaacactcttgttttgtatctggtaacttgcggacacaagagttgacagttcatcattcatcaggattcggaggattggactagtgatgaaggttgttgtcgcataaacacttctggttttaagcagtatatgaagtatacggaacattgttctcgtcgctacaacaaaacttctatcatcatgttacctcaatttgtggtctcacggtggatggattccgtacaccttcctccaaattctgatttaactctttctattggtataatacaaaacaaggtgtttacgtattttgttttatccttgtttagctagctttctctaggtctagctactcttttgtgatgaatgacttgtgccatctatttatagtcgttttttcttcttcttagttcttgtttggccaaaagagaaaaaaattcaatttcaatggttagagtcttgagaaatgtgagaatggtttgattcagttcctcttaccgttacttcacggacttttttctgccgtcttactctataaataaatatccaaataactaattaattacattatcaaataccatttcctgcccacgcctattaaataggccatttaatatgcaaatatacgagtagatattttagtagtatctctaaccataaattaatagacacgtgaatttccccattaaccgccaagaaaagacaaaagaaattgtagaaaatcaataaattagctcaagaaatctgtaatcatttttaaaattgacaataaaaataaataaatataccgtttatttttcaagtaacggagttagattgatttctataaatagttaaaaatgaccaattcatcttcttcttcttcacaaactttctttctccaacaaatattattcagtgccgagtcaaaattagtgttgagaatttgctgcttctgatcaggtctgttttatttaatctctgtgaattttattacttcttcttgttggatctcataatgcgatttatcagctgcgattaaatctgtttgattgaaatttatgcctgattaggaaaaattatctctaatagtggatcaatttcgtttttttaattcgggttttcttgggttatgcagtgagtgaagaaagtttgaagctttgagtaactttgaaacaatggaggtatttggaaaatctcatgtggttgttggctctgctaatgttatttacttatctgctatattgggtcacgaaggacccaatcacaaatgtgattggaaatgcgagaatgagaatgtgtgtgggaatatgtaccgttgcaaactaactgggttgactcatgtttgtgacaagaactgcaaccaaaggattttgtatgataatcataactctttgtgtcgagctagtggtcggattttcccgctttctttggttgaggaacaggcggttaaaggagtgaggaggaagcttgatgatgagagtcaacaacaaccttctgaaagttgtgttaagcgtcgtcgacgtgatgctcagtttcattcttctccttttgagaggtcttttgctgctgtgagtcctttttgcagccaagctggtggagatggaatggagattaactagttcttttctatctcacctagaataacttgcttttctttttcgttttggacaagtatgcaataagagatatttactcatgtgctcttacagagagtctaggcttagctctctgtctgaagaagcacttttatcttagtattgttgaactctatgtagtatttaacgtaggagagactttatgattctgctactttgttctggacgttcttgttttcgctattattaggtgaagtagaataacacccttgtttcagctttctttctagtgctgtctgatattctcctctcgcaccttttcttagctttgtatcttgtttttgcttgcctcttgtaccattggtcattcttttaagtttattgcgacaggtttttgtcacattgctgaaaattgcagtgtaggtttccaccaagtttttcaagaccaatttctttctggtttgtcatcttgtagaatattcctcttcatcctctcaatggagacattgttgtatcctatactttgttcaaatttaacttacttccttgcagtgattgatgagcactagaagttctgaaagttttttctgtttgtgcaggtttcacaatcttgccatgcaagagagtttagttaccattatttgactgttatgtttcttaattctcagtgtttgaggagtaagtctaacaattggaagcttgaatttttctttgtaggtaggtctatgtttgtgctcagcaggcagcagaggaaggacggttgtcgaaagaaatgatacccgacgtaagattgcggatgaagacacaagtaatctaatatcttacatcaatggaactgcgtgaaagaaaggaaagggttggtgctcttctttgcattcaaaaatggatgattctggtacgtagtagcttatttacaactacttgttctttacttaatatatccagacagtgtaataggggctaaaagaaacatcaaataatatatgcatttcccatgtaatggtaattgttggaatggaaaatgttattttgtcagtgaggaaaattctgaggtggatttatattgaactatatcatataagacagaaaggcgaaggtgtggtggttgatgtgacaactatcttactgggacacagagaattttgcccaaaaaagttggcaaagtatcaattgttggctcgtcctctgctataaggtacaatgctggaacatttctccttagctattgattattatgatggaggttatattcaacttagagcaaaatatgtgaagtagatcttttgttgtttgaagaaatcaatgtaatatctaaattatgacatattcttacagtcttctgtgcctttcaatctgctacaatgctttcttcaactttgcagaaatctgtacacattctgattaatctttgacgttttcttaatcgaatatgaattaagtgttgtttcttctgtatcaaatccaggttagaggatgaaccgagcagccaaatcttcagaagttcagaaccacctagtccgaatcataatcagaatcaaaacagcaaggtgtggcagtggctccctaaggttagcatcaagatccaaacctaataccttgagcatcatcaatctacagagttctccctccacattcagcggcattttcgtttgtttttatagtaaccactaagctcaatctactgaaacaaaatatctcgttgttgatgatattatacaaacaagtaaaatgtctatttgagcttctttcatgcttcaaacatcatctaaattcagacacaaaacaagcttctctatacacacccaacttttttacctaaaaagaatggagaaattgagcaattttcagaaatcagaactgagtaaaatgtggcaaagacgataaatgggcttttttcaggcccagcatatcatatataacccaatgggagatgagaaggagggagagataagactgagaagcagagaaccgaaagaagaaaacaaaactctcgaagtcgcaacagaaaagaaacgagagagatatggtggtaggcggcggaggagaaggagatcagaagagaagcagcggagaaatgatggcgatggcgagtttattcaacgatcagcagaatccaattcaacagtttcaggttaaattcaaagaagtagaaactaatttcaagacatggttgtcgaaacagtcgattccggtggaagccgccgtcgtatccaccatgagcggtgtacaaggagctttcattggtggtctcatgggaacactctctcctgaaatgcctcaagccggcgttgaccctcaagccatagcttcgatgaaacaagctcaggtttcaactctatataaaccctatcctcattcaaatgtttgtaaaattgaggtatgagaattagggtttttgaatctgtaggctcttgtgggtggtccttgggtccaagctcggaattttgctgcaattactggtgtgaatgctggaattgcttctgttatgaagcggattagaggcaaagaggatattgaatctgcgtaagtttcattctttgtgatttggttaccattgagaatgaaagtaatggttttaagtttgcagagtggtggcagcgttaggatctggatttgcatactcattggtgagccaaggattgcaaggacaacctatgaatgcaatcactactgctgctggttttgctgtttttcaaggagtgttttttaaagtgagtgatcatattgaaaactctctctactcatggaaactgtatataagcattttttttggtttgattccttagttgggagaaagattctctaaaccgagtactgaagatccatttttcacaagaggaaggacaatgctagtgaagctaggtttggagaaatacgagaagaacttcaagaaaggacttttaactgatcccacattgccattgctcactgataggtaattatctgaactccatgtaaagtttctgctagcctttgtttatgttagcaactaaagttaatgactttattaatccagcgcgctgaaagatgcgaacatcccaccagggccaagacttatgatactagatcatatccagaggtttgaattcaacttctctgatactccattgatcaaatatacgaataattgctgaatttgtgggagctattctctgttcttttgtgtatagggacccggagataaagggcaaacgaaagtaggagccatgttgtttaatcaaatatgttttgatggtaacgatcttcaaacacatatgtaatgccttttacttttagctgctattgccatgaagagctcttgttagatacttctgtttctattaccaatgtttgattatctttaaaaaaattgagtagttcgtctcaaatcaaattggattataggttctgaataaaacgaaaatgaaatatgctttgtatgagaataagatgtttatattatgtatagttgattggcttaagatcaagactcgataaaattttggttcatacaattggccaatcaccaaagtgattcgatcaactcttgttaaattatttgattctctttctacctaatttgtactgttgatgtgaagctccattaattctcctttattaagaacaataagcgtgaccacgaaagaagaaacttcgtaagacgtctctgttatgtcgtaatcactaaagttacatgaatacaataacgtttttttttaatgcggtttttatgaaggaaaatattaatttcctatatcaaaatatctccattagaacaataagcgtgaccacgaaagaataaaactttctgagacgtctctgcaatcacaaatgttgcatgaattcgaggaaatataacttcaaattcccctaaaacaaatttttgtcaacatggttaaacacttttttctggacataattttaaaggattatgaagaaaatgaaaatttgtaatacttatgcaaaatttctttacatatctttttaacacattaaactacttggatcccacaattaaaaaaaaaaaaaaagctaaagacaaaataataattaatctatctacgaattcgtaacaacgacttcaagagaggaagaagagagacgagagatttggtccatgagaaagactatacgagagtgatagtcacgcgcctgatctaaagactcgacctctagctccgccagttgcgagcagagtctctcctcggcctcctccgccaccaccgtacgccgccacagctgaaccatctctttcttcatctcctccatttctctctccaactctccgttcctcctccgtaactcctccacttcttccgccgccaccgtcacataacctcctccttttcccattatgattatgtttcttgtatatagacaacaatttgagttaggtggttttgctgcttcttgtgttaaactgttaaattctcttctatgtgttgatggtccttttaataggcatattttgagttttggtatttgggattgcaaagtgtctaggttcaatgtatctcgtgttctcttctttttttttttgtcgacatcattgtctgtctactgcacgtggtacatatcatgcaagactatcacaataatttattccttttgaatatctgcatctagaattatcttcaagcaatatttaacattaaaaaaaaaaacatttagattaaaatataaattaggtatcgttatcagaaaatatataatttagatatgaactagtattatactaatatgtaaacacacaaaagtagataattatttatacaaaatcaaatacacaaagatataccacactaatgatgacgaatattaattagatatatatactagtaacctaataggtttaaaatgttttttgggggctgttttattacattaatctagaaaatgcaacatcagtacatacatatccatgcatgatagtataagtatatctggcctattgtagatatgtatcctatatcccaaatttgacacatttaagagaaaatctcatattctatcaaaattttcatataatttgctcatagtgattaggcaaaaatcttatagttatattccttaatagcttattaagatgtcaaatttcttttatcatcatcaccataattattagatacacaaaaaattagaaaatcatattaagacgttaattagtattatgcgaattagttgaatattaggaatcggtgaacgtcgtggagatacatatgggtgacgtcaccaatcacgtcgatgtaattgtcatatcccatttcttcgtgcctccagtggaccacttctacttatcccaagtcaatggccgtcgcaccaatgaaacacgtaacgattattcctactaattcattattcttgaatccaccaatattagtcattaaacccattaatctaggccaaagtctaagctatctctatttcctaaattgttcatggaactatagttaattaattacagtttggtcacccgatatcaaaagaattatagctttgtaaacagtcaaattcgatagtcgatatcgtagacaaatgattccaataatggtagatccttcttttcaagagatatcaaaatcagggataaagtagcataagaaaaaagccaaagaagaaaaaaaaatcatgaataatcgtttgcccaattattacaaaatgccaaaaaaagctgcgacatgaacaaattcggagcgtgggatgatcacattttagaccatacaatttgattgagttcctatactgtccaggttcaatgtatctgctttcttgtccggtttagtcttccaaaattacatactggctcacttcggtttaatttattctaatttggttcaactttgtttagaatgaaaaaaacacacacacacacatctttcttgaaacaattgaagtttcaattcatttttggcaggcatggtttactccggtaccgttgttgattaaataagaaatggtaataattttaaatctacgcatggcatattctcatcgtcaacggatactatctcaaatttattatgatcaaaacagttaattaacagcaaaacaaacaaaatcacgtcaaaatcgaatgtcaatattcctcttaatttgccagcaccacatatcttcatactattttaaatgatttttttttatattaacaaaataaatatataattaaatgaaatagaaacagaaaatgacccttgaaccaatggaaaacttacacaatttcatgtttcacgtcccctaaagactattgttatggttccatagaaaaatcattgaaccattctctcctacggtttccattgaccacaaaaaaaaaatcctgaagttgtggaaaatttccatgaaactcatgtacccaaaaaccctttatttttttctacactcaagtttcaattaactcttctacgattcctttgaaaattatggtaatgtaggatttcatggaatttaaacttcaaagttcttcgatccccttcgagtctccaatacctactagttccataaaattattttgatagttaagattgacattagatctcactcatatattattacttcattacttaaacatggtatcattccaaaatattatttgcttccataagaacttttgtaattaaaagtcaagacaaaatatgcaactagtaccagaaatactaattcattagaaatggagttcaacaatttgtatgattatcagaaattctaatttattcactagaaatggattcaaacatttaatttatgttgaaaacataacatattaccatcgatctatatacatgtatagtgattgtcacatacacaactatacataacttatgagaaatatcttattctacgaggaagagacgacagaagaagaagagagacgagagatttgatccatgaggaagagcatgcgatcgtgatagtcacgtgcctgttctaaagactcgacctccagctccgccagctgcgagcagagttgctcttccgcctcctccgccacaaccgttcgctgccacaacttaatcatttctgtcttcatctccgccacttctctcgagagctctatgttcctcctccttagctcatccatctcttccgccgccaccgtcacgcatcctcctcggttcgccattaagattctttgtgtaaaaggatttgattgtggttctaactttgtttcttgatttgttgagtgttagggtttgattatgtttctttaataggcgctttgtgtagcttttgcatgtccaggttcaatgtatctgcttcttgatttttatttctcctcacttttgatttcggtcaatattttctccttacttgaaacttaaacatactcatggcttatgtatgcatagaccaccccaaaagagaaaatttactatttttttcgaatgttcaatttttttttttcgtttttttatcacagtttcgctaggttcgatttaaatattttttatatgaaacttaaaccaaattaatttcgaaatttccggtttatccatgttattaactagttttaactttaaaattaataaacaaattgccgtctatacaactataaattgataaatggataaatatatgttaacgtgtaaatagaatagtaattaataattctaatgccgtggtttacacaaattcaatttaattatttataaatctctggtccgtcaaatttgtaataaaaatgtgttggtctgatctctgatgtatgtatgtggtatatattgattacattattgagttagtagggcttgaaataggtgacgtctgaagccaatcactatagtgtttctcactttcttgtgatattgtgagtttgtgacaaggatttattctttagattattaactaacaagttaataatttgggaaaacgctgccgcttaatattgcgttacttatattatgattgaagaactattatgggatatttcacgacatcatacatctacaaccactataaaatagaaaattagtgtactatcaccaaaaatatatttctcctgttccatgaaatttgatgttttagatttttttttgttccataaaaattgatttcttaggttaatattattattatttttattaatgactaatagagagaggaaagaagtagaaattatattattaaattaacaaaaaaataatataaataacataaaagttaattttcttaatttgggtgaaaaacccaaaacatcattcttttaggaacatagagaatatataatagacatttacaacttatacatttgttgataacatgcagtatgttagtttgaatacatatttttcacaacagtaataataacagttgttagaagactaaactacattgtaagaatcgctttctcttgtaatgatacaatataacatataacatttaaaataaaataaaaatctgtaggttttaaaatgttagctacgtagtccataacttcaaaaaaccaatggttttgaactcattccatagtgatgattgcaaatacatattatctggtttacaaaaaaaaaaaaaaagtgttccaattatctagaaatgttgggcctaatgcttaaacagtaagcccatatacttaaacatccgacttggcgcatttgcttcaccttctctaccaaaaaagcgcgtgagattcaggttcactgtatacattaagagcctattgtcttgtctcctgtaaaaccagaagaaaacaaaaattcaacaaaggataacaaggacgtggctattcttcattggctgcattcacaagagtcgaatattaattagtaatttcacagtatagtacattaagattaacgagacctattgtctcctgtaattgaggcaacaagataagggtaaaacgagaaaaacaaaagagaacaaagacgtggctatttatcattggttgaattcaatattaatttaattagtaatttcacagtgttctcaaatcgtgatcgtgtgtgtttcttctacctctgaaactctttttgtttatgttgatcatcatcatcgtcatctgcgtgtaaaacacactcacgccatcgttgacgtctcagatcttcacataaaagcttctattatcaaactctcttcctcacggtaaccctaactatctgtaatttatctctctacactttcttcatctcttaatcaccttaatcatcttaagctttgtatttctagatccttctcccaaaacaacgattcgtgatctccgttctcatagatcagtttcggatttggatatttcttagggatttgtgtgagatatttttagaattgtttcgatttagggatttgtgtgaagaagatggattttccagagaatttgccttcagatataggaagattagagcagattgtttctcatttcttcccaaaagcattacacatagttcttaattccagaatcccttcgttgcaatctcgtggtcgtactcgtgagcgtttatcaggtcttaacgttagaaaaagtgacaaatggtttaatcttgtgatgggagatcgtcctgctgcgttggagaaattgcattcttggcataggaatattctggattctatgattattgatatcattcttgtccatccgatttcaaacgataatttggatgatgatgatgatcatagtgattctgttgttagatcagctgagactgtgattgagcgttgggttgttcaatatgagaatcctttgattatgtctcctcagagttctgactctgcaacgcgttaccagaaggtttacaagaaatctatcattctgttgcggtctctttatgcacagactcggcttcttcctgcttatcgtgtctctaggcagctgagttcttctcttgcttcttctggttatgatttgatttacaaggtttcatctttcagtgacatattctctggtcctgtgacggaaacaatgaaagagtttcgttttgctcctgttgaagtgcctcctggtcgtctttgtgcatcggttacttaccgttctgacttatctgattttaatctcggtgctcatatcacattgcctccgaggattataactgattatgtgggaagtcctgcaacagatcctatgaggtttttcccttctccagggagaagtgttgaaggccattcctttactggtagagctggtcggcctccattgactggttcatctgcagaacgtccgcatagctggactagcggctttcacagacctccagctcaattcgcaacaccgaaccaatctttttcgccagctcagtctcatcagttgtcacctgggttacacgatttccactggtcacgtacagatgcttttggtgacaatcaccagctttcacctcccttttcaccatcgggttctccatctactccaagatacatatctgggggtaacagtccgcgcattaatgtgagaccagggactgctccagtgaccattccttcttcagccacgttaaatagatacgtttcatctaacttctctgagccaggtaggaatccacttcctcctttttcccccaaaagcacaagacgctccccttcatcgcaggactctttgcctgggattgcgttgtacaggagttctagaagcggagagtctccttctggattaatgaaccagtaccctactcaaaaggttatgcttcttacatcttatgtgtcttgctcaatgcaagaaaaatatcactatattttgtattgcctcatctgatattttgttgatttatttatatctactcttcagctgtcaaaggacagcaaatacgattcaggccgcttctcaggagttctgtcttcgagtgactcaccaagattcgcgttttctaggagccccagtagattatcttcccaagacgacttggatgaccctgattgttcatgcccttttgatttcgatgatgttgatgagtcaggacttcagtacaggttggctttatcccactacctaacttgaatcattcaaaggaaatattatatacttggattagtttacagaaatctttacacatagagctggtcaatgacaagatgccatgaagaaaacactaatgtgttggctgttttgtttaatgtgaaattgttggcattcacactctatacttggcctttctcttactgtttctttatcattttttggtctgtcaagttcacttcttcttgggttttttagtctttggtagtaagaaaatgacagatattttgcaattttttcgatgcagccatagtcttgaccggaggaaaacttcaagctctatatcgcagtcgctacctctagggagaagatcatcacaggacgcagcggttggtgttctggttcacatgctgaagacagcaccaccattacgacaagactcaagcacttatatggcgtcaatgtctggggttcagagagaaggttcagtgtcaggtacagaatctgaattttcgatggctcgtagcacatcagatgcactagaggaactgagaaactacaaacagctcaaagacttgcttctctccaaatccaaaagtgggtctggaccaactcgcgtccactgagccaaatcaaagagcgatcaagatatgagttatccgatggttgtttgtagatatgaatttgatgacgaatacttaactctgttgtatattgccaaagagcaatcacgttttggtttctgtaaaagaacttgcctttgaatatgcacataaaataaactaatcaaacttgaatcttttcattatgaagtagtgaaatttattgagggttttgttgttgttgacaaatcatgtgaaaaccttgttttctcatctggacctctttctagaagaaacatgaaatacacaaatgttgaaaaccggtcacctatactcttttaagatgagtgtgaaacgaagcaaagagtcacattgatagagagatcggatgcatgatagttcctactgtgataacaagctatttgggtataaggtcacaagatgtgcagcacaaaacgagagagagaagagttttaaacgcaatgcccatttagataaaaagtacaccaaaaacacacacacaaaagtcagcttcaaatagccatccacaataagcctttgcatctacacaaattcagcttgtgctaagctttctccaaatctttgcgtttgttttttacacaaaataaagctccaaagccttgcctgcctttacaaaaaaactgacccaaaaaatgtgtcgtccgtctcctgcacaactactgagaaagacaaaatcataagaccaccgcagataagaagagattttagtttcgagaaagtagctcttataagatattttacctcctctagatggtccaatgactctttctcagttctcacgcattctgtttttacactttgatcacaaagttacaatttctagcaggcttcagaagagatattcccagtcaatagcgtccctcgaaacccttcttcgatatcttgagcccccggtttcttttcacataactcatctgttaagacataagatgaatagttttacatggacatctcgctaaccagacagcagaataatggtaaatttggttaccagcaatatcgcggtgttcatgcatctctgtatctctcacccaaagcctgtcgccggggaatatgttcatgtctgcaagggttgcagattcctgatcaatcacttttgagcctttgtggagttcctggttttccttcatcacctgcatattttattgaaaccccgttttgttgtgtttcttcaagttatctacagaaacgaaaaaaacactatgtctaaaagaatcttaccccaagtaattcccatatcatcatctttaattggtatacagtcgttgtcgcagacactttcaggcttgtcaggtttccataatttgttctccgagatcgctttgaagtacgccgatccacctcaaagctagagtcagatgcctctaacattgcttttggagcttcctttccacgcacaaaacagacaaatacatctccctcagagtaactaagtttctgcatcaactcacagctttctctctctcctatgcattcctcgcaaatctagcgaaaataaaagatcctgttaaatgcaactctagtcatgaagtcatacaataataaatgtgaatgcaaatgatcacacttgcttttaagaaaaagaaaaacagtataccgtaacgcatctgaacttcatatatggaccaatgtgaaatactaagccaacattgccattcaatattacatcacactctcaaaatgttgaccaaaaaaaaaggctcaagataataatgcaaatacctctggggatgccctgagaataagctgttgagcatcaacgtccatattatcatccggagaagaatccttctcaaggtcaatgacgtctggggatgaactttggtctgtattgccaacctcaataaaagcagatattccattctccatgagccctccccactcgtcacagaaatatttccaatcaagctcagggatgattgttagcttgtctgtctagaaaaaggtgcaagagtactagagattagatcaaaatcagaattccccaagtctgcgtttgacgctataaacagccaacacgagagaggatgtaaactgaatccgacaatcacgataccaatttgttaaattcagaacatgattccctttatttctcactgaaagaaaatcacaccacagaaccacggaaccatactatcagacaccttacttccaagctctaaaaccagtctcaaaacacacagacacctccccacacttgattaatctcttatttataatatccttacttctacagaaataagttatttatgttcatatgaaaaatatttgttgaagcctctctatgttgtgatgaacacttatcaattttccattcagatattggctttactgtatcaaacagtttaaaaatagattaggaatcatctcacggtatatatgatgcacttacagatggatttttctgaaaatacgagccacgtctgcagacaagttcagggagcctttcaaggagtcgtgtatgctgaaacaaacaaccataggaacaaaccattagttttatgctcatagtggggggatgaaatgaggcctgctgaaataagacaggtcataccacccgcgtttactaacatatattgaaatatttctatgagaggaaatagagaaagtggtcagggacactgatttagaattaatcacttctgtccacatagagctttacccccacaatatctaactgccagtaaattggaaaccgactcactgccgagcaacagatcttacctttttgcatttgagagtattaatgactccatcaagacgttcaggctctggtgctgaagaactattttttccagtcatgttaatatagattctccattgcactagccacggagaaggcaacaagaaatatcggctttgtggcgttaatggtataccctttcccgtggctaacttctcgtgattttggcgctgcttgaccttcaatgttctgttgcataaaatagaaggtaagaaaatctttaagagtataacgaccaacaaaaaaaataactaatcatggctaaccttagtgaatcctcgaagcatgcaacctcagaaagtacctctgtgcaatgacaacattggctggagtccacaggaaaacaagtacaatccaaagtatcttctgacatcacttttagagcatcttcaaaaaggaatgaccagaaattctctggaactacaactcttttggcccctggtgcttgctctggcatcagctcaccatgattgcacgtaatagcatttgtgggccccgcatctgcttcagtaggagcatcaagatttttcctttttatccattgctgtaacctggaaacatgctattacgttttagaagcagctaattgtggaaacaccccacaaaataatagtaattaagtgctccataaaataaagcgccatctgcatatgcatcaaacttacaaaagacttgaacacataccatgctctagagatataatacattccgtcctcgcactttcccgaaagaacatcatttgctatgcttttcatgaatgttcttcgatccctataactgtcagaagacacaaccatgcgagcaccatccataaggcagtccctgcagtagtcccctttccctaactttggtccgccattgaactaaacatacgagaaaattattccatcagaaataataacatagcataagaaaaatgttgatagtcgaacagaagtctgtctactggaatctagaaactataattttttctgacaaatagttaatgatggcagctgatgcaaacttgaaatcaataaagtttccgccccgaaaaaggaaagaaactaacacatgagctacacaaagtacattgcatacctttgattctaacttgatccatgcaagttcagatatccgcttcatgcaattcacttttgaggcatgaactttcccatgggaacacagtaaaggggtgttgtccaaagcgctacaccatacaagaacaaatataatcaagaacacttgaaagatgtaatctgatttgctaaacagaaaatcatatttaccactaccagttagagctggaaactgaaataaaatataaattttcaaagggaaacaatatttagaagtttggtgtggggtacaaagtcgccatcatattctgataaattatagacgatgcatttgaatgatatgatattctgttgcagattttaatgcatcctatgttgaaagcagtgcagtatgtagagaataacaacaaatgcatgtatgaggagctttacttacggaggtaaagtggtatcagcccatagacgaagccaatctgtggagatccaaaaatattgttcttcaagtgactgaacagcagcttctgaaaggattgtccgtacttcttgcctcctttcagtcaaagcattcaattctttttcctttcttaaattatattgcttgcaactctcaaggaatactgcattcatgttattgatccattcagaaagatgttttggaagataaccacctttaagctgtttaacttctcctttagtaatgtcaataggattttctttttgtccttcctgattttcctgtttatcgcatctaagactatacatcagcatataagcatcactggatgagaaaacctctgacttaatagcagacctacagtctgaagagcctgattgaatgccatctgtgatattcccactactagccgtaccattactctcagattgtggagttgaagaagaagcttcattacatggacgtttacccagttctgacacatgttcatcatcaaattcccaccacaagccagtcttttcatcttttatgtgagcaacataatgtccgctgttaacagcgcttcctttgtggattaacacagcagagagatcgtatgtcaatttgttttgagaagactctgccaatctcgatcccatatccagcacttgaggaaaggaaaatgatgaggtgattttcttcttcgccgttgtctattgacatgatcaagccaaagaaaaggaaaaatttatgcaactttaacaaggtcttatctaagattaaattggacagtagaaatgattagatttcagcatcaaaacatgcaagtttgtatcaggagaaggagggaaaagatatgagaatgaccatgagtaaaaagtatagtctatgagaatgaccatgagtaaaaagttgataactcaatcagccaaagatagcatacaagaaaatcgcctcagcacgtgtaacacacaaagatagacaaaaggtatagatgcttcctgttgaaaaaaaagtatgcaggagatgattggatttttatgcaaatcacaagaaactgactagtaaaacaatggagatcattattctcttgtttcatgaaccgcagcatcagcatattaagatcgaggaaactaccttaggaaggaaaatgcatcgtttgagctgaaaagtgataaccggaggtagtgtgcgcagcttaatgcagcgtgtggcatctactctagcattgcagcttccacaaaaatattgattatcgccattaagctgctccaagctaaggtaatcattcaaactagcatccaacgatttgaggcccttaacattcaactcaagggcataaaaatcctccatctttgacgaagcttcggaatccctcccacattttgagcacctacaagacaataaacaaaatcaacagatgaccatgacaccaaaagaacagatatgatttgtcatttcatgattcatcacatttgcacattagtaactcagatgtgccttaaagccatttaaatcttcttgaataaaaaataatctcaatcttacgtggtgacatgcgagacactaccactgaagagatcttgaactattgttttggctttgactccagaatggagtaagcaacgctcaagcaaggaaagaagcaatgtcaagaactcatgggtatcctgttgaaccccattatccaactccaacgtcttgacaaaagcatcagaatcaacaaaggacttttggctagcatgcaactgtgcaaaaagccgagcaatctgatccaagactggattctgcttcaagacatgaacctcaacagaaaaaactccttctcggaaagcagtattcatgtacaaacactgaagtatactgttggcataacaagtagcacccaaattagtcagaccagcgggtgtagattcagaatcacgacggtccaaggtcggatctggaccaagagactgaataatctccgacgttttctgccacaaaccagatttccggcttccattaagcggtggaaccaagccacaaaagcagttaggattgtcacgagtgtttacacgacaaccttgacaaactggcttccaaatcatgaaaagttggttaatgtcatcatcagttacatcattagcctcgtgaattttcctgcaaaaagaacacattttttaaacaaaaagatgctagctttgtgaaaagctaatattcaagaaggtgggtttttgtttatcgtaccggagaatctgagaagaagaatcaacagcgtctggtctttgtctcttgtttttgtttcgggtgttaggtctactcattgtgtcaccaccaccagaaatttccccagtaacaatcgaaaaccctagaaataacgaaaacacagcaacattgttaacacaattttgattccgattaacgaaaatatttggaacaagaacaagaaattatcaagaaaaaaaaaacctaatcgaaaatgccaactcaaggagatgaaatcgaatctagggttaaacaattcagcatcgaaacccagatcgagaaaggaacagtgataaaattaccgaagaaattacaacaaaacggagaataaaaaagagagaaagagcgaagaagagagaaagtacctgagagaatctacaaagaaaagtttagcaagtagagagagcttcacaagctcaaacttctccgtcttcttcttttactccttcgtcttcttcttctccacagcgaaatcttttttttttttccttgttaattctatttcacctttttttttgccctttgttctctcgtcccgcgctctcttatttcagattatataaaacatcttaagaaaaaaattgaaaatcatcaactaactaagattttattacagttttcgtagatttatatccattttcatgagatttcataccaataaaacccataaagctaattttagatttatgcattaaaatgtcccaataaactcgaattgataaaattcaccagaatgagccaggtgttgtgagatttggctacaatctatgagacaacatttgaccttaattaagtctaaaacatcgtttgcaagtagtaaaaaaaacaaggattatgtttgtgacaaacacgacaaaacatttaagaaactttaaacagacaaagatgaaacaggaatcatcaaccatgcgaggatctcttgccacttgatcggctatcatcataacgacttcgacccctgcttgagtattcacgctctctgcttactctatcatcatcatcatcttccttacccgttgctcgtcttccatcacctctgtacctgtctctcccatgcttatactcttcctcatcatccttcacactttctcgtctcggtctgtatctacccctatcatcatctccttcttcctcaatggctcgacctctatacctatcgtcgtcttccttaattgttccatatcttttaacagcatcatcacctctatatctgtccctcccatggttatcgttgtcctcatcctcctctcttttgtgtttacgtcctcgttggtaactttcattctttagcttcttcctattttcatactcagcctcactgtcatcagagtctctagcaacttccttgccacgagaatcacttctatacttgtccttgccatgtttggtcacatcttcttcctcttttcttttctggctcattcctgcactgtaaacttctaccttactgcgcagttgtttcttgttctgatactcaatctcactgtcatcagagtctcttgcagctttcttgtcatctctagtatatctgtctttcaaatgatcagcctccacgtcttcatcatctcttttctgcttctgtcctccacggtaagcttcttctttctttcgcagtggttgtttattatcctccgattcaggctcgctaacatcagaatcatgcctctttcgtccagctcggctttgttcatcatgtttgtcccttaattctttggaaccagatcggttggaggggaggctctttttgtgtgacttcctaagtttcttgctatcatcactctcaacttcttcagattcagaagagacacttcttttccttctgctgcgtttctttgtagtctttgtaggcttcttccttcctctcttctttccatcatcactgtcagagtcagattcagaatccgagctgctagagtcactttcactttcttgtttacgccccttagccttcttcttagagcgccttctacggtcacgaccatgctcatcagattcagatgaatcatcatgtcttctcttcttgctctcttttttcttatgacgcttcactacatccacatcatcatcatcaccacctcgctgcttcttgctttcctttaccttagcatctttctcatccacatcctcatctaccttcttcctcccactatctctgtccaaaaaagaatgttcccgcctctctttcaatctaccttcaaaaccctccctcatcggctcatcatcaataataccctcctcagccacctgttgctgatcaggcaaacccaacgcagctcgaaacgcttccatctgcttctctttcctagcagcaacctgatgagtctgagtattagaaaccttcgaatcactctcttcttcattagcagcagcagcagcttcaagactcactctagcttcctcaagcttctgagcaatctcaatatcagaataaccctgatcagcaagcttatcctcaagaatagcaagcttaagatgaatctgacgtttacggtcatgctcaaggatagctttattgggtttcttagataaaccagcagtaccttcatcatcctcaaaacctttcccacctttaacaggcttaccaccatttctaggtctcacaaaaaacttattcgtctgaacataaccattagttcctgatcctcttgctgtctgtaaccctattccgttgtacatctttcaactctaatttaccaaccctgaatcgaaaaaaaagcgaagagattgggtttcagattcaaatcgaaagatctgtcgatacaaagaaaccctaaacgaaaccaaatcacagtatgaaaccaaacagaaactaaaagcaacagatcttagattgaagtggaaaacaaggaaaaccaaaattaccagtgtcgtcgtgtttgagagaagatgagagaatcgtcgatgcgtacggactctcagaggagacgacgatgcggaagatagaaccaacggaagaggagtaacaattttttccccacaacaatgtctgtctataagtattatatgggcttaggcccaatatggttttatgttggtcaaaggcccaatatggttaagcggctatttaattttattcttgagaacttgttggcaacaaaaagggtttggtactattaaaactctgatgttctcttggtttttgaacagaacaatgttcttcttctctgcacaaagaacaatctcgagtgttagttatctcatcaagatgttctatactgaggcaaattaggtgaagtagggaatctcagtaaattttgcagcacttgatagttatctccatatctgtttcatcacagtggtgtgtgtaacaaatgaaaatgtttcaagtcccatactgaatctaaacacgtgttaacatcaaagtctagaactaaagattatattacatgccaaacaaacaaaaacatgtcttggcaacaaattttgtcctgattttgattttataagcacattttgaggaattcaccaaaaacacttgcacaattggatcaattccatcacaccagattaaactttgtactagattaaagaagaaatcatatgtagtaactaaagtagagtaaacaagagagaaagagcaagttaactaccaataataaagtgtaagatcacatgcaatcgtaggaaaaccttaagtttacttgcaagaaattactactactaaaaccaaaagaaaagaagaagttactatactactatagtctatagaccaaaaacctctactctgccaatggaaaacttgataaaatcaagtttaaatgttccaagtagaaatgaaacatatcagattcagagttaaaaggaaagagctactctttctcaagggcaaaacagaggactccaccacacctgaaagtccaaagactaatattgtcgttggctttgagcttgttacccgagacgacaccattccacccccgattcaaagtgtagtacaaggttccatttccagattttttcttcttcatcacccatatcagaaaacgtaaactccattctttagagaattgattcacgataatcgttttcacaccaattttcttggtgtcttcttcttcttcttctttatctatggctatggctcgagactcctcaggagtcaagaagtcgtttctgagtaacttattgaaaggtattaagagacgactctcgcttggcttgacgtcagttgcggtcaaagtcttctcgtagatcagtttgatcggtccttcggctcccttcatctttctcatcacatctaaaagccactctggcgtctctctcgccgcagtcagtgagaaaggatcaaactttggtttcttggatttaccactactttgatacctcttgcgttttgtgttctccattagacacgaagacggtgaagattgggaattacggattgtagggcttttagtctccgtcctctcaaactcatccgtgttgaagagcgatgaagaagtagaaacgttattatggtttcgtcgcgtgtatactctagtaaaaaaacactcaagggaagaccttggtttttgtgggagatgatccaagtgatgatccaagtggctcttttcactaccctcaaaaagagtgttggtttttgtaggagatgatccaagagtacgacgttcctcttgatcacataacctacccacgagatccaccaaaatactgaatctcgtcttcttttcttcttcttcttctgagacactcttgcggtctttggatattccttctctttcatatagcatatcagctttatccgccaaatcacttaaacgtgaccacatatccttccccgcagcatcgagatgatcatgatgatttctattcattgtgatcgaacagaaaactcaagagggagaggaaaaagtaattaaacgaaagagctcataaatgtagttaggagctccatttacattatggttttttgtttttcttataactaacttaatttgtgtaaagttaataacttttgaagataatcatagatatataatctcataatatctatccaaataaacttatttatacaccgttacttcaacagaaaccctaaacgaaactgatcccaacataaatgataaaaccaaacaaaaaaaaacgaaacaagaacatatctcagatttaaaaccaagtgtgagaatcgtcaatgagcttaggcccaatacagttaaagatcttttaaattatttcagggccatcaaatttgattttaaccttagacagtacgaccagtatcgagttaatatcagaagaacaaagtcaattatatccaagctaacaagtaacaattgtggttctgataaacgcacgagacaattatgaatggtggattaatagttgggtaattttatccactaaatgttctgtaatggacttctcaaattaggttccaaattatgtattgggcttcgaacaaattttgggccatatgggtttcagtattgactttactctctttttctttttctttgtgttaagtgtgttggatcactcgacctcgtagaacaagcactggaccataccaataccatacttgcaagatgcaacaacaagcaccaatgttgactttcatctactgaaataatgtatactggttgccaaaatatatatggagaagaaacttgaatattgaatttagttcaatcaaataataatcagtatatattaataaaaataagagatgaactttgacccttttccaagtgtatacaagaaaattctctcatgttgttttactttgactacttcaatcaaaatatcttcttattttgaagccattgaaaaattcaagtggaactctgctaactaattagcctgaactcgaatcaagaagaattttccttattctatcttcaattgcttttagccttttaattgattttttaagtatcaaaaaggtaatgcaaatcaaacttaatgagacaaatcatctttatttttatccaattttaacaaaaactttttttttgttaacgtgacaaaaactattctttttaaacccgtaaagccctcaaacatgcatccacaacaacatcaaacttgaaacaaaatcaaactggtatgattcgcgagcatgcactatatagtccttaacttccccgtgaattacaattagaatttccttagcaagacgatttattatttactaaaaaaaaatctgatatatatctgacaagcagggccggctcaaggggtgtgtaagtggagtatttgctcagggtccaaaattttttagactgaaattaagggccaatttgaaaaaattgattagatttaaggtcccaaaaaataaatttgattaaattagagggccaaaaaaaattttgcttaatttgtgggccaaaaaaatattttagtacgtggactcaaatatcaagatcagggccggctgatggggtgtgcaagtggagcatttgctcagggtccaatttttttttaactgaaattaagggctaaaatgaaaaagttattagatttaaggcctaacaaataaatttgattaaattagagggccaaaaaataattttgattaatttgtgggtcaaaaaaatattttagtacaagactcaaatatcattgagccggccctgctgacaagtgaattggatccgagaccttagggtgggccgggctatgtagtggcaaactaacgccggcggccgtcttgttggaatttgtcttagctaccagcgtgtcattcttactgttgttggagctaggtgccgtctacttttgttgcttttgatgtttgttgactaattaactaacgaacttatttagtgaattgagtttatgcgttttcttttttccgcaatgatctgataagaataaacaatgccacaaacataactagataatgctcaaactcttatcaagggatttggatcactcactttttaatttatttatcattatcctccaaactaacttacacgtgatgataaacatttgtataatctttggtaattactttttatctaaaatgcgaataaacttttaaaaatgtattcaacaaaccaatcacaaagcattaaagctactaagaaattactaattttattttaaaaagttataaaaccgaataataacgatcactacagtttatttgagtgacaaaaatatatgtctgataacagatcactctatgatttcccacgtgggctgctccgtttggcctttagaaatcctaagggacaatttttaatgtgtatttatacaaatgagataaccatttatggtaatatatcatcgcaaagtagtctttacgtacgtaagagcaaagcgtttctatcatttccttaatattgaaatggtgacagacttcaaatccctactaccagttatcggtacgtaagaaaccgtatattcattattttcagcaaaaatcttcactaactaaactagttaatgtgataatgttgttgcagacatcagtcctttactggccaaatgtgatgatttcgacatggctgaggatgcgggggttgtggaagtagtcggaaaactggacagggcatgtcgggacgtcggattcttctacgtggtaacaaattttcgaaatttgagtttcttttttaggggttttataataaagatgtctgattatggttggtgagtgtggatcagattggtcatggaatatcggatgatcttataaataaggtgaaagagatgacgcatcagttcttcgagcttccttacgaggagaaacttaagatcaagattactccaactgctggatacaggtttgtttccatatatatcaaaatatgaaccaaagtgggtaacctgctatatcaacgatcgttgcaattttgttcaatgtccacctttttccaaacacaataatcaatttggataaatgaacggagaaaaagacttctaacactaatatgtgttaattaaactggtttttattatcttaaaatatcttgaaaaacaaacatttgttgattagtttttacattcctgaatttctaatttccagagaacacaaaccgaataaatacgaattgaacacgccttagaaaacaaaaagtatatcttataatcgaatcactcatgggcgttgtgttacatatatgtacagaggataccaaagaattggagtaaattttacgagtgggaaacaagatatgcacgaagccattgatgtaagtttgtctaactagccattggtgtgagtgatgcatgcattcgatcgaagtagtaattctaatttctaactagctgatatggttgtaatctctctcttatggaccgcgacgaatacagtgttacagagagttcaagcaagggaaacatggggacatcggaaaggtcttggaagggccaaaccagtggtaagagtttgattgattgttttcttttgcatctaagtttgtgttaaaaaaatattataacgaaagggcgacaagataaataaagtgtgtagatgcacatatatgaataagaatagtgaaacgatcgatagtagaatgatatatattaactgaatagaggctaaccaaagtaatcataaaacatttaaaactaattttaatagattaatgacgttttaatttttgtaaatatatatatatatatatatatatatatatatctttgaataacccataataaatgacgaaatcatttatctctttgactatttatctctttgtgtattttttgctacctcttttttgaaggccaggaaatcctcaagagtacaaagatttaatggagaagtatattaagctgtgcacaggtgtgtttttaccccttttttgtttatcagtaaaatttataagtttctaatttcatttcattgtctttctttcttttagatctttctagaaatatcttaaggggaatctcattagcccttggtggatcaccttatgagtttgagggaaagatgcttagagaccctttttgggtaatgcgtatcattggttatccaggtgtaaaccaagaaaatgttattggatggtaatcttttactaccaccacttttcatttcaactttattatcaagattcatttgtagtgacttactctgcgtcttctctttttcacttgcagtggagctcacactgactatggtacgtaagcctgaactcgaatcaagttcactctcttcatagttgttgtttttttttggtctcaaacgggttatttcacaggcttgttgacgcttataaatcaagatgatgataaaactgctcttcaggtatctatcattgggcttatttgctatagccaaattttgttattcttttcaaaattggtaaaaaaggctaaatcgtaaataagatgtgatatgacatgaaatatgatgttgtgaaaaataacactatgtttggtaacatcatgatgtgtaatatatatatccaccttgtaataaaaaaataaaagcgatcgataaattaatcagtttatttcgattttgtcatcatgttgtaattgcaaataaaagatataatttgcctgtttagttcacatcctctacactcttattataaaccatatatcattttgtgtttgaaaaatggttataaagttttctttttgtttgcaacttctaaaaggtgaaaaacgtggacggtgattggataccagctattccgatccctggatcatttatctgcaacatcggtgacatgttaacggtttgtttcttcttctatctccctctccctctttgatctctctttcttttgttttgacaattcttgaaaacattggggaaacatatatgcagatactatcaaacggagtttaccaatccacactacataaagtaatcaataactctcctaaataccgtgtatgtgttgcatttttctacgaggtactaaaaacttgtaatactctttgtattctcctcttttggatttggattcatgtttatctttaatatatatcttgaatgaacagactaacttcgaggcggaggtagagccacttgatatctttaaagagaagcatccacgaaaagaaacatctcaagttgccaaaagagtcgtctatggacagcatctgattaacaaagtcctgacaacctttgcaaatttagtggaaaacagttaatatggttgatgggctttggatggtaattgttttacctaagcatggatttcgagttttagtaaaataaaagaagttctaggcgacaataaaaataaatgaagaagaaattgtaatttggtttctaatattaataaaactacaggtttgtttaccaatcggctagttttagtaatttgagtaaaaaacgatgagattcctctaggtagcttcctctctcacctagctagtgtttcgtcgctggttttggagttaaataatcattgacattgatgttctttaattaagagtaccattttgaagttcgaggtttaagaaaccacattctatctcaagaaataaatcagtgaaaacatataagttaccatgcatatcatatttaagatgtaatctagtaaccataaattagaattttaaactttgaaaaaataacacatattctagttatttgttaaatgccgttttgtatgatgatgagttgaattttaaccgtattcttctcacgtaatgaagaaaacaaccaacggatatatttttaccttacatgcactcatcaatctcaaacaaatgcttgagtgatgtttggatacaaaacaattcctaccgtacccaatggattggattaccaattaagttgcacgtgataaaagatgatacaagatgattcgtccaatatatcttaagtaattgtttttatctaaaaatgtattgacttaaaacattattcatcaaactaattataaagcaactaaaaagtttcaagaaaatatctacataacacaatgacacgctatttctacattatccctgctaaaatcatctactattatttacattttttgccactatattttctttctaattttgagtttggatttgactagctacctaattagtcctagaaaagaaataaaaatcacacatgcgatcacacatgggccggtccgtttggcatttatgggtattgaaaactagttgcacacttgcactataggaaattatataaccattttatgataaaatatttcattccaaagagtttttgactttatatatttgttagagcaaatcgtttcccgtcattgtccaagtatctgaaatggcgacaaacttcaaatccctattaccagttatcggtacggatgaaaccctaaattcattattttcagcaaatgtcgcactcatcatcaaagttttcatattaaatctcaaggaaactaaaatgcatgagacaatggtttttgtagacatcagtcctttagtggtcaaatgtgatgatgccaacatggcggaggatgccggcgtggcggaggttgtgggaaagctggacagggcctgtcgggacgcaggattcttctacgtagtaagttaaaaacactttcgataatggagttctatttgtttggattttgttaaagggtttgattttggtcggtgattgttgagcagattggtcatggaatatcggaggattttataaggaaggtgagagtgatgtcgcatcaattcttcgagcttccttatgaagagaaacttaagatcaagattactccagctgctggatacaggtttattccactgatctcaaaatgtgcaccaaatttggtatcacgattagttagattagatggctactatattatatataattttgttcttaacgaaagaaataaatataaaatcgtcaacttacatatattatttagaagtcaatggttaaatatctacttcaacgtattcctcatcggaattcgattccaacaccttgtaaaaagggtcaatggcacgtaaaaatagttcttaattaatatctatattactaattttttagtattattttaattgaaattttcgtggaactcaaatcaaaccaaaccaaatatataaaaatataaaaaagtgatgttccattcgggtaaaaaacgaagattattcatggatgttgagttatacagaggatatcagagaatcggactaaacttaacgaatgggaaacaagatatgcacgaagccattgatgtaagtgtcctatttgcttgagtgatgtttccaagtagtgattataactaactgatatggttttattctcttatagtgttacaaagagtttaagcaagggaagcatggggacattggaaaggttatggaaggggcaaaccagtggtaagagtttgagtaaaaatatcaaaaagaaagggacaaatgagatttcaccttcatactatttctctcttaaatttttggttttgttttgttttttgtggtgaatttccattgaaggccagagaatcctcaagaatacaaagagttgatggaggagtatattaagctctgcataggtgatttaccctttttacatttcttttatatgttttgttgaaccaagagggtaaatattaagttcttaatcttatttcatgcatgatcttaattttacagatctttctagaaatatcttaaggggaatctcattagcccttggtggatcaccttatgagtttgagggaaagatgcttacagatccgttttggataatgcgtattcttggttatccaggtgtaaaccaagaaaatgttatcggatggtaagtttttttctcattcacattttactacgacgaacttttatttcactttagcagtgaagtaactcgtctcatctttttcacttacagtggagctcacactgactatggtaagtaagcttgaactcaaatcaagttgataatattcataagtttttattttactcaagaccaaccataactttgcaggcttgttgtcacttataaatcaagatgatgacaaaactgctcttcaggtattattggtcttatttggtagctaatatttttgtcaaaactactaaacaacacatcgtggaaaacccgtaattaagctaagctatatgaagagcctaatgggtattgtcgtgaaaaacagggtaattgttaaaacttgcgagacatacaagttatagataaaatgaactaacataactacgattttgccatccctcatttttgcaaatataagaggatattatttgcctatctagtgcatattctctctattattactatgatcatttttataatttttatgcttatatttgaaaaggtgagagacttggccggcgattggataccagttattccgatccctggatcatttgtctgcaacatcggtgacatgctaaaggtttgtttcgtctcacactttctgatctttcttacatttcaactagtccttaaaatgttttttgagtcatatacgcagattctttctaacggagtttacgaatccacacttcatagagtgatcaataactctccccgataccgtgtttgcgtcggattcttttacgaggtactaaatttgtaacattctttgtctgttttcctcattcggctttggaatcatgttttcaattatcttgttcagacgaacttcgacgcagcggtggagccgttggatatcttcaaagagaagtacccaggaaaaggaacatcccaagttttcaaaagagttgtctatggggagcatctggttcacaaactccagaccacttttcaaaatttagtggaacacagttaatgttaatggtttggatggtcattgaaatgaaaaaaatgaaatatcaaattgtaatttgatttctatactacaataaagaattctacagtttgtttaccaatcggctagttttagtaatttactcatttgagtaaaaacaatgggatgcctctatatataaaaatcaatagagattacaaaatgatataaatgaaaatgcaaagtgttggcattttctttcagtatcataaaacatggtttaagttatgtgtcagtggaccaatgttcttcactgtccaaaagtaatcttctaaatcgtaaagccgcctgaaatattcacacccaacaacacaacaatattaaacttgaaagttgaaagttgaaaccaaaccaaattggttgagactcgagggtcgagccactatagttcttaagatcccagtggatttacagttttagttaagttatatcagattcgttctctagtaaaacccatttggagtttgtgttattagtataaagcaaggtaaagtaagaagttaacttacgctaaatcttctaaagtgtctgctttgttgatagacttcccttccggtagttcaagacaagaatgatgcgctatcatctcctttatcgtgtatttcgtgctcttaacatcgttattccacaagatgctctgttacacaataccccaaacctgaaaattaaatcttatccagggaaattatcttttactcttgaaagggttttcgtttttacctttctaaggtatttctttttcacatcttcccagtgtgattttccttttggagagaaaattgaagcattccacatagctcctcttgcaaccataactgatgcagcgcctttatgggaaccaaaaaaaacagcaaacagtaaagggttatataaatcagaggtgaatcaagtataaacattagcacatggcagataaaaaatgttgtagggctatatttgcaagtctcatgaatctgaattcaataagtgtatcatgtgtacctgttgcggttttaatgcgagaaaaatcatcatattctaaaacatcgccatttgcaatgacgggaatggataatgctgccaccacatctgcaatctcatcccatttagcaggatctcttggcctgtctgcaattttcctgtattttaaggaaggaggaatcaattaccaactttgattaaaacagcttaaaggaatgagaacaaactaacaacagtggtgtatattacctcccatgtacagcaagagctggtacaccaagtttctcgattctcctagccaattcaacagtatctgctggtgattttaatagacgaatcttgcaagtaaccggtacgtctaagttcctcttaagtgttgccaaaatctgggatggagaagataccatatgaggtgaacaattaaaatagatcagtaagaaacaaacatataactaagaattcacagagtcatacatcatgaattagctcgggtttacttaacaaagcagcacccattccaccttggatagagaatgccttggggcaacccatattaatatcaatagttgcaacgtcattacacctaatgatgacagaaagaaattcagtttcaaattttgtaaaacacaagtaacgttgactcttttcaacctcagttaaaaaaaagatgactaaacttacacaatctcagaagcctttagagccctaacagcatcagaagttcccatctgaaaaacaaccctacttttttcttcatcacatgtgctaaagactacattatctgttcctttctccacaaactcagatgtcccagaagcaactgtagagggagaactacaataagaatttgagaatcaggaagaaccacagaaagaagcctatatgattcataaagataagcaggggaacaccaaagaaaatatcttgtttaagtctctccgtagcaaaatctattaatgtctaccaaagagatgcactaatggagccaggttccactatagagctaaagtcattacaaacagtccatattgactgtagacagaacaatcatatcgagcgagctatacacagaatttaccatttcaaaggagacttcaattagttacaagtgagaccccaatatggcaccatatcaaaacctagatagttctttgcatatatcttaaacaatgttggttcaatgcttagttctaaacgattaaacacagtagtttggatcaatctcatctttcacttcaaacaataagagaaactaagttagctagcagaatctgagaaccaaatgaataattcaaaaaatcacattaacaccataaggaagattacaaaaaagtgtttaccattgagtcggcgttcgcatttaacaagcttatgatcaataatctcttcaccgtatgtgatatcggcgccgtattccgccgccaacatcctgaaagagagcgttccctaaacaacagaacacctcccggaataagcaaagccgaaagcgagaacaaagaaactaggaactagtttcacgatttcgacttaccacacgaaccatgggagcaagaacaagcttgttctgataatccatcttcgtcttcttcttcttcgtggcaccgtcaaacgtagccacgaaaaattcgaagacgccgctgctagatctgcgcacaaatttgttttgtttttgcttcaggaaaaaaaaaaactttcagatgggcttcttagtaaatgggccgaattaggcccattatagtggcttctgtcatgatttatgcttatgtactaagtaagaactcgtaatctcattgtaattatgatatttttttttagcttaacactcgtttccttatgagataaaaactaatggaaatacactttttatcaaacaaaattggatgaaaatagtatttttagtatatccatttccatgctctgttcacaatctcatcttctacaaacgggcgcaatgaccacatcagactgtaagtctctagctcaccagatgatgacttcaaactaagcgatctcacaatcttatcctgcaaagacagtatccatttctcttcagtaagttttgagttttaaagaatcaaacatgaagagaagggctttcaaattccacacctgcataacatagttctgcttcatcatactgtaaataactgcaataagtgcagcgtactctgtaacttcaggtccttgaggtaattgtacagtctcgttctcctaaaacaaacacatccatactacattactcttctctgaaaccgtttttcaagttagtttacccgagaacaaaattctgttgacatcttacctcatcacatgttacttgttgcaatccatcacttgagtctttatctagctgtgtggcagactcaattgcaagggcggcctcatcagtgagacgttccagctcaatcaacaagtttttggctgcaacattcacatcttacaaggttcaaaaggtacaattgcttatagaagaaaccgaaaatatgataatgtgggatgagtgatgaaatgaaacagtagctaatacattacctttgattaggtggtcagaaagtcctgatagagatgtatgcacttcttattccggtattttttgttttcagataagaaacggaagaccaagtcgggaagacgaagaagaagagcaagaaaaaaaaggagcaacatgttaagcagaagagaagaagaatgttcctaaaacatgaaacttttcacataacttttaagccaagagctgatcagtaacttacaagctcttgtgctttgtgcagcatcatggatattaatacatcctgcctcgatatatgatttaagccgccttgtttcattcttcttgataatgttctcaatcaacttggacgaagtaactattggagggcgttgaagaaaacctgaaagtagtaatttcataagaaacaatgtcaacctgcaatcgaaagtagtgaaggtttatgcaaagtgaacgtacttagtccttgctgaaaccgtagaagaaagttgtttgcagcattccctagttcttcaagctgcgtgattctataatcattacaaaaattcaagattcagagggactcaatgtgaacatacttgaaagtagttataacagaatcaaaagcaaaacaataaatttacactgtcataaagtctttgaaaatctcggaaattttcttcttcagttctattctcgtttccatgtcctcgtctttcagtctaaaagaacacaagtaacattgtttcaagtaaacaagtatttgcatgcccaagtatcgatttttcagtgggaaatcaaaacaggagcttcgatgatccaataaggcaacgatctacttatactaataagtaatcggaactaatcacaaccaatcatcagacttttgagaaccagtcgaccatgataagagaagggagagagagagagagaaatcaaaaaccagggttcgatttttcaaggagatcacgagagacgtacgtagtggtgaaaaattacgtcggctaagcacggagaaagctgagtgggcgccggagaaggtcgatcacggcggtgcagacggcggagagaacagaaggtcgagagatatcgtcttagggctttttttttttttttttttgggcaaagatcgtcttagggctttagcttcaaactcaatttggagatttttaagtttttgacgttttgcgaaactctacttcttcttttttgttttttcagaaactactctttttatttcccctctggcctctgctgtgacgttattgaaacaaaaatggttcggtgaaaacaaagctgaagatttgttgagctttttttttggttcaccacggaacaattgtcttcttactttttaccaacctctttcccatatatatacacacatcaatcgtatcagaaagaaatcaatacagtggaaatagctgtacaaacacaaacaaaaaatcgagtcatgtgagagtgagactgagtgtgaggcgtttaaaaaactgtgcctcaactgactcgaaaattcgaacccatgttttggtctcatgtcattggtgttggcgttgagtattgtttcctttactgtgacctttagtgcctcctcctctgtacaactttgtgtgactgttctgtccatatgaagagttcttgacgcctttggttcctgagagtgggctcgttccaaacactcgttgttggtttctcgcacctttagttgaaactgcagcgggggcgagtggagtgttgtatgaaccgtttctcacagtcacggcacgaggacttccatagaaaggttgcacggacggggtggtggccccgttgatgagtcccactcgcggactactataaggactcgttgtgttgagcaacatttcctggttaatcagattttgcaatcagaacaaaaaaatgttgttttactagccaaacaagtgaggttgagagtaactgaaacaacatcttaggtacgtttaacttgaaagaagcaatggagctgttttgatacgtaccctttgaggagtctggtaaaaagtaggacctgaggccatccgaggagaagaattgttcacagtttgtggatatgagactcggcgatgattgcctcctgtgtcaatccgtgaagctggtctgctgccaccaacccaaccatcgtggcttttcctaagattgacaaatgctggtggctcctgtctcatgaagtagtaagagctgtggtgttcttctctgcataaagtaggagttggagcccattgttgtcctttcgaagaagggtcttgatagctctggaaagtgcaggaggatttagaatatgagtggcccacgaaagggatgtttgctggtatgaaactcggtgtctgtttccggtaaggaagtcctggaaacaacgctatactactccagtcttcgattgtgattccttgttttgcagcgagatcgaacacttgtttctcttcaactcctaaacccatgagcaaattccataggtttctctgggcttccctttggttgtaaataatttggtccctcattgccatttcaaactgtagttccgtattacccatcccctagatttgttgaaaacaacaataaatgtgaatcgtaatgtaagaacttcatggtcaagaaaataaggcactgttctgtttattctacttaccaggagcttatactgattaagaatatgcagatacgttttgtttccattgttatttattgcttcattgagcatatcctgtagttcgcaacgatgtttttcattttcttcaatatcctgtaaaacaaaaataataaggataataagcaatgaccatgatgaagtgcaaagttgaaatatatgataaagaaaaaggtttaccctctggtagttaacaccggcttcatcattgtcgcggatattatcaagtattacttgtcgtctgctacttagagcttcgacaacatctttctctgtcgcctataaaacaaagaagaggttacagtaatgcaacatattgacctctgaattaggagaagctttagcagctaacctgtttcgcaattgcatcatcaagatgctgaagttcagtgcgatttctgaggttagtttcctcaagctcaaataacgccttctgtaagtttatacggtcttgaacattttcactgatctggtggcttaaaccatccaaccaagaaagttcacgttcaacacctctttcaaaaggtttgatgcttagctgcgactctttttcagctagttgtgtcttcagctgagaaacctcactctatgaaagcaaagctctgagttatatactgttactatattcattttgtaacagaagtagataaaagtaattaacttacttgaagattgtcgatcattcgttggtagtctgacatatgagtatcgatggtaccaatatttttctaaattgcatgaaaagtgaatagtaagtacttctggaccaattaaaagtctcatgaaatagaattattcaacgaaaattattgtcacctggatgtgtgtcttaatctcttttgctcggtcagcatatttcaatgtgtttacagtatgatgatactgactatcagcaggtgatatagttgcaaccatcactgtctgggagttcccactcagaccatctttgagaatccgcgtaagtttgctgaaattatacatgtgtgtaagccaaaaataatgaccatcttaagataagaaagatcacatatcgacacgtacctgtttcggtatggtacataagcaagaccctttttgtgttgcttccccaaagcatttatgcaatttgctagtgcaaggagtgagcgattgatatttgctccatccctcaatttttgacctccattgtttgtctcagcagctctttcactcccagcaagatctacaagggcgagtttccctctcatgacttgattttgattcttttgccttcttttgactgcaatctctagaactgcatgagacctggtaattggcaaacaaattcatataggccatgagccactgctggtttggactcaagaaaatctaagattgttttactccagaataaatcccattgctgtgaaactgagatctagcgatttggatagacatactccaacattaacagcttgtttcggaggtagtaatgctcaccttgatgatgttccattcatctctgtgctctcagtttttcgtctactgttccccaagttcagcagctcaagaatcctatcagcagaatggacctacaaacgaaacactttaacttagtctcctagctgcaaacgccaaaaagatggtgaaaattttgaagaacacaaacgatatggttttcctatcagcacaaaatctcaaatagaaatactaacatatacaaaattgggaggcaggggaagaacttcaatgtaaaccatacaacattaattcttctaaagggttcccatatgcaaacaaaattgctaataaatgtgacacacaaaatgatatgatctaaatgatgtcataatggaaaccttaaggtgatctctacaactcaggtttagcagtacattaaatgatcttgttgcatctagaagagaagaaaagtatggacctttattgatcgcaggcctgcaactactattccctgctctggatcctctctaagctctaaatgaccagaggatttttcaagcagatcgtagataacctgagttacattatgagaaaaaaggattaatactcgtaatggtaagaaaacaatataaaccaaaataatcaattttatcaaactaagccttacttcattgtaaacttcaagatatgagcaagtcacttcaaactcatctgagctcttgtcactcttgatcatatcaaaaatagtattcaagctgagaaccatcaatccaggatcacttcgagttccaaccattgtatatgttttgccactgaacaaaattgcataattgagtcagataacaaaaaaaaattcctagtaatgttcatgtcgcttttgcaactcgaatatgctaatgctaaataatactattgaagatgatttacataactgcataccttccagtggaaccataggcaaaaactgtagcattgagtccatgaacaacactagagatcacagaagacatactcctatacacattctgaaaaccaatacatgtttagattcatagatttacatccaaaaacacacaaaccttaaaccacaagttccactcacttactgagaaagtcacatacacacaacaaatctaaacattgagaaccaaagatctctagagatcacaaatttgcagagagaggaacgaaccttgttggtgctctcaggtccaaaagcatgatcaaaacaatatttcttctctttagtccgattctgaattcggtcaagataatccttggataagtctgggtctaacacaaccacttcctaaaatcgaaaacaaaaaattagggcgaaaatttaaaatcgaaaaaagcttgaaatcagaaaaatcaaacaaattctgaagagaccttagagttattcactcgaacaatgtctctaccacgttctttctccattaacggtctacatttcacagcaacctaccggaaaacacagagaattaaaccggtcaagaaattttcagacgaattaaaccggaaattttctacgaggattgctaaccgtgagtgtagtggtcttcttcgcagctggagctctaatgcttggcatttcgtcagtatagagccaaaattttcccaatgtgaggttaaattttccctatgcagactttctcggaaacgaaacagagtctcttaacgatcagagaaactcacagctagcgaagaattaaacaaaaaaaatctgagctgagaagaagaaaatttcagctgagctaagaggatagaattcaaaatgtttgatagtttcaagattctctctctctctgtgaaatttcaccgtttcaaaatttaagctgggaaataaaaatttaataaatgcttgagacttgagagatttctctaaacataaaacgagaaagaaaaaaaaaacagtaagagggaaaaataaagatcgtgcgagagggatattgaggacagatcacattgtgtgacggtgcattttgtttaagatgtggtaatgccatcagagccgttgattatgtatttgaccggctacgatcaacctttaccatatagaagtagagtgttttttgtggatgagttattaactttaaagtggcgatttaatttagtccaacagcttttttaattttgggtttatgtggcaaattgaattttaaacaaatttaatttgacgaagttgtgaactctgttacacgacgtgccatctaataccataggatatacaatatatgctgacgtgacgaataaataaatttcatatttgctaataatttcattaaaatatgttcgtgttgttgacaattttcttttacctataaaaagtgatactaccgcgagaccatctccaactctaatcgatatttcttctctgttatggagtaataatctttttaatttactctatatattactctaaaatagagtaaatggtaagcttactttatatctaaagtaactttattttttacactcaaactatttttatacagaatcaaaaatagaaaaatacaatagagatggtcttaggcctaagcataaatttagctctgtccagtttcttccgaatattggatcattcggattgtgtaatctattaggcctagaaaaagtttagccagaatagtttggatgtagttcggttgaagatagaaatcgggaaatcatttatgataagcttctttccaataattcatttacacacgaatgagaagatgcttaaaaatcgctagattacaaatttttttgtcatggttagttggttcatccggtattccaacattcaataaaagtaaatactataaataagcattctacatttataaaaagaaagattcaatcgagtctgatttcatctaaaagagggaaatattttaccaaccttactgactcataactacgaaagacatcacatcgatatcctccataattttggtagttcaagtttatttattctcaacaatatgtcaatatcaaaagcaatatatacccattaacaaacaaaaagaaacggtatctaactgcaacatatagtgaagaaggccaaagttctacacaaacaattctccttcgtcactgtttataaacgtataaactcgtataagttcttataagcaataatccggaataacgacagtagaaaataaatgctagttgtacattttagtagttgaatctctgacaaaaaaataaaaataaaggaagaactaaatttaacagaatcataatttatgactggtaaactataattaatcatactttataattaaaatttaacaaaattaattaaataatgattttcctaggtgaagatatgatattatgatttatgatctccaataatttatgattggtaaacctacaatatagtaaatttctttatttattttttgttatttcgcccatcttgcacattaccaacgaagtcataattttatatgaaatccttagttatttatgcattacgactacccacatagaagtatgggtactcacacctagtttatttacaatttaatatgcattgcatgttctaaaatttcaacttgaagtttatgataaaatataaatacggaacagtatgtttatcgaaaaaaaaaaaacttgaagtttatatctcaccgaagaatcttccggctcatcaatggtacataaattataataaggtgctcgttcatatctagctttatcatttataacatacgaaaatgtaacagttgaattgctagcagaaaattagcagtggtggtggtggtagtggtcttgttagttgttagtgatttgtttagtctataataaatactaaagagatgttattggttcctaaagaaattttcatgaccttaataatattataaaaagtaaataaatgaaagattaatttaaactattgctagaaagttgtttaattcttattgattattttctcacaattttgtaaaattttccaaataatatcattattttgatgatactttcatgactttattttaagaagaaaaatatagaaagttatatactaataacacaataatttaatttattaaacaatcattgattcttttgttttaattgaataacacaaaacttttaatgactttataaaagtatgaatccaataactccaaatttatgaagattttaaatttttttttacaaattttaaactaatagtaccaaactttaacaaacttttaaaaatattaatttgataacaacaaattttacataatattttaagttaataaaactcaaattaaatcacaaaccaataacactcccaaaatatcaatttaacgtcacaagtacaagattgaaactcattaaatatgtatgatgtatcctactatattatttgggaagtacattttaaatgtaaccttaatttttgtaattaattacatgacaatgccattagaaaaatttaatcaaaaacaaaatcttttaataacacattaagattaccaaaatcatttaacgacaatattcatctcttaattataggcttattggatttaaagacgggtcatcaaagattttctaactaaagcaaaatatactgaatattcaaatatctatctattaccaaattataaacaattaagttcgtaaaacaatttaatattttatatacgaaataaagtaaatcttaatcacataaaaattagcacaaaaaaaaatatggtacattcaggtctatagtatttttgcaagacttttttggtggatttgggtaaaagtgcattcgggtcatatggtacattcacctattaaataaatatggtatactcctatgttattagctaaaatgtttagattataattcagagtcatatcataaataaaattactattaataaaataaatggctttttggcaagacggatttggagggacgggtttttgaatcaacattaataaaaaaagtaaaatataattaatccaccatttcaatacgggttaaatctttaatttattattttttaagaccactaatattaaacatatcaaatcatcctaatttagaaaaaattatataaaaccaaaaatgttatgtggtatgtataatgttactatatataaacttaaactataaaatataaatgtattagagaatgatacaatttgcaaaacttttatatagaataaataattcttaaattttaaaaattactactttaaaaaaaaatcacggaacgggtaaagaaattacataacgggttttattttggaattgggttatatggtggatgtatttgaattaatatttataaaattttaaaatattattaatatgttgttttaataggggttaaaacttcagttttttaacaattgtctcatggattcgtggtatagtgttacttaataacaattataaactgtaaaatataaatattttataaaaataaaatttgcaaattttaatatatattacttttaaaaaataaatcatcccctggtataccgagggttaaaatctagtccatgattgttacggcataccaaacttacatgataactaaagagtcttaggttaaaactgtggtagtcaatatatgaagagtgttgttgatttaatttgcgaagcaagaaagaactaaaattttaagacattccaaaagactctgtatcattctgaaggtttgagcttggaaagcgagcacgtgagtcgctcgtgaaactatataatttacgaaaactctaaatacaccccaatagtattatttcattcaaaacacaccccacaatttatttaaaagagtcggggtttttccaagaacactggatcgtcgtctctctcctttagttagacaaagcctcctttcccaaaaccctaaaatcagccaaattcaaattccgctaaccaatttccatggcagaggaaattccagcaacagcatcattcactccatacgtccattcacaaactctaacatctcacaatcgcgccgtctcctccgtgaaattctcctccgatggacgtctcctcgcatccgcctccgccgacaaaacaatccgcacttacacaatcaacaccattaacgatccaatcgccgagcccgtacaagaattcaccggccatgaaaacggtatctccgatgttgcattctcttcagacgcgaggtttatagtctcagcttccgatgacaaaaccttaaagctatgggacgttgaaactggttcattgatcaagacgcttattggacacactaattacgccttctgtgtcaatttcaatcctcaatcaaatatgattgtatctggttcgtttgatgaaactgttcggatctgggatgtcactactggaaagtgtttgaaagttcttcccgcgcattctgatcctgttactgctgttgattttaatagagatgggtctctcattgtttcgagtagctatgatgggttgtgtcgtatatgggattctgggactggtcattgtgtgaaaactctgattgatgatgagaatcctcctgtttcgtttgttagattctctcctaatggcaagtttatcctcgttggtacacttgataacacgctggtgagttcacttgttgaattcctttcaaagatttgatgtttttagtgtgattactagttttgctctatagtgatctcgaaaaaaagcatgaagattttgggtagagtgtgttagtagaagtttgatgtaggagaagccaattcaaaactaagtttacagagaagttgttagctttaagtatagttctgttgttggttgatattcaagagtttcgaagggtcgtatctagagggttgtagcttcgaagatacatcgtcgtttggagtttgattaatttgcattaggaaattaaattcttatgattcgttattaatgcactcatctctccatgaacttagattctaggttgtgtgttaatagaagtttgatgtaggagaagccaatccaaagctatttttgcaaaaattgttatctagttaaggaaaagttgatagctttggaacagttctgttattgatcgagattcaacacttttgaagggtcgtatttagagggttgtaagatacatcttcttttggtgtttgcgtctatagggtattgttgaataaaggaattctcatgattcgttataaatttgcagaggttgtggaacatttcgtctgctaagttcctcaaaacatacactggccacgtgaacgcacagtattgcatttcctctgcgttctccgtcacaaatggaaagcgaatagtcagtggatccgaggacaactgtgtacacatgtgggagctaaactccaagaaactgctacagaaacttgagggtcatactgagaccgtcatgaacgtagcatgccacccgacagagaacttgatcgcatcaggctcgctcgacaagacagtaaggatttggacacagaagaaagaataaatcatcactctctctcttcagaaatcaaacatgtaggtacatgccaccttcttcatgcagtaatcatctgttgcttactaagcttgttagattgattctagcctcattatgtaaaagtctaatttttgtttggtgtaagggaagtgcaacagactgttctaaacttgtaatagttctctgtgtgactcagaactatttaggtaggtcttaaggcaaagactcctgcaagtgcaaaggcatttgagagaatgaacacaaatcttcataggtttaccctttactcattgtatctattaagctgatgcaatgcttcaccaatactattggttataaagtagtttcaggattgaaaattgttcatctgaaccatattgatgggtggctcatgggtcaaagtacagatatatgactataagtagataatgtatggtagttggttactttggttggccatgatgatgaagcttatggtcccctggtcctgtcccattttttacttttcattttcacttttatcgtaaagtcttcttttttttaaaccctacaagattttgaaatggaccacttgaaaatttgaacccactctctctttttttgttttcaatttcgaaaccaaaattttttaacaaaaagatgactttgtgacctttgttctgtcttttagctacacaccagtgggctgtttgcttttacagcgtgtctttctgtttacatgattcaagagaaagcaacagttcctaaagactcagtcatgtttgtgtctctcccaattgatacaaagaccaaaattcagctttggttcttttgtgtaaaagttctcgagatatgctaataagattaaacataaaaactctcaaaaagagtataaattgaattctttatgattgtagtagcaaacaataattgttaggtttagtgctatcataataatctattagtcaggttaaatatattcgatttggtaccaaatacgaaatcaagcttcaacaaacgaatctgcaatacacacacacccatccaaaagtatatcttcgacattttccccaaaaaagtatacatttcctaacacgtgcttaccaattcttatcattcgaagtaaaccattaaacaagaaatgttttcattattataaatttttcactaatataagtttattatttagtgcaagaaagtgcgttgcagatgaaaacttattctattgatccgggtccataaagaagaaaacaaaaattcacctaatacgagtacgacttattctagtggctacatatttccctaatcatgtgactaaaaatctgctttcaaaattttgacattcagtatttctttagatctatatcattaaaaattcatttttttcttttgcattttgattccatatttaatacaagattaaaaaaaaaaaaactaatatgtttgttcactgagcaaaccattattgttgatcagtgaactgtggtaactggcaaaagaagcaaatgattcgaaatcctactttcttacaaaatcaaattggataattttgtgagataataaaaaatcagtataaataaaataaaatacatgtcgggaaaccattattgttgatcagtgaactgtggtaactggcaaaagatgaaaatgatgcacataggactgtgtttaactgacttacttccactaatcaaaagtacgatcgtatccctacccatctctcgaggatcttaactgttgccgtgcgtcatctcaaggttgttctcgtcattatcagtcgatcagagtacagagaccggctctctgggttttgtcgatcatgccattgccttggggcttgttgttgtggtccgtcctaaggatagaaatgttattacaaagctttttaaggggttctttggttaattaagtgtttcgttttgcttaagagaggttaaagaagcgggtgtctcaataagttttggtaagtttgtgaatccccagtggtggactccatcttttcccgtcgaattataacatcaggaccgttcatttcaacatcatcaattaattcattatggggtttatctttaaaacatctttttgaatttatggttcgctttggtattgcattattacacttgtatacctgtgtaataaagtgttggattttgtcaagattaggtaacatcacgtttcaaaacaacaaggctccaaattaattaacattttcttcatgtaattatcgtttttgaatcccttcctttctaattccatgtttcattaaatccaccacatgcatatgtttctatatatgttaaataaacgacttttcaagtttttaatttgtgttttctattttcagaaaatttatgtgaaatcaaagtttcttaaaaatctccctccaagtaaattccaaaataaaataaaaataatacttttacaatatacaaataaaactcataaaaaacacacacacaatcttcatcttcctcacttactctcaccctttttaaaaccaaaccctaacttacacagaaagagaagaaaaaaaacaaaaaaaaaatgaagcttcttcttctcctcctcctcctccttctcctccacatttctcattccttcaccgtcgctaaaccaatcaccgagctccacgctcttctctcactcaaatcctccttcaccatcgacgaacactcacctctcctgacctcatggaacctttcaacaactttctgttcatggaccggtgtcacgtgcgacgtctctctccgtcacgtgacctctctcgacctctcaggtcttaacctctccggaactctctcctccgacgtagctcatttacctctgctacagaatctatcactcgctgctaatcagatctcaggtcctattccgccgcaaatctccaatctctatgagcttcgtcacctcaatctctccaataatgtcttcaacggttcatttcccgatgaactctcctctggattggtgaatctccgtgttcttgacttatacaacaacaatttaaccggagatttaccggtttcactcactaatctcactcagctccgtcatcttcacctcggtgggaattacttctccggcaaaatcccggcgacgtacggaacctggcctgttctcgaatacttagcggtttccggtaacgagctaaccggtaaaatccctccggagatcggaaacctaacgactcttcgtgaactttacatcggatattacaacgcttttgaaaatggtcttccaccggagattggaaatttatcagagcttgttcggttcgacgctgctaattgtggtttaaccggagagattccaccggagattgggaagcttcagaagctagatacgttgtttcttcaagtaaacgcatttacagggacaataactcaagagctgggattgatttcaagcttgaaatcgatggatctgtctaacaatatgtttaccggcgagattccgacgagtttttcacagctgaagaacttaacgcttttgaatctcttcaggaataagctctacggtgctatacctgagttcatcggtgaaatgccggagcttgaagtgttgcagctttgggagaacaatttcactggtagtattcctcagaaattgggggaaaatggtagattagtgattcttgatctctcttcgaacaaactcaccggaactctgccgccgaatatgtgttctggtaaccggttaatgacgttaatcactcttggcaacttcttgtttggttcaataccggattcgcttggtaaatgtgagtctctgacccggatccggatgggtgagaatttccttaacgggtcgattccaaaggagctcttcgggttacctaaattatctcaagtggagctccaagacaattaccttaccggagagttgccaataagcggaggaggagtctctggtgaccttggtcagattagtctttctaataaccagctctctggttcattacctgcagctattggaaacttgtccggtgttcaaaaactacttcttgatggtaacaagttctctggttcgattcctcccgagattgggaggcttcagcagctatctaagttggattttagccacaatctgttctccggtcggatcgcaccggagatcagtcgttgtaagctgctaacgtttgttgatcttagccgtaatgagctctcaggtgatattcctaatgaactcacaggtatgaagatcttgaattacttgaatctttcaagaaaccatctcgttggttccatacctgtgacgatagcatcaatgcagagtttgacatcggttgatttctcttacaacaatctctccggtttagttcccagcactggacagtttagttacttcaattacacatcgtttgtgggtaactctcatctttgtggtccgtatttgggtccttgcggcaaaggaactcaccagtctcatgtcaaacctttatctgctactacgaaactgttactcgtccttggattgctcttttgttcgatggtgtttgctatagtggccataatcaaagctcggtccttgcgaaatgcgagtgaagccaaggcatggagattgactgctttccagaggctagacttcacttgtgacgatgtcttggactctctcaaggaagacaacatcatcggtaaaggcggtgctgggattgtctacaaaggcactatgcctaaaggcgacctagtcgcggtcaaacgattggctacaatgtcccatggatcttcccacgatcacgggttcaacgccgagattcagacgctaggtagaatcagacacagacacatcgtgagactgctcggtttttgctccaaccacgaaacgaatctccttgtgtacgagtacatgcctaatggtagccttggagaggttcttcatggaaagaaaggaggtcatttacattggaacacacgttataagatagctcttgaagcagccaagggtctttgctatctccaccatgattgttccccgttgatcgtccatagagatgttaaatccaacaacatcctcctcgattccaacttcgaagctcatgtcgccgactttggtctcgccaagttcctccaagattccggtacttctgaatgtatgtccgcaattgccggctcctacggctacatagctccaggtaacaaatttgcagaaaatggcatttaatcaaacacttggtggtgaaatgtaaaatctctgaacttgtttgttccttgttgagcagagtacgcgtatacattgaaggtagatgagaagagcgatgtgtatagtttcggtgttgttcttctagaactcatcaccgggaaaaaacccgtcggagaatttggcgacggcgttgatattgttcaatgggtgagaagcatgacggattcaaataaagattgtgtgctcaaagtaatcgatcttagactctcttcagttccagttcacgaggtaacacacgtcttctacgttgcgttgctctgcgttgaagaacaagcggtggagaggccgacgatgcgtgaagtcgttcagattctcactgagatcccaaaaattcctctttcgaagcagcaagcggcggaatcagacgtgactgagaaagctccggcgattaatgaatcgtcgccggattcaggaagtccaccggatcttttaagtaattagactttccggcgattgggtttggtcattgaggggcaaatttgtctttctaattttcttgtcaccgacgtctcggtagtggagttaattacttaattagcccgttgttgtctggttccggttaaggcaacaattagtggtttaactcttaaggttgttgcatttcttttttcactgctgccacaattattcgtgtaggaattttgaatatgtacattgcggttgaattttgcatgataagtggttaatttcaggaaatcgaatttcgagaacattatggcttatgcatatcagcatatatatacatgcagttatgtatatgatcaatctgcccccggttcaagtatgtcaattgtgttagaccaaaaaacacttttgccccttatattcttaagaacttcatttagtttcatactcaagcaaaaactaattttttagagttttcgttgtcttaaaatgaaactagtgtctccattatgctggaatcttgcttatgagttgttacattacatattttattctcacctttgcttttacccttttggattgtatctggttgtggtagctgttgtgtcacaacaagacattccatgtgaaaaaaacacagagagggtgaaaccaaggtatgaatgtgtttgtgtgggactgaagatgagtaacgctgagaagagagaaagtgaaagctcactcacaatttgtccaattattgcaaatgtatgggtagtgtgacactagtgtcttaatgaattcagatggtcctaagatcttttttccactctattcccttgtcttgaagcaaaaatctaattttagacgaagcatttatgacatctccctctcattaattacaagccatatattcaactttgattttgactcatcaatatcaaaaaatctttagactttaggtgttgttgctatccttggtatctagtactttcttcgataaccatgactattatattgagataagaaagatataaagaacaataagaatattagttatgatattttagatgtattatgttcaaaatttcttacgttcgaatgtacattgatgatcttgtaaacctaattaaggagtgcctaactctagaattaataagtcaggagttagttatcaagaaactagaaagacttgaagatggattaaagtggtaattaatgtttttcagaggccaagattctaattaagagatgggaaatggcatgttccattctctagcttcatatatacacttatcgggtgaaactaccagattacgaatagccattagatgactaacaattgaattcaatttaaatcatccaaagatatattttatatattgagattctttcttcatctcaaacttctaagttctaacatagtcatgtagttgaactttcgggccgaggcccataacaactccatctacttaaacgaaggttagataaagggacgaacaaaaagaatcagtctggtgtcagaaactagagtatgtacttttgtgtttgaattgtaacgtttgtttctttcttcagctcttcattggtttatcgacacagtacttatgtcactccaattgtgagaaaatcattctgcacagtcgtttcgaaatcaaggaaatcaaacaagagcaacaacaatccaaagagtaccaaaatatatttggctatagagagctatcattgtcttgtacacttgtccatgttgggctatagatccatatttgtgttgggctaggctcagtttttcttaataacacaaacttacttatcaaacacgtgttgtctttttggttatttaagtagttgacaaacaaaagtacaaataagctgttagggcaaaggagcaaaaacgaaaccacagagagaaagcctccgtctcccttatcaaagaagaagaagacgtgtataacaaaacactagacacattgtgaagatagaaaaaaatggagagagcagcaattctcccgagtgttaatcaaaattacctactttgtccttcacgcgccttctccacgcgcctccactcctctactcgtaacttatcgccgccgtcatttgcctccatcaaggtcaactcttttctcatctccctctcttatcatcttctgatttatctgacccatttctccgattatctttcacagcttcagcattcttcttcctctgtttcttctaatggtggaatctctcttactcgatgcaacgctgtttcgtccaattcttccaggttcgttctttgtttttggtgggtatttgtccaagttctcaggttcttacttatatatatgtattgtttatgttgaattagtacgttggtaactgaattagccgacatagattgggataccgttggatttgggcttaagccagctgattatatgtatgtgatgaaatgtaacattgatggagagttctcaaaaggtgagttgcaacgttttgggaatattgaaattagcccatctgctggtgtactcaactatggacaggtttgttttcttagttttcttcaaagtcatgtcctttactgtattgagtatgatcaaaagtctagaccaagcttagattatggttaaaagaagctttttgtggggttaaggtttaggatttgaatgtcagattcttgacactgaaacgcaatctattatctgattttgtatcctagtttctcaaagtcatgtccttaacaagttcgataaaaggaaaagccttttgggggtttaggtaaggatctgaaagtgtggagaagttggttagattcttggcaccgaaaaacgtaatctgccgtcgattttgttttctagcttctcaaagtcctgtcctttactgtaatgaattctatgaaagaaacttaatttatgctaatcaagaatctttaagggagttaggagggtttgaaagtgtggagaaatttgtcaaattctggacaatgtatcacagcctgagtttgtcaataagtctagtctcctagttgttatgttagttgcatctagtgaggatttatttactgaatgtatattcatatattgcacggagaaatcttcttatattgtaagtgatgatgagaaatgccaagcaatgtgttgtggtaaagagtgcaatttaggatcacatgagtcttattagtgtatgttcttctagggattgtttgaagggctaaaagcttacagaaagaaagatggtaataacatcctcctctttcgtcctgaggagaatgcaaagcgtatgagaaatggtgctgagaggatgtgtatgcctgctccaaccgttgagcagtttgtagaagctgtgacagaaactgtactagcaaacaaacgttgggtaatgaatcacgcagttttttttgtctcccgatatgcagaggaaattatctagatatttgtttgctgttatgaatttaacttgtgtttggtgtcttgtttttaggttccaccaccaggtaaaggttccttatatgttagaccattgctaatgggaacaggagctgttcttggtcttgcgcctgcaccagaatatactttcattatctatgtttcgcctgttgggaactacttcaaggtctttcagagttacttcgatctattccaactatctaagatttgttgtatgtttctctgaatgatgatacggatttatatgatgatgtcaggaaggtgtggcacctatcaatttgattgtggagaatgaatttcaccgtgcaactcctggtggtaccggaggtgttaaaaccataggcaattatgctgcagtaagtaaaagcttatttcacttattgattttattggaccagctttcgtaactcacacatacaagttatttatttaggtactgaaggcacagtcaattgcgaaagctaaaggatattccgatgttttgtaccttgattgcatttacaaaagatatcttgaggaggtctcgtcttgcaatattttcatcgtgaaggtaaataaaaatcaatctctcggaatctgatgatgccttgtagagtctataagatgtctctcttcataagacgtaggagatgatgagattgagactctggcaccatgtttttttgggggcattcttacaaacatatcaagatactgattctcttacataatgattttttaaccaacacttttctttgccaggacaatgtgatatctactcctgaaataaaaggaaccattttacccggtattactcgaaaaagtatgatagacgtggctcgaacacaagggtttcaggtgacctcttccccttctttaaattcccaacatctttaaagtggatcataagtactattattggcttctgatcacagtgcatgtttatacggtattgttcaggtggaggaacggaatgtgacagtggatgaattgttagaagcagacgaggttttctgcacaggaaccgccgtggttgtctctcctgttggaagcgtcacttacaaaggcaaaaggtaaaacgttttttctttgtatcccaatttaagtgaaaaccaaacctaccaagtggtaaagctttcccctttttccgaatacacacacagagtgtcttacggagaaggtaccttcggaactgtgtcgaagcaactctacaccgttctgacaagcttgcagatgggtctgattgaagacaacatgaaatggactgtgaatcttagttaagccaggcgaatgcattgcatcaattcggctgcttggttttgctttcttttctttggtctgtggttctgattcgtgaaactatgagttggattgtttagaatctggttgatctagaacttagctggttcaagatcattagatgttgttgcatcataccaataatattatctttagatctctgtttctgattagatggttacatccaattatttctctaaagtctgagacatcattgatatctaacaatcaaaaactaaaaagtgaagtattaacattttaatcagattcaaaccagaacttatcagtcatcaaaaatgttggcaaataacaaatcaaacttaagtttttggatggagaaagcaagctagattcgaatctctaagaagcgtggacttggacttgtttacgacctgaaaagatgtcatgattatctcatgattacgagataataacatgtcttatctactaaactaatctaaaaagtagtgaggatgacttgaaacttaagtcttatatgaattatctttaaatatagaaaaagaaaggagatagagaggtgtgtttttcatgtgaacaacttttttttacctttagagtacttccagaagacttattgggtccttaataaaagtagaccaaattattgaagagctaaaaaaaaatgcctactcaaaatatccaaacctcttcttttagccttttgtttttttcaatattcatactaatgtaaactacaatcattgtatcattctataatcatatgaattttttgtcaacaccatgcattatgctagtttaaatttaggtgatgatataaagatattttaagtacaaatcaataggggcgatgttcttatgtctttatctaactttatgaatttgtgttttatatattatgaaaaattggaaaagaagagatggcctacgctcaagaccaattcctaccaatgggcaatggtgttgaaatctgaacaaaaaaatttcctttctttaacgttagctttaaagttcaaaaaactttatttactttttcagtgataattctgtataaaataacatataacaatgaggaaaaaactcaataatttgaatcgcttatgactttatttctccaagtgcttgacttttaaaaccctaatgtccaatctcaactaaagtcaacctttttcgttcgtctagaagagtcagtcattaagtttcaattgaagtatacagtaaattattagtactttttattttattttaaccacagttcattggctgtatgagatttctgttcaagaaaacatataaatcgaaaccaaagcaaaagacattatttgcttcggtttcttctactcaagctcatttttagtaaaactaaattgtattttcattttcttaaaaagttaattgttttttttgtaaaatcagttttaccaaattggacacaataatgaatatatgtctatgtctagttttttttagctcagaatatatcttatgtgaatagaatcgtctatcagatatttttgtgatgcagatagaacttaccgttatagaatcatttgtagattgttcatcgtgattgttaagattagattcccatttgtaatataacagaaactcgaaaagtacttatattaagtattaacgatgtatcatgtgaccaaaatagaaaatactacgtaatgatatgattattaagcgagtgtgtaggtaattcaaatatttcaattaatcaatctttgatatcactctttagagtaatgtattatctttcttattgttttaccctgggattaataagtttaccggatccggagtagaatttcttcggtttggcaattttgttcacctaccataacgaacttttacccttatacttagtttcaatctacttttggtgcatcctttcattttcaactgcaaagaagtagttaaaagatccaatacataatatatttaatttatcataagtaacttagtgtaaagaaagactaaagtactttttaaaatatgtatttgtatttcccgatgtgaaagaaaagaaaattgaatttgcacatatcaataatattagctaggaaaaaacttgtgagaaatttctttgacgacttgcgtgtgcaatagtcttccttatcttctctaccatttcttaattccactattgtatagtatttacttatgttgaattaataaattaaaacatttaaatttccctaaagttactttttgatttttgattttctatttttattacaactttcctactttttgacatcttttcttacaaagactttttgacatctccccctccagctattatatagtctccttttttcttttctgcattcacataatatttcccctatatagtttacacaacatcatacccaccaacatatataatcttgatcatagagagataaacagaggccgctatcaagaacaagactaagaacaagacttcactaggagtacaagtatgggaagagcaccgtgttgtgacaaagcaaacgtgaagaaagggccttggtctcctgaggaagatgcaaaactcaaatcttacattgaaaatagtggcaccggaggcaattggatcgctttgcctcaaaagattggtattaataaatttatagtcactctttttcatataaatttgataattctctcttgatctatctctttttttgtgaagaagtattgataactaaagatgctttttgtttatatgattatttcttggttgttttaaggtttaaagagatgtggaaagagttgcaggctgaggtggcttaactatcttagaccaaacatcaaacatggtggcttctctgaggaagaagaaaacatcatttgtagcctttaccttacaattggtagcaggtactattcatatacgttattcatgtatatatcgttaaaatatcatgtggaaactctgaaatatagttatgtgatgatgtctataattaaaggtggtctataatcgctgctcaattgccgggacgaacagacaacgatataaaaaactattggaacacgaggctcaagaagaaactcattaacaaacaacgcaaggagcttcaagaagctt

SEQ ID NO: 90 - DNA, 97711 bp, Arabidopsis thaliana
aagcttactttatatctaaagtaactttattttttacactcaaactatttttatacagaatcaaaaatagaaaaatacaatagagatggtcttaggcctaagcataaatttagctctgtccagtttcttccgaatattggatcattcggattgtgtaatctattaggcctagaaaaagtttagccagaatagtttggatgtagttcggttgaagatagaaatcgggaaatcatttatgataagcttctttccaataattcatttacacacgaatgagaagatgcttaaaaatcgctagattacaaatttttttgtcatggttagttggttcatccggtattccaacattcaataaaagtaaatactataaataagcattctacatttataaaaagaaagattcaatcgagtctgatttcatctaaaagagggaaatattttaccaaccttactgactcataactacgaaagacatcacatcgatatcctccataattttggtagttcaagtttatttattctcaacaatatgtcaatatcaaaagcaatatatacccattaacaaacaaaaagaaacggtatctaactgcaacatatagtgaagaaggccaaagttctacacaaacaattctccttcgtcactgtttataaacgtataaactcgtataagttcttataagcaataatccggaataacgacagtagaaaataaatgctagttgtacattttagtagttgaatctctgacaaaaaaataaaaataaaggaagaactaaatttaacagaatcataatttatgactggtaaactataattaatcatactttataattaaaatttaacaaaattaattaaataatgattttcctaggtgaagatatgatattatgatttatgatctccaataatttatgattggtaaacctacaatatagtaaatttctttatttattttttgttatttcgcccatcttgcacattaccaacgaagtcataattttatatgaaatccttagttatttatgcattacgactacccacatagaagtatgggtactcacacctagtttatttacaatttaatatgcattgcatgttctaaaatttcaacttgaagtttatgataaaatataaatacggaacagtatgtttatcgaaaaaaaaaaaacttgaagtttatatctcaccgaagaatcttccggctcatcaatggtacataaattataataaggtgctcgttcatatctagctttatcatttataacatacgaaaatgtaacagttgaattgctagcagaaaattagcagtggtggtggtggtagtggtcttgttagttgttagtgatttgtttagtctataataaatactaaagagatgttattggttcctaaagaaattttcatgaccttaataatattataaaaagtaaataaatgaaagattaatttaaactattgctagaaagttgtttaattcttattgattattttctcacaattttgtaaaattttccaaataatatcattattttgatgatactttcatgactttattttaagaagaaaaatatagaaagttatatactaataacacaataatttaatttattaaacaatcattgattcttttgttttaattgaataacacaaaacttttaatgactttataaaagtatgaatccaataactccaaatttatgaagattttaaatttttttttacaaattttaaactaatagtaccaaactttaacaaacttttaaaaatattaatttgataacaacaaattttacataatattttaagttaataaaactcaaattaaatcacaaaccaataacactcccaaaatatcaatttaacgtcacaagtacaagattgaaactcattaaatatgtatgatgtatcctactatattatttgggaagtacattttaaatgtaaccttaatttttgtaattaattacatgacaatgccattagaaaaatttaatcaaaaacaaaatcttttaataacacattaagattaccaaaatcatttaacgacaatattcatctcttaattataggcttattggatttaaagacgggtcatcaaagattttctaactaaagcaaaatatactgaatattcaaatatctatctattaccaaattataaacaattaagttcgtaaaacaatttaatattttatatacgaaataaagtaaatcttaatcacataaaaattagcacaaaaaaaaatatggtacattcaggtctatagtatttttgcaagacttttttggtggatttgggtaaaagtgcattcgggtcatatggtacattcacctattaaataaatatggtatactcctatgttattagctaaaatgtttagattataattcagagtcatatcataaataaaattactattaataaaataaatggctttttggcaagacggatttggagggacgggtttttgaatcaacattaataaaaaaagtaaaatataattaatccaccatttcaatacgggttaaatctttaatttattattttttaagaccactaatattaaacatatcaaatcatcctaatttagaaaaaattatataaaaccaaaaatgttatgtggtatgtataatgttactatatataaacttaaactataaaatataaatgtattagagaatgatacaatttgcaaaacttttatatagaataaataattcttaaattttaaaaattactactttaaaaaaaaatcacggaacgggtaaagaaattacataacgggttttattttggaattgggttatatggtggatgtatttgaattaatatttataaaattttaaaatattattaatatgttgttttaataggggttaaaacttcagttttttaacaattgtctcatggattcgtggtatagtgttacttaataacaattataaactgtaaaatataaatattttataaaaataaaatttgcaaattttaatatatattacttttaaaaaataaatcatcccctggtataccgagggttaaaatctagtccatgattgttacggcataccaaacttacatgataactaaagagtcttaggttaaaactgtggtagtcaatatatgaagagtgttgttgatttaatttgcgaagcaagaaagaactaaaattttaagacattccaaaagactctgtatcattctgaaggtttgagcttggaaagcgagcacgtgagtcgctcgtgaaactatataatttacgaaaactctaaatacaccccaatagtattatttcattcaaaacacaccccacaatttatttaaaagagtcggggtttttccaagaacactggatcgtcgtctctctcctttagttagacaaagcctcctttcccaaaaccctaaaatcagccaaattcaaattccgctaaccaatttccatggcagaggaaattccagcaacagcatcattcactccatacgtccattcacaaactctaacatctcacaatcgcgccgtctcctccgtgaaattctcctccgatggacgtctcctcgcatccgcctccgccgacaaaacaatccgcacttacacaatcaacaccattaacgatccaatcgccgagcccgtacaagaattcaccggccatgaaaacggtatctccgatgttgcattctcttcagacgcgaggtttatagtctcagcttccgatgacaaaaccttaaagctatgggacgttgaaactggttcattgatcaagacgcttattggacacactaattacgccttctgtgtcaatttcaatcctcaatcaaatatgattgtatctggttcgtttgatgaaactgttcggatctgggatgtcactactggaaagtgtttgaaagttcttcccgcgcattctgatcctgttactgctgttgattttaatagagatgggtctctcattgtttcgagtagctatgatgggttgtgtcgtatatgggattctgggactggtcattgtgtgaaaactctgattgatgatgagaatcctcctgtttcgtttgttagattctctcctaatggcaagtttatcctcgttggtacacttgataacacgctggtgagttcacttgttgaattcctttcaaagatttgatgtttttagtgtgattactagttttgctctatagtgatctcgaaaaaaagcatgaagattttgggtagagtgtgttagtagaagtttgatgtaggagaagccaattcaaaactaagtttacagagaagttgttagctttaagtatagttctgttgttggttgatattcaagagtttcgaagggtcgtatctagagggttgtagcttcgaagatacatcgtcgtttggagtttgattaatttgcattaggaaattaaattcttatgattcgttattaatgcactcatctctccatgaacttagattctaggttgtgtgttaatagaagtttgatgtaggagaagccaatccaaagctatttttgcaaaaattgttatctagttaaggaaaagttgatagctttggaacagttctgttattgatcgagattcaacacttttgaagggtcgtatttagagggttgtaagatacatcttcttttggtgtttgcgtctatagggtattgttgaataaaggaattctcatgattcgttataaatttgcagaggttgtggaacatttcgtctgctaagttcctcaaaacatacactggccacgtgaacgcacagtattgcatttcctctgcgttctccgtcacaaatggaaagcgaatagtcagtggatccgaggacaactgtgtacacatgtgggagctaaactccaagaaactgctacagaaacttgagggtcatactgagaccgtcatgaacgtagcatgccacccgacagagaacttgatcgcatcaggctcgctcgacaagacagtaaggatttggacacagaagaaagaataaatcatcactctctctcttcagaaatcaaacatgtaggtacatgccaccttcttcatgcagtaatcatctgttgcttactaagcttgttagattgattctagcctcattatgtaaaagtctaatttttgtttggtgtaagggaagtgcaacagactgttctaaacttgtaatagttctctgtgtgactcagaactatttaggtaggtcttaaggcaaagactcctgcaagtgcaaaggcatttgagagaatgaacacaaatcttcataggtttaccctttactcattgtatctattaagctgatgcaatgcttcaccaatactattggttataaagtagtttcaggattgaaaattgttcatctgaaccatattgatgggtggctcatgggtcaaagtacagatatatgactataagtagataatgtatggtagttggttactttggttggccatgatgatgaagcttatggtcccctggtcctgtcccattttttacttttcattttcacttttatcgtaaagtcttcttttttttaaaccctacaagattttgaaatggaccacttgaaaatttgaacccactctctctttttttgttttcaatttcgaaaccaaaattttttaacaaaaagatgactttgtgacctttgttctgtcttttagctacacaccagtgggctgtttgcttttacagcgtgtctttctgtttacatgattcaagagaaagcaacagttcctaaagactcagtcatgtttgtgtctctcccaattgatacaaagaccaaaattcagctttggttcttttgtgtaaaagttctcgagatatgctaataagattaaacataaaaactctcaaaaagagtataaattgaattctttatgattgtagtagcaaacaataattgttaggtttagtgctatcataataatctattagtcaggttaaatatattcgatttggtaccaaatacgaaatcaagcttcaacaaacgaatctgcaatacacacacacccatccaaaagtatatcttcgacattttccccaaaaaagtatacatttcctaacacgtgcttaccaattcttatcattcgaagtaaaccattaaacaagaaatgttttcattattataaatttttcactaatataagtttattatttagtgcaagaaagtgcgttgcagatgaaaacttattctattgatccgggtccataaagaagaaaacaaaaattcacctaatacgagtacgacttattctagtggctacatatttccctaatcatgtgactaaaaatctgctttcaaaattttgacattcagtatttctttagatctatatcattaaaaattcatttttttcttttgcattttgattccatatttaatacaagattaaaaaaaaaaaaactaatatgtttgttcactgagcaaaccattattgttgatcagtgaactgtggtaactggcaaaagaagcaaatgattcgaaatcctactttcttacaaaatcaaattggataattttgtgagataataaaaaatcagtataaataaaataaaatacatgtcgggaaaccattattgttgatcagtgaactgtggtaactggcaaaagatgaaaatgatgcacataggactgtgtttaactgacttacttccactaatcaaaagtacgatcgtatccctacccatctctcgaggatcttaactgttgccgtgcgtcatctcaaggttgttctcgtcattatcagtcgatcagagtacagagaccggctctctgggttttgtcgatcatgccattgccttggggcttgttgttgtggtccgtcctaaggatagaaatgttattacaaagctttttaaggggttctttggttaattaagtgtttcgttttgcttaagagaggttaaagaagcgggtgtctcaataagttttggtaagtttgtgaatccccagtggtggactccatcttttcccgtcgaattataacatcaggaccgttcatttcaacatcatcaattaattcattatggggtttatctttaaaacatctttttgaatttatggttcgctttggtattgcattattacacttgtatacctgtgtaataaagtgttggattttgtcaagattaggtaacatcacgtttcaaaacaacaaggctccaaattaattaacattttcttcatgtaattatcgtttttgaatcccttcctttctaattccatgtttcattaaatccaccacatgcatatgtttctatatatgttaaataaacgacttttcaagtttttaatttgtgttttctattttcagaaaatttatgtgaaatcaaagtttcttaaaaatctccctccaagtaaattccaaaataaaataaaaataatacttttacaatatacaaataaaactcataaaaaacacacacacaatcttcatcttcctcacttactctcaccctttttaaaaccaaaccctaacttacacagaaagagaagaaaaaaaacaaaaaaaaaatgaagcttcttcttctcctcctcctcctccttctcctccacatttctcattccttcaccgtcgctaaaccaatcaccgagctccacgctcttctctcactcaaatcctccttcaccatcgacgaacactcacctctcctgacctcatggaacctttcaacaactttctgttcatggaccggtgtcacgtgcgacgtctctctccgtcacgtgacctctctcgacctctcaggtcttaacctctccggaactctctcctccgacgtagctcatttacctctgctacagaatctatcactcgctgctaatcagatctcaggtcctattccgccgcaaatctccaatctctatgagcttcgtcacctcaatctctccaataatgtcttcaacggttcatttcccgatgaactctcctctggattggtgaatctccgtgttcttgacttatacaacaacaatttaaccggagatttaccggtttcactcactaatctcactcagctccgtcatcttcacctcggtgggaattacttctccggcaaaatcccggcgacgtacggaacctggcctgttctcgaatacttagcggtttccggtaacgagctaaccggtaaaatccctccggagatcggaaacctaacgactcttcgtgaactttacatcggatattacaacgcttttgaaaatggtcttccaccggagattggaaatttatcagagcttgttcggttcgacgctgctaattgtggtttaaccggagagattccaccggagattgggaagcttcagaagctagatacgttgtttcttcaagtaaacgcatttacagggacaataactcaagagctgggattgatttcaagcttgaaatcgatggatctgtctaacaatatgtttaccggcgagattccgacgagtttttcacagctgaagaacttaacgcttttgaatctcttcaggaataagctctacggtgctatacctgagttcatcggtgaaatgccggagcttgaagtgttgcagctttgggagaacaatttcactggtagtattcctcagaaattgggggaaaatggtagattagtgattcttgatctctcttcgaacaaactcaccggaactctgccgccgaatatgtgttctggtaaccggttaatgacgttaatcactcttggcaacttcttgtttggttcaataccggattcgcttggtaaatgtgagtctctgacccggatccggatgggtgagaatttccttaacgggtcgattccaaaggagctcttcgggttacctaaattatctcaagtggagctccaagacaattaccttaccggagagttgccaataagcggaggaggagtctctggtgaccttggtcagattagtctttctaataaccagctctctggttcattacctgcagctattggaaacttgtccggtgttcaaaaactacttcttgatggtaacaagttctctggttcgattcctcccgagattgggaggcttcagcagctatctaagttggattttagccacaatctgttctccggtcggatcgcaccggagatcagtcgttgtaagctgctaacgtttgttgatcttagccgtaatgagctctcaggtgatattcctaatgaactcacaggtatgaagatcttgaattacttgaatctttcaagaaaccatctcgttggttccatacctgtgacgatagcatcaatgcagagtttgacatcggttgatttctcttacaacaatctctccggtttagttcccagcactggacagtttagttacttcaattacacatcgtttgtgggtaactctcatctttgtggtccgtatttgggtccttgcggcaaaggaactcaccagtctcatgtcaaacctttatctgctactacgaaactgttactcgtccttggattgctcttttgttcgatggtgtttgctatagtggccataatcaaagctcggtccttgcgaaatgcgagtgaagccaaggcatggagattgactgctttccagaggctagacttcacttgtgacgatgtcttggactctctcaaggaagacaacatcatcggtaaaggcggtgctgggattgtctacaaaggcactatgcctaaaggcgacctagtcgcggtcaaacgattggctacaatgtcccatggatcttcccacgatcacgggttcaacgccgagattcagacgctaggtagaatcagacacagacacatcgtgagactgctcggtttttgctccaaccacgaaacgaatctccttgtgtacgagtacatgcctaatggtagccttggagaggttcttcatggaaagaaaggaggtcatttacattggaacacacgttataagatagctcttgaagcagccaagggtctttgctatctccaccatgattgttccccgttgatcgtccatagagatgttaaatccaacaacatcctcctcgattccaacttcgaagctcatgtcgccgactttggtctcgccaagttcctccaagattccggtacttctgaatgtatgtccgcaattgccggctcctacggctacatagctccaggtaacaaatttgcagaaaatggcatttaatcaaacacttggtggtgaaatgtaaaatctctgaacttgtttgttccttgttgagcagagtacgcgtatacattgaaggtagatgagaagagcgatgtgtatagtttcggtgttgttcttctagaactcatcaccgggaaaaaacccgtcggagaatttggcgacggcgttgatattgttcaatgggtgagaagcatgacggattcaaataaagattgtgtgctcaaagtaatcgatcttagactctcttcagttccagttcacgaggtaacacacgtcttctacgttgcgttgctctgcgttgaagaacaagcggtggagaggccgacgatgcgtgaagtcgttcagattctcactgagatcccaaaaattcctctttcgaagcagcaagcggcggaatcagacgtgactgagaaagctccggcgattaatgaatcgtcgccggattcaggaagtccaccggatcttttaagtaattagactttccggcgattgggtttggtcattgaggggcaaatttgtctttctaattttcttgtcaccgacgtctcggtagtggagttaattacttaattagcccgttgttgtctggttccggttaaggcaacaattagtggtttaactcttaaggttgttgcatttcttttttcactgctgccacaattattcgtgtaggaattttgaatatgtacattgcggttgaattttgcatgataagtggttaatttcaggaaatcgaatttcgagaacattatggcttatgcatatcagcatatatatacatgcagttatgtatatgatcaatctgcccccggttcaagtatgtcaattgtgttagaccaaaaaacacttttgccccttatattcttaagaacttcatttagtttcatactcaagcaaaaactaattttttagagttttcgttgtcttaaaatgaaactagtgtctccattatgctggaatcttgcttatgagttgttacattacatattttattctcacctttgcttttacccttttggattgtatctggttgtggtagctgttgtgtcacaacaagacattccatgtgaaaaaaacacagagagggtgaaaccaaggtatgaatgtgtttgtgtgggactgaagatgagtaacgctgagaagagagaaagtgaaagctcactcacaatttgtccaattattgcaaatgtatgggtagtgtgacactagtgtcttaatgaattcagatggtcctaagatcttttttccactctattcccttgtcttgaagcaaaaatctaattttagacgaagcatttatgacatctccctctcattaattacaagccatatattcaactttgattttgactcatcaatatcaaaaaatctttagactttaggtgttgttgctatccttggtatctagtactttcttcgataaccatgactattatattgagataagaaagatataaagaacaataagaatattagttatgatattttagatgtattatgttcaaaatttcttacgttcgaatgtacattgatgatcttgtaaacctaattaaggagtgcctaactctagaattaataagtcaggagttagttatcaagaaactagaaagacttgaagatggattaaagtggtaattaatgtttttcagaggccaagattctaattaagagatgggaaatggcatgttccattctctagcttcatatatacacttatcgggtgaaactaccagattacgaatagccattagatgactaacaattgaattcaatttaaatcatccaaagatatattttatatattgagattctttcttcatctcaaacttctaagttctaacatagtcatgtagttgaactttcgggccgaggcccataacaactccatctacttaaacgaaggttagataaagggacgaacaaaaagaatcagtctggtgtcagaaactagagtatgtacttttgtgtttgaattgtaacgtttgtttctttcttcagctcttcattggtttatcgacacagtacttatgtcactccaattgtgagaaaatcattctgcacagtcgtttcgaaatcaaggaaatcaaacaagagcaacaacaatccaaagagtaccaaaatatatttggctatagagagctatcattgtcttgtacacttgtccatgttgggctatagatccatatttgtgttgggctaggctcagtttttcttaataacacaaacttacttatcaaacacgtgttgtctttttggttatttaagtagttgacaaacaaaagtacaaataagctgttagggcaaaggagcaaaaacgaaaccacagagagaaagcctccgtctcccttatcaaagaagaagaagacgtgtataacaaaacactagacacattgtgaagatagaaaaaaatggagagagcagcaattctcccgagtgttaatcaaaattacctactttgtccttcacgcgccttctccacgcgcctccactcctctactcgtaacttatcgccgccgtcatttgcctccatcaaggtcaactcttttctcatctccctctcttatcatcttctgatttatctgacccatttctccgattatctttcacagcttcagcattcttcttcctctgtttcttctaatggtggaatctctcttactcgatgcaacgctgtttcgtccaattcttccaggttcgttctttgtttttggtgggtatttgtccaagttctcaggttcttacttatatatatgtattgtttatgttgaattagtacgttggtaactgaattagccgacatagattgggataccgttggatttgggcttaagccagctgattatatgtatgtgatgaaatgtaacattgatggagagttctcaaaaggtgagttgcaacgttttgggaatattgaaattagcccatctgctggtgtactcaactatggacaggtttgttttcttagttttcttcaaagtcatgtcctttactgtattgagtatgatcaaaagtctagaccaagcttagattatggttaaaagaagctttttgtggggttaaggtttaggatttgaatgtcagattcttgacactgaaacgcaatctattatctgattttgtatcctagtttctcaaagtcatgtccttaacaagttcgataaaaggaaaagccttttgggggtttaggtaaggatctgaaagtgtggagaagttggttagattcttggcaccgaaaaacgtaatctgccgtcgattttgttttctagcttctcaaagtcctgtcctttactgtaatgaattctatgaaagaaacttaatttatgctaatcaagaatctttaagggagttaggagggtttgaaagtgtggagaaatttgtcaaattctggacaatgtatcacagcctgagtttgtcaataagtctagtctcctagttgttatgttagttgcatctagtgaggatttatttactgaatgtatattcatatattgcacggagaaatcttcttatattgtaagtgatgatgagaaatgccaagcaatgtgttgtggtaaagagtgcaatttaggatcacatgagtcttattagtgtatgttcttctagggattgtttgaagggctaaaagcttacagaaagaaagatggtaataacatcctcctctttcgtcctgaggagaatgcaaagcgtatgagaaatggtgctgagaggatgtgtatgcctgctccaaccgttgagcagtttgtagaagctgtgacagaaactgtactagcaaacaaacgttgggtaatgaatcacgcagttttttttgtctcccgatatgcagaggaaattatctagatatttgtttgctgttatgaatttaacttgtgtttggtgtcttgtttttaggttccaccaccaggtaaaggttccttatatgttagaccattgctaatgggaacaggagctgttcttggtcttgcgcctgcaccagaatatactttcattatctatgtttcgcctgttgggaactacttcaaggtctttcagagttacttcgatctattccaactatctaagatttgttgtatgtttctctgaatgatgatacggatttatatgatgatgtcaggaaggtgtggcacctatcaatttgattgtggagaatgaatttcaccgtgcaactcctggtggtaccggaggtgttaaaaccataggcaattatgctgcagtaagtaaaagcttatttcacttattgattttattggaccagctttcgtaactcacacatacaagttatttatttaggtactgaaggcacagtcaattgcgaaagctaaaggatattccgatgttttgtaccttgattgcatttacaaaagatatcttgaggaggtctcgtcttgcaatattttcatcgtgaaggtaaataaaaatcaatctctcggaatctgatgatgccttgtagagtctataagatgtctctcttcataagacgtaggagatgatgagattgagactctggcaccatgtttttttgggggcattcttacaaacatatcaagatactgattctcttacataatgattttttaaccaacacttttctttgccaggacaatgtgatatctactcctgaaataaaaggaaccattttacccggtattactcgaaaaagtatgatagacgtggctcgaacacaagggtttcaggtgacctcttccccttctttaaattcccaacatctttaaagtggatcataagtactattattggcttctgatcacagtgcatgtttatacggtattgttcaggtggaggaacggaatgtgacagtggatgaattgttagaagcagacgaggttttctgcacaggaaccgccgtggttgtctctcctgttggaagcgtcacttacaaaggcaaaaggtaaaacgttttttctttgtatcccaatttaagtgaaaaccaaacctaccaagtggtaaagctttcccctttttccgaatacacacacagagtgtcttacggagaaggtaccttcggaactgtgtcgaagcaactctacaccgttctgacaagcttgcagatgggtctgattgaagacaacatgaaatggactgtgaatcttagttaagccaggcgaatgcattgcatcaattcggctgcttggttttgctttcttttctttggtctgtggttctgattcgtgaaactatgagttggattgtttagaatctggttgatctagaacttagctggttcaagatcattagatgttgttgcatcataccaataatattatctttagatctctgtttctgattagatggttacatccaattatttctctaaagtctgagacatcattgatatctaacaatcaaaaactaaaaagtgaagtattaacattttaatcagattcaaaccagaacttatcagtcatcaaaaatgttggcaaataacaaatcaaacttaagtttttggatggagaaagcaagctagattcgaatctctaagaagcgtggacttggacttgtttacgacctgaaaagatgtcatgattatctcatgattacgagataataacatgtcttatctactaaactaatctaaaaagtagtgaggatgacttgaaacttaagtcttatatgaattatctttaaatatagaaaaagaaaggagatagagaggtgtgtttttcatgtgaacaacttttttttacctttagagtacttccagaagacttattgggtccttaataaaagtagaccaaattattgaagagctaaaaaaaaatgcctactcaaaatatccaaacctcttcttttagccttttgtttttttcaatattcatactaatgtaaactacaatcattgtatcattctataatcatatgaattttttgtcaacaccatgcattatgctagtttaaatttaggtgatgatataaagatattttaagtacaaatcaataggggcgatgttcttatgtctttatctaactttatgaatttgtgttttatatattatgaaaaattggaaaagaagagatggcctacgctcaagaccaattcctaccaatgggcaatggtgttgaaatctgaacaaaaaaatttcctttctttaacgttagctttaaagttcaaaaaactttatttactttttcagtgataattctgtataaaataacatataacaatgaggaaaaaactcaataatttgaatcgcttatgactttatttctccaagtgcttgacttttaaaaccctaatgtccaatctcaactaaagtcaacctttttcgttcgtctagaagagtcagtcattaagtttcaattgaagtatacagtaaattattagtactttttattttattttaaccacagttcattggctgtatgagatttctgttcaagaaaacatataaatcgaaaccaaagcaaaagacattatttgcttcggtttcttctactcaagctcatttttagtaaaactaaattgtattttcattttcttaaaaagttaattgttttttttgtaaaatcagttttaccaaattggacacaataatgaatatatgtctatgtctagttttttttagctcagaatatatcttatgtgaatagaatcgtctatcagatatttttgtgatgcagatagaacttaccgttatagaatcatttgtagattgttcatcgtgattgttaagattagattcccatttgtaatataacagaaactcgaaaagtacttatattaagtattaacgatgtatcatgtgaccaaaatagaaaatactacgtaatgatatgattattaagcgagtgtgtaggtaattcaaatatttcaattaatcaatctttgatatcactctttagagtaatgtattatctttcttattgttttaccctgggattaataagtttaccggatccggagtagaatttcttcggtttggcaattttgttcacctaccataacgaacttttacccttatacttagtttcaatctacttttggtgcatcctttcattttcaactgcaaagaagtagttaaaagatccaatacataatatatttaatttatcataagtaacttagtgtaaagaaagactaaagtactttttaaaatatgtatttgtatttcccgatgtgaaagaaaagaaaattgaatttgcacatatcaataatattagctaggaaaaaacttgtgagaaatttctttgacgacttgcgtgtgcaatagtcttccttatcttctctaccatttcttaattccactattgtatagtatttacttatgttgaattaataaattaaaacatttaaatttccctaaagttactttttgatttttgattttctatttttattacaactttcctactttttgacatcttttcttacaaagactttttgacatctccccctccagctattatatagtctccttttttcttttctgcattcacataatatttcccctatatagtttacacaacatcatacccaccaacatatataatcttgatcatagagagataaacagaggccgctatcaagaacaagactaagaacaagacttcactaggagtacaagtatgggaagagcaccgtgttgtgacaaagcaaacgtgaagaaagggccttggtctcctgaggaagatgcaaaactcaaatcttacattgaaaatagtggcaccggaggcaattggatcgctttgcctcaaaagattggtattaataaatttatagtcactctttttcatataaatttgataattctctcttgatctatctctttttttgtgaagaagtattgataactaaagatgctttttgtttatatgattatttcttggttgttttaaggtttaaagagatgtggaaagagttgcaggctgaggtggcttaactatcttagaccaaacatcaaacatggtggcttctctgaggaagaagaaaacatcatttgtagcctttaccttacaattggtagcaggtactattcatatacgttattcatgtatatatcgttaaaatatcatgtggaaactctgaaatatagttatgtgatgatgtctataattaaaggtggtctataatcgctgctcaattgccgggacgaacagacaacgatataaaaaactattggaacacgaggctcaagaagaaactcattaacaaacaacgcaaggagcttcaagaagcttgtatggagcagcaagagatgatggtgatgatgaagagacaacaccaacaacaacaaatccaaacttcttttatgatgagacaagaccaaacaatgttcacatggccactacatcatcataatgttcaagttccagctcttttcatgaatcaaaccaactcgttttgcgaccaagaagatgttaagccagtgctcatcaagaacatggtcaagatcgaagatcaagaactggagaaaacaaaccctcatcatcatcaagattcaatgacaaacgcttttgatcatctctctttctctcaactcttgttagatcctaatcataaccacttaggatcaggcgagggtttctccatgaactctatcttgagcgccaacacaaactctccattgcttaatacaagtaatgataatcagtggttcgggaatttccaggccgaaaccgtaaacttgttctcaggagcctccacaagtacttcggcagatcaaagcactataagttgggaagacataagctctcttgtttattctgattcaaagcaatttttttaattataataatatattattcttaagatgaaacgtacatcattattattaattgggggtacgtaacgtatatatggaataacgatctagtttgtttaaatttattgatatctcatatatctggatttgaaattaactctaatatgcagaagtatgaactcatatgcgaaagatcctagcgaagtaatcacatttagataaacaaaatttgttattgttacttttttttttttttttaaagtaagaacgtgtaatatgcatgtatgtatatatgtatggatgcctatgtgaaaagagttaacacttaagagtatattgtgcatgatgtgttacgtttccattatgtatacaatatgataatacataaatttacacgcataatatacctattgggcgcaaagttatacacattttaaaatgggaaaatattaatggtgcttttggggccttggcatatgagctgattatatatggtcggatccatatgtacgtggttggatgtattgattgtatatatgcttctttaattgattgtatgttcatcctactttttcgaataatttatgtttacctcaatgtcggattgtgcgaagcatttagctggaaaccattgatgttaataataagtaagaattaacatagatggatttataaggatataagaattaatacctaaccatttgaccaatgaaaagtttggatcaccaaataaatgaattgtgtgcaactctgaacttctcaaagacatgacctctctattcctagcaagtcactagtctgtttcttatttcctcacagaatcaaatgatgatgtcatacgaaaattctctttcccttacgagtttggcacattcgttgcctattcaaaaatcaaatcaaatttagaaagtcctaaaatgacactgtcgcttgaaatatacgtataaaaactctcgcttcaaaaaatcttttgttgatcaaacaatccattcagtactagctagaaggctagttagaagtagactagacttcacggttcaattagatattatctttgatcttcatatattcatgactcatgagatgatataggacaaatgagatgatatatagaattatagataacgatttcaaagagtattacaaaaacaaatgcatcatttttttcttcttaagagtattacaaaagtactctctgaaagacaagaatgttccaaaacattctcttcaaacagcaaaatgacaaacataattattcaattttttttgccgttaatttaatattcctaaatcactcaccaaaatttcactaattaaatagtaaatatcatatccttttatcacaatcaagaaccttattaaatgctttttacttgtatatatgaatgtagctgaaagtttcaaagtacacttcgttatcaaaatttcaaaatatgtcttccaatgaagtcataatcttaagacgcgtggaaaagttcttttcctaatgtacgtatctaagtatttttttatgtaatagtaatatattattaatcgtgatataggaagaaagggacctagtgatgaaaatcatgcacgtaagccactcgcattagtgattcagtggattgtagaacgtgtcattggcatgcgacataatcacctttgaaccatttttcatttacctaccaaaaaaactatattctttttcaaagtgtaaaaacgaaatgtcatagaaatataaagaaagtttattgtcatataaatttccacatttgccaaagctagctacgtaaaatgcatgaaagtagatatcatgtgcatgtcaaatgaatctaaaatgcaagtaatcttttataagtatactactaactaaaacatatattaaagaagagagatctttattatcttcttcactttggttacagtcttttcaagctggttggtcttctttgttggatatttgaagttggaaaaaacaaaaaagaagagagaattttttatttttaataatttgtaatcctacattatataagagtaaaaaaaaacagatgtatagtagaaaaaccaaacaaatcactaaagttttctaccctcccgctttagacgattaagagtgatcaaagaaatttgtttttactgttaaaaacttctgaataagtaagaaaatatcgaaaacattgatgagtttgtgtcttttagttcattaattattatattagttatttaaaagacaaaaaatgacaaccaaaagaaaacaaatttttataactttaaaatactctaaacgatacaatggtttattcatatacacaccaaaagaacattaacaaaaaatttaaaaattctaacatggctgatttttttttttaataatatatcgttaactttgtattgggtcaagctaaaaagcaataaagaaggaaaagagaataataacggagaagaagaaatcaagaaacaaaaaatcaagaatataggaacgaaaactacactactataaaactaagaggattagataaaataatcttaagtaatagataactaattgtacattctgtcaaaacccctcgacgttatgtaaacaaagccatataaaacaatgattggcttggcgacatatagctttacgacaactaacaatgacttttatttatttgcttacatacaagtaaaagactttgtcaaataaaaataattaaaaggacttctacaacataattaattttgattcaataatccagccgatgtcgacacgcactagaagaacgttaaaaaaaattccaaagtttttctttaaaaaaatgtcattgtcttaaaagaaggaaatctcgacgtcaaaaagaactaaaagaaatctgtttgtaacagaagatattgacacttttttatttgtgggaacgaaattttattttagttaaaaggagtgtggaaatggaataatccaattgttctagtgtttgacgatttcttgtcatctgcttatggcaaacagaactgaattttattaaatctggttcacatgataatcatattttgtcgaaataaaaattgaccgttaagtggttcatatatatatatatatatatatatatatatatatatatatatatatatattatatgttaagaaaaaaactagatttttatagctaaccaaaaatatggcatacgactgtatgagaaacaatagaatccacatccactcatcagctagacgtttctacattcttagagtttgaatcaaactatcaagaaaaaacttctatgtcatgacattatagaccaaatcttgcatgcatgtatcgtactacagtctacatacttcatacttggttggttccatataaacttcgcaattgatacactctgtgtatattatgtattcttgatttgccatgtttttctttacattaacatagataatagatctctaagatctgctttagtttgttttcttcgttttcttttttgttaggcctccatattctttttctctttatcccccaccagttttagtcgcaatatatgtgtccgtttttaaaagtgattatgaaaatacaaggcttttgtggcccaatcactttttatggcccgacgagtattggatttttcgcttgaatttgtagcaatttttcgagtcgtgtttattttggaagttacttgcattaatatgaatgcatagactatatgcaggacaggactgactatatgtataattattttctattgttcgttcatgtcatggcatggcatgtgcaagttatggcctaagctcatgaacccacgtgactgtattcctctttgtacatattttacatgttaatcatgagttttttatattagtttattcaaaattaagttcacatcaaccatattgacgagaatttatattatcttggacaaatatgtcaaacaatgacgagacataattccctaataaaaatatgtgaatctacatttcgatctatcgttatagaaacaaccgaccactttgctttttgttatagatatgtgtgatctaaatcatatcgagacaacctcacaaatctcaaaatttagtaatatacggtcgataatacagtggacaaattctggttgggtcgtatgcaactaataaacagcattgaactcaaatcatatgaacatcaaccaaaattctcaaaatcaattttacgtgtttttattatttctttaattggaaaattccttatatgttatacaacccaacgaccactataatgctcctcacatgtaaagattatatgtcgtcacggccgatttctccgcgtttcatacaaaaaggggaacaatatcgtcatatttggaaattttgttaaatctgcgtagtataattcgaataattcgttcgtagaagtaccaacaaaggttacaaaagcacatgaaaattatggaataatatattttgaagagattcactatatatcatgtctacataaagcatcataatctttgaccgatatatcatatatgataaaatgatattgatcgtctataactggaataataattacgattcacaatatgttttagattcatgaattactattaatgagaagttgacaaaaagaatatgtagctaactagctattaatgagaaattagtttttcattctaaaatccaaatgatgaccactattaggcctaatagtcatttcttcaacctgaaataaaaaagtattgattgacatgaaatgcttgtaggtttctaatttatgtagcatatattttttctatttgtttttctgatcaaatatcgtagcatatatcatatttctctggatgtaatataacatgtaattttttccatcgtataatggatagttgtcgtaaactaaactttaatttatgttgttcgttacgttatggactaaaccttctgattcaatatctaagcaaatcgaaagtagttttcatgttatcgtttgtttttatgtgtgtgtaaatatatatatggctaatatttgtatactgcgaaatgtagaaatgtacatatgttatatattttcatggatataaactttccttgacattacaggagatagatatatagatagccattacaaattcaaatttggattgagtgcacttaatgctagtaacacttatatccaaaaaaacaaaaaaaattggctacaaattctcagggaaacatttataaataaaagataaaaaaataatatagttgatattaaaacccaaaaaaagaaagaaagaaagaatatttagtaatatcattatttaagaaaatgtaacaaccattttccaaaacaataaaaaacgattatatatatatatatatatatatatatatatatatatatatattattgtaaatgaaaaaaattggtaggaagatttgctttgtcttaacttggggcgatgaatatactttcatcgttcatcaggtacacggtcggtccatgaaacccggaaaacccagttggagacagttctcttcctcaaactcttgatcctatcatgactgctttttgaaatcactcttctactatctgttgactctacgtactctttgagcctcttcatcgccaaatcaagcgtatcttcactcatgttggcgaaacaaaccctaaaccaacccggttcagtacaatggcacgatgaaccaggtgaaatattcagcttgacgtcatatacaatcttcttccatagctcaagttctgcttcgaatgtgtttgtgtccaaaagatgtctcatgtcaacccaacagaacaaaccagcgttgcttttaagacaagtaatccctgcagcttctagaccggacacgagtttcttctgacgaatcttgagtcttttctggttttcgtcgaggtatgtacttgtgaacttcttgtctgaaagcaatgcagagagaaggtactgtgtttgagaagacacgagaccgaaacttgacatttttgttgcagcggaaacaaccatttcgtcgttggagtaaattgctcctacgcgaaaacctggtaaaccgagatctttggaaagactataaacaatatgaactcgtttggagacttcgctgttctcgaggttcttgtcttttaagacatccatgacacttacaaactgttcaaacccaaaaacggtacctgaatagatctcgtcgcttatgagatgaatgtttttggaagtaatgaagtcaacgagaaggttaagttctcttctggtcaacattgtgccaagagggttagacgggttggtaacaagaactcctttgaccttaagatcaagcttttgagcttgttgataagcttgttgaagagctgactctgttatttggaacccattagagcttgagcaatgaataggtacgatctctgctcccgttctccatttcaagtctctatcgaatctgtatgcataagcgaatcaaatactatcagctcaggtttcttgtgaggcaagtaattaaataaaaaaacctaaaaaattaccctggatagtaaggagttggtaaaaggaaagcgtccccgggttcggcgagacaaaacatgagagtttcgttggcagatgttgaaccagcagctaggacaatcttgcttggatcaaatgttactctatttcctctgatttcctccataaactctgccaaagcctatagataaataaaccctattaagttagttactcgcttcttgatcgagttacttatgaaggtgaaaaaaaattaattacttactttcttgaattcgggtaggccatgatagtcttgaaagagagcaagctctttgaaaatggattggccgtccttttttagtccggctgcgtccggattcttagctaaccatgtctctatgagatcaaaacatagctgcatgcatattaaaaacatcgtattaaacacccaaaaatatacaataattaaagattggtcgattggtcgaaaactcgtagttatagttacctgattttcggcaagacccatttgaataatcccattagggttcttgatttcgtcgtaagggttcttctcgtattcttcccatcccaagaagtaggaagagtcttgtccatgagcattgcttgtcacttttctcgacagttgtttcattttttgatataaaaatcaaaaagaatgtttggtttattgaaagatgactaatgaagaatgggagaacggtaaatgagagagatatgttgaattaggttttagttagttggtgaagactgaagagtgagatgtggaatgtggttgcttgtgggagctatatatatatatacttccgttttttacttgacgtcacgtagctagtaatttattagtaatcatttatcgtcagttagtatatattttgctaatcttatactacaaatctaaagaaaatctctcttcctatctctatataaagttaaattgaaaaagactcaacaattatttcaaattttgaagtatgtgtgaaattgggttaattaaaaacagaagtagactaaaacgttataaaattttagaggaagtagaataatattgtttaaccctcactatatatattattacacaaacacatgagagatataaagaaaacgataataatgataattggataggtgaagtagaatagagaaaagagaaagcttgacacatagttaaacaaaacaaaattagttttgtccataaaacgcgttttcggtcaccgcccatacatacatgacaatgaattagcgaccaaaacaatacaaaatctatttttagatcgaatgtcatgatattgtgttggggatttcaccaattgtgtttcgggagttatctgagatgtttatgattattactgcggttatgcttataatacaaaactagtggacattagagatattaaatctgaagaaaaagtggccgccaaattgaaaataaatagtaaattttgattgggagttttgggaatttgaatatctccgaagccagtaagactaagcttagaaaaaattttaagatccatttcggatttggacatttagatccgaactcgataatttcatgatcatgccactagggttaatcagacacaaggtccaaattaaaaaaaaaagtgtattattcacaatttctggttatgaatcttttgatttaaagatgttattgtttctaatttacaatttttttttgacgattttaataaaagcatacaaaataaagaatagaaagattctaaattattgttagatctagagagttttctataatcttgttgattagttttccacaatcttataaagttttccaaataatctttctattttaatgatatttttgatgactttattttgtaaaggaaaatatcaaaagttataaactaataacataataatttaattcattaataatcataaattcttttattttaattgaataacacaaaaattttattgactttctaaaagtatgaatcaaataactgcatgaaaattttagatcgcattttacaaattttaaactaatacactagattttaataaacttttaaaaaattttaactgaataacaacagattctatataacatttaaatcacaaaaactctatttaattcgcacacaaataacatcccactgtatatatcatcacgtgcttgcccaaaaaaattaaaaaataaacgagcccataataaatgggccttgaacagattctaagcccaagtcaattaacgaaaaataagagacgaaacgaaaacttatgactttgtttaccagtcttcttctgaaaacagaacttgcaaatgcgagaaacatacaatctctgaggttcacttgtcactattagatgaatcagacgccatggaagttcaaaacttttcgagaccttctactgaaatctgtagcggagagagatctcttcactgggaaatcacttcacgcgctctacgtgaaatccattgtagcttcgtccacttatctctcaaatcacttcgtgaatctctactccaaatgtggtcgcctttcctacgcacgagccgcgttctactccacggaagaacccaatgtcttctcttacaatgtaattgtcaaagcttacgcgaaagattcgaaaatccatattgcacgccagttgttcgacgaaattccccaaccagacactgtctcttacaatactcttatctcggggtacgctgatgctagagaaacttttgccgcaatggttctgtttaagagaatgagaaaattgggatttgaggttgatgggtttacgttatcagggttgatagcagcttgttgtgaccgtgttgatttgataaagcagcttcactgtttctctgtctcgggagggtttgattcgtactcgtctgtgaataacgcgtttgttacgtattatagtaaaggcgggcttttgagagaggcggtatcggtgttttatgggatggatgaattaagagatgaagtttcgtggaattcgatgattgtggcttatgggcagcacaaggaaggagcaaaggcattagctttgtataaagaaatgatctttaaaggattcaagattgatatgtttacattggcaagtgttttaaatgctctcactagcttggatcatttgatcggtggccgtcagttccacggtaagctgatcaaggctggatttcaccagaactcacatgtgggaagtggtttgattgatttttactcaaaatgcgggggttgtgatggtatgtatgatagtgagaaggtatttcaagagattctatcgccggatttggttgtttggaatacgatgatttctggatattcaatgaacgaggaactctctgaagaagctgtgaagagttttagacagatgcaacgtattggacatagacctgatgattgcagttttgtctgtgtcacaagcgcttgctcgaatctctcctctccttctcagtgcaagcagattcatggcttggcgatcaaatctcacatcccttcgaatagaatctctgtgaacaacgcgttgatttcgttgtattacaaaagcggaaacctgcaagacgcaaggtgggtatttgatagaatgccggaacttaatgcggtatctttcaattgtatgatcaaaggttatgcgcagcacgggcatggaacagaagctttgcttttataccaacggatgctggactcgggtattgcgcctaacaagataacctttgtagccgttctttctgcttgtgcgcactgtggtaaggtcgacgagggtcaggagtacttcaacaccatgaaggagacgttcaagatcgaaccagaggctgagcactattcttgtatgattgatcttttaggccgagcagggaagctagaagaggcagagagattcatagatgcaatgccttataagccaggctctgttgcttgggctgctttgctcggggcttgtaggaaacacaaaaacatggctcttgcagagagagcagctaatgagcttatggtgatgcaaccattagctgccacgccatatgtgatgctagcaaacatgtatgcagatgccaggaaatgggaagagatggcctcggtgaggaaatcaatgagggggaaaaggataaggaagaaaccgggatgtagttggatcgaagtgaagaagaaaaagcatgtattcgtcgcagaagattggtctcatccgatgatacgagaagtgaatgaatatctagaggagatgatgaagaagatgaagaaagttgggtatgtgatggataagaaatgggcaatggtaaaagaggatgaagcaggcgaaggggacgaagaaatgcggttaggacatcacagcgagaagctagcggtggcttttgggttgatgtcgactagagatggagaagaattagttgtagttaagaatttgaggatatgtggggattgtcacaatgctatcaagtttatgtctgcggttgcaggtagagagatcattgtaagagataaccttcggtttcattgcttcaaagatggcaagtgttcatgtggggattattggtgataataattatgatttaattgaataggaaaaattgtgttggcggatacaacattgaaggataaaaactgacctgttacaaaatacaaggagaaatatcgattacgctatttttttttttcgcgtgcggctctacgtgtaaatatgctttggtgtggaaccagtaggctttggtggtggctggttaatgtaatggcttgaggtggaagacttggcaggctggtttgtataatcctttggaaacagcctgttcgaacttcttgcttggtgcatcgttttcttctaagtttgtctggacgaaaaagcggttccaccacgatgcgctacgcattttagcctgccaacaaaaataagagtgcaagtattaagtcttgtacttgtagtctctatcttgaaaaactttgtgaaagattggtaactgtcatttaagcatgtgtttaactctacagtctacacagtgttttaatcataaagagatgctaatgactaactacataaactaagctaatgccattaaacactaacgatgaaaggtggattcatatttaatcatcaggattcaggagaacagggtatatagtaaacttacgggtcggccgaatttagagagttcagcaactttagctctctgctgaccagggagacctagagcagttgaagttcaagaattagaaaccaaaacttgaaagacatttattagcaaccctttttctcaagttttatgatagtttacctgcaaaaagaaccacaccgtctgaagccacccttgcgagttcaggaacggtcttgttcaggtacttgggtgagagataatccagagcatctgacacaatcacaagagagaaggattttgcccggtagggcagaggaaacttgatatcagcaacacgtacaagacctttgctcacaaaactcttgcagtgagaatctgcatcctcaatatcatatggttcaacaccccatgcttcagtctcttcttctttcaatagactggaaaccactgagcatgtgtcagggcccacatgcaagactttgcgcatgccatctccataagccttcttaagtacaggaatggctctttggacttctgctgtgcaagaatagtcacctgagaattcataacaaattggacaaaaaaaatatcaaacccgagtgtcaagcatttgaatggattaaactgctgataaattgatcgatgcggataaaggtattaacttaagcacatgtactgaacaatgagaaacaaggattacctgtaactttgctaacttctttgatacttttaaatatacctgtgttcgagaaaaaatgaaagcgatgagaaaaatctctagtagagctatacataatgcaaaaagagctatcatatacattacctggaccactgtaagcataaccaatgagaagacaagccccctagaaattataaacatacaaaacaacaatagatttcaattagaaccataccattcatctcccaggaatcgaatcagtcaaggaagacaatgaaatacacaaaccataccacaagaacaaggcaaatagatagtagtggagaagatcgagactttgagtgtaaagctcctgcaaaagggaagcttccaccatcgccaacacgtcttgttgaacctacttgccgtctcgccataactaaaatcccagcaagctcaagctattagatctacacatcaaacactaaattggattaatttgtatccttttttagaattaacattcatagaacaacactaagcaaaatgaacaaatcaacgtggaataaaacaccattctcaagcaaaccaaacacagaaatcgacaaaactaagctaattaattctccaattcacagatccaacataaccatcgacgaaacaaacacataaccttaaaatctattagatcccacaacaaattagctgcgtttcgttctacattaacaatgaatttcaccagaaacaaatccaattacagattgatccatgaaacagctcgcagaacggtagacgaaggaaacccaaatcgagaagaggaagaagaagaaggaagaaatcgaaatctaccttggatcaatgaaataatgagggtttggatctaagatctgagatccgagaaaatgagcactttatcaataaacacacctcacacttgaatttactaaaggaagaagaagcttcgaagtgttaatatcactgcttcaatatcgctatctacttatttatacctgcctctacaaagcgcgtatggctacgagtctatgacgcgctgttacgaaaacgacagcgttttaagtccatttattaatcagaataccaacaaacttcttgccgttttttacacacgtacaagtttcaaaacgacacgcacttctctgattccgtggtacaaaaaaaggaacatagaagcagaagacaaaaccattgtttcgtttcttcttatattctcaacgttgatctaacgggattaatctctcctcttcatcatcgttacgaggtggcctccatttacgcttatgaagctcactcctttcgactatagtcggagacttgagcttcttctctttcattttgtcatcaataagatacagcaactccttcaaaccaactccggttaatgcagaaactctaacatctggtcctttcttatttgcagcatctactttagcaacttccggaactttccagaactcagggtcgtcagcattttcatcttcagacaatagccacccatcagcgtcgtcaccgtctccgttttggatttggtcttcatctactgttgcttcagatgcatcaacagtttcttcagcttttaaatcagcttcgtcttcgtcttcttctcctactccttcgccatcatctagatatttctcttcctccacttcgtcttcttcataatcaatctacaacaaaattcccagtgtgaaaaaaggtggttgcttcttctacttgtatagatggtttatatatcaatcctaccttattccagacttcaatcatattttgaagcttctcttcaggtactccaatttgatttaggacatgaagcactgttgaacgatgctcctcgatatttggagctgttgaatcaactacatgctgcaggggtttaatcatatcaacgccaagtctttctgcagttttctcttctaaatgtaactatggaatattattttatttatttatttagctcttaccagaagtagatcagcttcaacaacttcttccagagtcgattgaaaagctttcaccagctgcaaaaaggcatgagccaagaaaagaaaagtaagtgaaatatcacttgataaaggataagtggaattaaagtaggtatacattacctgtataggcagatctgatatgaatccgacagtgtcactaagaagcacaaagtttctgaaaagaaattgactcttgcgattcagtacaagttcatgtgtaccagaaagttataaacatgattctcaacgtacaaattaacttacccagaaggaagatgggcactcttgagtgtaggatctaatgtggcaaacaatctgcagaggccagaccaaccattcaaaagttatgacttcagtttcaaatttaacagttttaagatagttatgaaaccattgaattataccgctcattgcagtagagagcagtctttgttagtgcacttatcagagtcgattttccctaacaaaagcagataattgatactcagaaagtagactaaaacacttggtttctagctgaaacttcttcggagcaaaattcaaacacttacagcatttgtgtaaccaacaacagcaatggttcctgaactctcaccctctaaccccactcttttcttacgtccagcacgctgcaatagccgtgttcgctgggcttctttaatttgggataacaagcgaatcctccggtctgatattctggtacatcaagattttgtttaacgcatagatttaatattagaaaagagagccatgcactaagtctttcggttaaccaacaattagacaagaccttcggcgttgaagctgaagctcagtttctcctgcaccacctacaaaaccgccaccggttcccttgcttcctgctctcctgcacaacaatttaacaacagtttcatcattgtctcaaaaatcaaaagagtaaagagaatacacaaagtagtatagattaatcactcaccctcgggcactgacaacttcagcttctccaaactgcccaaaagtatggcgtccatcagtaccacgcactcgaaccagtctgctcttattgtacatcaaagcagctaactcagcctgtgaatggatgaaccaatcagctattaataaacctttcctagtatgtaaaaggacaaatctgtattgtcacagtacctgtagttttgcttcctttgtatgcgcatgagcattaaatatttcgattataagacccacacggtctaagacaggttttgcccatattcgctgaagagtcatatcacatgcgaagatacaacattagcttgaacagaagagaaacaaaaactgcacaaacttttggttttcgtggcgttacctctaaattccgttgttggatagcggtcaaaatggcgtttacgaaaacagcatcaacttcttcctgagcatcaagagattgttaacagcatgatccaacttttcattacaagcagcacaaaaaaaaaaaacaaaaaaaaagagattgataatggtgaaatttttagctgcttgccttggaatcttcagcattgagatggcatttgatgttgtctacagtcccagatccaaaataggtatctaagaaaatcgaaacacaatttaaaccagtctctcaggaatatcgtcgaacatatggaaggcatgattcataaaaaaacatctaacacgaacctacgcgaggtttagacgatctacggacagggttttgaacaacaacatgagaaggcaattccttgtcaaagaaatcagattcaaagtacccatatcgttgctcttcaagcgaattcgcgagacaaagcgcttcgttcagcttcgcttgtagatactttggcggtgctaaacgaggctgtacaaggaagagcttaggtgcgcttgaaggatctttagggtttaacaaaactgaatcttttggagtcgactcttcttctatttcgcttgtcttaggcgtatgccgcttcgaagaaaatggagacgatgatggcgtttttgacctaagacggtctcgagcaagaaaagatgatggcgtttccgacctaagacggttccgagcaagagacactgtcctcaacattgagatacgattgaaacgacgattacaaaaatgggggttgttatacaagaaacttgcttgattatcaaggtttatgtgattcagccaaattccaaaacttgttgttacgctcatccacaaatatcaaatatgatcgtcaccggaacaaagcttctcgttcgtcaccggagcagtgactttgtttgtgtgaagactcgattccatttatatttagccttggatcggtttatttgtcggttttgagactataatcgaattaaaccggatatgtttcggtttactcattcggttacacaaaattggcagtgattcagtaataatctcggtttaattcggttgagtataaattcctaacaacggtgccgaactaatgtgatgaaacaaagcaaaaacatgaaacactgtttaattcagctacaaatctaaacatgcttcttttggaaatgttacaatgctttagccctacttctttcacctcttcccttatacctttgatgatctgtccctttcttctttccttctttattccctttaggtttagctttctcaatcaaatcctcctcacctttcttcttatacatcttaaaactcatctctctctcacttgccatcttcaccaccttctctgtaatctctgcagcgatcgtcctattatacagtttattcaatcctttcataagtttcgcataagtattaggttgcggcatcaaatccatctccatcatatcaagacaatacgaacacgcttccttcacgtgaccttttgcgtacaaagcatggatccatattgtccaagctgatacattcagctcacaggaagaggttttgttggatatgcaactccatacatctttcgccatttcgagcttatcatctctaacaaggttattaagcaatgacttcagcgttccatattgaggcgcagagaatattcctcggcttaccatttctttgaagtgattacaggcttcgattaggaaaccttggcttgtaaatccgttgatcataataacaaacgtatcaactccagggcttagcccattagcttccatttcgttccataaccgaacagcttctttcacttcccctaacttacaagccaatcttatcactacattgtaaatgagaagatcaggatgacaacctcttcgcttcatcttctcaatcaactccaaacactcttcaaattgttctttcttctcatgagccaccattatctgcatatatgttacttgcgacggcatgactcctttctttctcatatcatctaaaacactataacctttatcaatcattccccatttacaaaacccacttatcaacgcggtataagtcacaatatcagcctcacatccatacctctccatctcaacaaaaacccgcatcgcctcatccattctcttctccgtcctacacaacgcctggatcaaaaccgtgtaacaattcacattcggctcaaaccctctctttctcatatcattcataagatcatacgcatccgccattttcccagcatgagcatatccactaagtaagttagtgaaaaccacaatgtcaggctcaagcccagcttccttcatctgaaccaaaacttctttagcttccatcaacttcccttccctacaccaaccatacaacaacgaagtaaaataccgcaaattcggaggaaacttctctctcatatcctcaaaaacctttgaagcctccttaacactaccgttcttacacaaagcatctaacaaacaaccaaaaacatactcgtcaggctctaacccatacttaggcatttcgtcgagcacctcaactgctttcttcaccatgttagcagaagcaaacctccgcatcaatacaacgaacaactccggctcaatcaactccggattcgtcttcctcatctcttcaattaaaccccaaacagctccaaattgtcgcattttactaagaatcatcaccattgatttacacacttcatagctatgaaaataaccaggttgcttcgttgcccacagaaagaatctataacctagattcccagcatcgccacaacgactcaacactcgtatgatcaacccgggtcgcagatcaatacctgattcgttaagagcaagctccaattttggaactctagaatggtgattccgcaaaattctgtaaatcttctcgacttcaccggcgaattcatcttcatgcttctctggacaaactaaaccaaccccattctttctctctgttgattctacgaaatcgttattgagaactcttgaaatatggaaccttttacaaatgagatcaattctagaatttgcttgagaagatggttttttgctgatgagaagatcaacaatggtagagaatctacgcatctctcacttcacactctaaaacgacggcgttttcgtcttataaagtcttctccttttctctgttttgcaaatatagcagaaaactaaagccctaaacctaaaagagacaactttcttcactcacagagctatagatgactgatgagaaaagctctatgtttaacagagagtttatcagccatagcagaaaactctaccacgttgctcaatttaaaccggagactaacgggtctcactcgttccggcgagaacagaaacgctctcaagctcttcgccgatgttcaccgttgcacaactctgagaccagaccagtacagtgtctcgttagctattactacagctaggcacctccgtgatactatctttggtggtcaggttcattgctatgcgattcgctctggtttattgtgtcactctcacgtttccaatacgcttctttcgctatatgagagattagggaacttagcttcgttgaagaagaagttcgacgagattgatgaacctgatgtttattcatggacgacgcttctgagtgcaagttttaagcttggtgatatagagtatgcctttgaggtgtttgataaaatgcctgagagagatgatgttgcgatttggaatgctatgattactggttgcaaagagagtgggtatcacgaaacgagtgttgagttgtttcgagaaatgcataagcttggtgttcgacatgataagtttgggtttgctactattttgagtatgtgtgactatggttctttggattttggtaagcaggtgcattcgctggttataaaagctggattttttattgcttcatctgttgtgaatgcactaattacaatgtatttcaattgccaagtggttgttgatgcttgtctggtgtttgaagaaactgatgttgctgttcgtgatcaggttacttttaatgtggttattgatggtttggctggtttcaaaagagacgagtctttgttggtgtttagaaaaatgctagaagctagtcttagaccaaccgatttgacctttgttagtgttatgggttcatgttcatgtgcggctatgggacaccaagtacatggactagccatcaagacaggttatgagaagtatactttggttagcaatgccactatgacaatgtattcttcttttgaagattttggtgcggctcataaggtttttgagtcattggaagagaaagacttggttacttggaacacaatgatctcaagttataaccaagcgaaattgggcaagtctgcgatgtcggtatacaagagaatgcacataataggagttaaaccggatgagtttacttttggaagtcttttagcaacctctctggatttagatgtcctggagatggttcaagcgtgtataatcaagtttgggcttagttcaaagattgaaatttccaatgcgttgatatctgcctactcgaagaatggacagatagaaaaagctgacctattatttgaaagatctctgaggaagaatcttatctcatggaatgcgataatctcagggttttaccataacgggtttccttttgaaggtttggaaaggttctcgtgcttgctagagtcagaggtccgaatcctacctgatgcttatactctcagtacccttttgagcatttgcgtaagcacttcatctttgatgctcggaagccaaactcacgcttacgtccttagacacggccaattcaaggagacattgataggtaatgccctcataaacatgtactctcaatgcgggactatacaaaactctcttgaagtgttcaatcagatgtctgaaaaagatgttgtgtcatggaattctctgatctctgcatactcgagacacggtgaaggagagaacgcggttaatacctacaagacaatgcaagatgaaggaaaggtcattcccgatgcagccacattctcagcggttctctctgcttgcagccacgccggtttagtggaagagggactcgagattttcaactcaatggtggaatttcacggtgtgatacgaaatgtagatcatttttcatgcttagttgaccttcttggtcgagcgggccacctcgatgaagcggaaagcttggtgaaaatcagcgaaaagaccatcgggtctcgggtagatgtgtggtgggctttgtttagtgcttgtgctgctcatggagatttgaagctagggaagatggttgcgaagttactaatggagaaagagaaggatgatccatcagtttatgttcaactgtccaatatctacgcaggagctggtatgtggaaagaagcagaagagacgagaagagccataaacatgattggagctatgaaacaacgaggttgcagctggatgagattgtaattgacttcggtttaaccggttttattgaatcgaaaaccggttatcgttttatttgtttatttaatttttttatagaaatagaaaatttgttacaaaagtgacataaaatttgtagggagataaagaaaatttgacgttcaacttttgaaaagcataatcattagcctctgcttattatacaatggggatgatgatgatcatggtatcctaaagtagagttattggtattattatgtccaaacaaaggctgtaaaaacacaaaacgcagcgtttaatctatctgacaaatccactggcataaacgtacccaaatcagtattagggtccacttgtctctcaaaaaaaatcccgcgatatccgttagtaccaacaatattataatttccataattattatttctcatctctaataatttcttccaaatatttctcagtataactaaatttcttccatatttactaatttacagaatattctcataccttaaaacagaactgaaacataaatataaaagaatagaaccacatacagtatcaagaatcttcttcaaagccgtaattaacaatcaaaatccttaattaagaaaaaattaatcttacgtttagtaatcaggcatagattgactaatcttaccttcttcttcaacaatcttcttctcagtaatcctcaaccataaacaaacaccagtaaaactaatcatcaagctcgcgattccactcccaagtccaatcccaacaatggccatcacagacaaacctttactcttcatcatcatctcctgcaacggataaccatacaatcctttattccctataaacgaactcgcgttaaacctcgggaaattcccagtcctattcgacaaatacgtcggaatctgaccggaaagtttgttattcgacacatcaaacgccgagagcctcgctaatagacctaattgctgcggaatctgaccggataattcgttatcgtggagatcgattacgtttaagtaagcgcaaagagcgagctgcggagtgatttcgccggagagatgattcgatgagaggtttagtacggcgaggttaacgagatactgaatctccggtgggattacgccggagatctggtttgatgatagatctagggattggagatttgtacagtttgatagaaacggtgagattgagccgcggagagagaggtttgtgagtgagagtttgtagattcttccgttgttacaggtagctccggggaggtatgaggtgaagccggagcatggatttgagaagacggagtttgtccagttacggagattactcgccggatcttctaagttttgccggaggtttttcaaacacgcttcgtcgtttggatcggcggtggttaaacgttgtgccgtttggaagattagtagaaggagaaggagtaaccggtgactccttgtcatttttaaattttagagaggtttcaaaaaggttgaagaagaagaaagtggaactttcatgtgagtgtcaaagaaaaaaaaaacggttacagaagaaatttgtagttgatagaggcgcgttttagcagaagtgaggtctgcgtaggatagaggtgagaatattaattaggggattaaattgaattgattgctgtttttcaactttaattattgtataaatgtgtattaccaacaaaacaatactcatgattagatcctaatcatgccatccattttatcaactgacaataagtcatcaagtttagaattgttctcggtcttcttattaagtcgccaacactattttttaataaaatgagaatggaacttaatagttttagaattgatgtatagaataatagtgcagtggactgtttatgtacttttcgtgtgtttcgtatattaatttttaatttttttagagttttataattaaaaaaggagaaaaggaaaatcatgacatccattcacttaaatttttttaaatacttatatttttgtccagtaattgggaaccatgtgtagagtgatgatattgcgagttagaaacgagcgtagaccgaacaggaaatggccaatagagcattttcaccaaattcgtgaggtggtccttagtgcgacacactcttttcactttccattaccacaattaactattcttgtagaaaaaagtcatacattatcgattagttgacaatttgcatgttagtttacaggtgtataaaactactcaaactgttttagttatgagcccatctttagcccgtttataacttttgtaaagcccaatgcaaagctaactcggtcacatatatgacaagcttgggggtagtagctcttgatggattcacacgtctagaatgtaagaaagttagtgtttggaatctatcatgtgttctctttgaaagcgacgatcttgaatcttctaattagttacttatactacaaattatgtatcattaaattcatacgtatgatatgtaatgaatgtgaatgagaaagaccaatgcatgcactagcatttatttcaattaactatcacaagcatgtctcctccttattttttcataatgttcatgcctttattatgtctcaattccactcaaaacgtaacaaaaccgtttgatagacacgtatatatagtttgcatgcatttcgcaagtctagtctatcaaactcttcattttcactaatcgattttgatcactaatcgcataacaaaaccatgtcctcacacaaaaataaattgcttttgtcatcatcaatatctaatagagatgaattagagttagctatgccaacaaatgttgatgataaaatggtggtaccatcattgctacctttgccaccaccatatccgttatcatcaaaacagttggctagatcttcctcgttagttaaatcatcgtgtataatgaaatggaaaaagacgggaaagagacgagaagaaaaagatgatccttttcttattgcgttgagaaagtgttcaaacgatacaaaaaaattgacgatgatgaccctttttttactgcgatgagaaagcagggttctaatgatataaacattgccgatgataagattgtgtctaaaaggaagaatagtcttaaaagtctagtttcttgcaaagctccttctgtcaaagattgattttgattccaaattttttattcattatttaagatatcatctctcttctgtttttattttttttaccttaataaatattttaaaatatgaatatatatcaattagtaaagcatcttatcatgaacataaaaaggtcttcaaattattgaattttctctctttttattctccatctgtcgttaaattataagatcatgtaaaaggttccaaactataagtaaaatatctcaagttgtctaaatatcaaaatcagatttttagttactctttttatctctttcctttctccaaagtgaaagaaaaaatagagacagccaaaaatatcgcaaaaaagattttagtttttgttaccaaaaggatcatttcataccaaaatttgattaatcgatctctttgaatgagtgtaatctagcatattatttaaatagacttaacgtatgacaccattatatatctacttgttcacaataaatgaaagagtttgaggtacaaatctagcatggtgcatggagaaccctaaatctcaaccttccggccaccacaaatggattacaaaataaaaacttgaaataaaaagaaaaagacagattcatcaacactcagctttgtagttaagttgttgttgtgtatatatatgaaccacatttggttattttcctttaaattttcattgtctgttttgttcacgatttgttatgccccttttacatcgtattaattcaatgcattcgaaaccttaaatatcatatcacaacctttaaagtttacgccagaaaaagtattacaaatgttagggaaaagcattttaaaattttgttcatgacttaaagttggctactgtctactgtcgagccgattcatggtcaaatcgtggacgacagatatttgagaacaaaaagtagaaaaatcaacaataatgggtatgaatacgtgtcatgatttacaccgtaatctttatttatctaaatcaaataatggccgcatctttattcttataatcctcactaataatttcccccttcacatgcattaacacaaataataaattaagacaatataatagttttttcactttagacttataatatgtttaatttgataacaatggtattgttattatcatgtctccatatctcgtgaaaggttaagagggcctaaaacttccgctcctgaacatatatgtacacatatatacgtgcccttgtgtgtgtattaagagtttaatactatatatcttagctaattaggatttaattaagtgtagttagtacatgattaatgcacctatttggtcatcaaaccatcattatcatcaacctaactttgtccctgcctatatatagctaagttcgtgattcgtaccatgtatataaaacttaacatctagtggaaataaattcatgttatcttacaattactaagcctctttattttcctttaagtgcttaccttagaccaaaaaatacataaattatcatgttcaaaaactatatatacttcgaatcgaaatatatccattagcccattaattaggatacaaaagcttaattataattaaaagcattgaacctattaagaaagaccgaaacaaagataatgttttcagggtgattaagactgccgagaaattagtcgacctctttacgaataattgaatttgacctccttattcaaaatagtatttaatcaggccatattctcatattctatattttagaccacgaatttatatattaggataccaagacccatctattttgtcgttgcacgcgtcatttaatcatttttcaggggaataatttacatttgatcactagaaagttgtaggataggaatcttacaaaaattaaatcactgtttcgtgtgtgacgttttagaatttatgcttggaatatagctaattatgctgataacattcttctttttttcgtttaacttgtaatatattcctctcaacttatgctgataaaattctctatcgtaagttacgactatagaaatgatcaccctcgatcatctaaattctacgagctagagacctttattgttagaacttaattatgatatcgtagtcatctatttcgtttgtgcttatttcttgaatatataatgatataaaggtatattcaacaaagctaaacgaaaagaatagtgaaaagaaacaagtagataaaggttatcgacaaattctgccagtaacccatttcttcgttaacaattttaaacacgtcaatataattaattaattatttatttattaatatataaaaaacgaaatctaatttgataacgtatatccatgcatttttcaataattgtttttacaaattgttcccattttaccgtcgaaacaatttcagaaacctcaacttatgataacatgatcgacggatcttgctggaccgtaacaacagtactgttattacaaggccaagtggcacagtttgatgagcttcgttaggtttgacgaaacatcaaaacttgtctgatgttcaacaacttatcatgcagtatacggtgctccataagtagacgatcattttccatcttcgttcgttgacaatggtataaaacgtaccgaagctggttcttcaattcttggttctgaattttgagttggtttagctggatactcatctcctccaagtgcttttgtttcttctctcttgaccgcttagccgattcccggttcgataatttccgtttctttttccgctcgtcggtattgtcggtcggagacatgtctgaaccgatctggtttactgaaccatagtcatgggtcgaaaccggttttggatcgattaatgaatcgaagaccgagaagaggtgtgaaatgtcccatggagtgaaactggtttcaaaagctgggaggacagaggttaatagacccggttcggttgagaaaaccggggaaatagtagacatcatggtgcttaaccggaaaataaaagagaggacaatttaaaatgatctcaaaatgtagagatgcgagagagattagaaggggaaaagggaagaattgcattgttggaggtccatatttatggacgagagaatacacacatgaggctattttggtcagacattagtagaatattgatgggggtttttcctaataactttttagatttacttttctttttctttttatctttttttcaaattttctttttctaagaatgaaaagagaaagaccaaaagatgaggaaatgagtcgcatcaggagaggaaattgttggacacgtgtcggtgtaggattagatgtaactcagaagtttaagtttaatatttcaagtatggagagccaatcctcgtttcctcgtaagaacacttttcagtttttacgttttaacttaaagaacattggatagtacgaagactcaaatttaatattggtctttagatcttctatgaacgtatgattgttgaacgtgatcttcgatgtttaaaggaaatcatttttgttagtgtgtttttactgtttagctagactttcaaataggaagtagagacttagcttgtgtattcaacattttctttcttctttgctaaaagttgatagtttcgatcgtaataatccaattagataattttatgtaatattattgtatgttttgggattttgttttttgatcgtgttctttatttttgcaacatgtgcaagtctaaacctcgttacaaaagttgaagaaggaatcttagttttttttggttaagattcctttcttttatggtatatgtaactgcaaatatagttagtgaaatctacgttctgagacagaagataaagttatggaccaaaaagatgaaaaagcatcctatagcattaaaaagaagaagagatatacttagtttgctgttatatatagtgatatgcatgcataccactgtattttaattttaattttatttttattggtcggcatacttttgtatttgaaattaatctgatggattactatattctagctaggtataagatataaaattgttacaaaaccggcaaaagtaaaggaacttggatctatctaattaggaaagttacaccttgaatttatattgggatatgatttaatcgatgttattacgtcttgttttcaaatacagtctttcgaaaagttgtcgtatgtatttagaaaattgacagtcctaagattttctttatttccatagagatattgttgtcttatcatccgaattcaaattcggttgagtgtctatatattaataataaaagaaaaatcgtaagtgctactgaggaactaatttgattcataattactatttgctaattattagttataccaaaccaaaaagactagagggaggggagggaatattcgcatggcagttttcttaacagcaaagctgttttaaagaagccgttcctaaggaatacaacaaaacaagaaaaagcatggcttaataatcaaattctttcagctttataatgttttcaagtttgttggagatcatgttcatgtgcacgaccactttaactttgttcaacaaataaaaactaatttaaagttatttgtaaccaatagtaataacaactttccttaaaaaaactgaccaatagtcacaacatactcatacgaaaacgaaaaaaacaataataattttttctgaaataaaaaaatgtaggtattagtttcgtgtttttaacgaattagtcagtaaaaactatagttgtaacctgtagaaatgatgtcttctctattttactactacaataatacatctaaacaaaaaaacacaaatagaccaaaatttgtaaattttgttgtaatttatatcaaaaatcaaaaagaaaacaaatttactatatattttgctgaaagaaaaagataagttgtaaatttactatatgtttgtagtatatttactacagtaaatcctgtatagtagattttgtttgcaatttactcgatttttgttgcaaaatttgttttctttaagaatttttaaatcgaatccgtataaattaatgtttacaactaacttctcaatttttttttaaatatatatatattgttataaattttatggtatactataaaacaattcttaatataaagcatgtactaacgaagccggcactcccggtattggatatggtgttaaaataagggtaatattagtagataaccaaataaacatacaaattaagaaactagcagagaaaaagtttttttttacaaaataaccatggacccactttgtcggaagaaatgaaataacaaagttacccttcatttgttgtaagataaacagtaaacgaaacacatctgtgtaatttttcaaaatagcatgtaacattaaaatttcacatgttatatttagtttaaaaacatgctatttcaaaaaacgtcatgaatttttaagaaaaaacattattatgaattttttttacatgaacataatctttaaaagaaaaaattatatgtgattttaataaaaaccgtgtattacaaaaaaataagaatatatttttaaagaaatcacgtgtgatcttaataaaaaacgtgtattactacaaaatatcatgataaaaagagatattaaactgaatagaatgtttttccaaaaaataccatgtgctttttataaatactatataataagaaaaaataacaagataaaaaaaggatattatgttatcgcatgtatttcaaaaaaaatatattacaaaggatatttacgtaattacatgtgttctccaacatatttccgacaaggtactctgactcaaggttagtttgtacattcttttcaaatctataatcatttattataaattctcttaaaataatggatatgagatgggtcttaaatgatccatatatatcagtgctgaggggctaaaacgcatggcccattatacttctaaaaaagaagtatgttattgtaagtcagagacagcagaggtgtgagggccaatttagatgatcttaagcttttttctttttttaatcttattatatcactagagattattaatctaatcttattacgatgataatcaactacctacagaaaatgcgattatgttctctcgcaaatcttcgataaactttataccattaatttgtaagaaactgtgttttctgagactctaactccaaacttaaatgtaaaagtattcatgaatttttggttaataattggactaaaaagacttctaccgatgatattaagttaataaggatatataagtttatattttgtaaaaaagaaaaatttggttattaaaaaaaagtttagaattggacaaactagataacatttcaaccgtcgtgaaatctttgaatcttcgttgttatgtatatgttcagtttaacaatgtagtccatatgatttcatttagctgacttttttattagtatcaccaaagaatttgtttttcaggtttgtatgtaggatactagtcttgaggttgacatattgttgacatggaaaatctgcgtacagcttctctctgcggcgatgttgttgtttacgtatttttcagatctcatcacactgattttgttgataatgctgcggttttatattcagaagaagaacctttgccttccgctttaaatttgtaatccttcagactctaggaaacaaaacaaggatgagagttttctgggatatcttgtgttgatcatgaacgaataggatgtactcttccatgaaagaagtcttcttcttctaaaccgtcacgttcttcttcttcctcttccatggaggaagctacttagggttcgaggaggaatttagatgagcaggacttgtggctcgaatagagtttgatgtggatgattgaattgctcacttattatattatcttgccctaacttgtactcttctaaattggtgactattgggactaagatatatgtcaatcttctatttcctagatttacttagatacgatcttatcttgtataagaaactataaatacttctcccttctattgaatacaactagacattacaacctatatttcatggtatcagtgagcaatcgatgaaatcaccacctatgttctcgttcagcctatattgtttacttaagtggctctcctatctcttggaaaacaaagaaacaagacacagtttcaagctcatccacagaaaccaagtatcgagcaatggcttatacacttaaagaactcaaatggataaagccacttctaaagacattggggtttgatcatcaacacccaattgagttacattgtgacagtcatgccacactccatattgatgctaatccggtctttcatgagagaattaaacacatcggttcaagtcagattgtcataaagtatgcaacgctgtggaagacaaactgatataactacaacacatttctacaaaggaccaagtcacaaatcttttcaccaaagcctttccaagaccgacgttcaaacgactcttatatctcaatcttctatttcctagatttactgaaatacgatcttatctcatataggaaactacttgtgtataaatacttctttcttctatttaagacaacaagccattacaacctattttcagtgaccatgcaaggcaaatcatatatatatatatatatatatacaaaaaaatccaaaaccctttgcctaaattttttcaaataagaaatggcagaggataaaaattcttattattaaatgaatagatttgattgcttggttattctccctaattttcgatttagagcagtaattggagatttccgttgcagattaacagtgagcagatccatcttaattttcacaaacaatttttcaataatcaatcacgacacactaataaataaagatccaaatatttagcattacaatataattataacagcaataaataaaggtctagctgcattaacataggtagcattcgaacttaataacacgaacaagtaaattaggtttaaggatatttagcattcaacttaacttttcatatatgaacgttagattatatgcatcatcctcgtcgtcggcatcatcatcacctttgtcactcgtcctcatcgggttcagtagtctcgtaagaagcaggtcccaactggataccatgatgatttatagcacgcctcaacttctcgagttctttctccctatcaggcgaaagcggaaaaggcttcacaaaatcgcaaagagcattatagtaatcatctacctccttttttagtagatctagggtaaaactttgcagttcgtcaaatgttaattctccaagtgtagaaggttgtagggagaatcctttagaatcaccaacttccttccaccttttatcaatcttataaaagcactcataaatactttcaacatattctagaagatcagcacaggaacgaccaagtccttcctacaaaacaaaggtttaatatatcaatatgatctaatgataattacagaatctccaagagtttaatatatatatttaatcaccgtgtccttgacgtattctattgcattccaaatactttcttcaaacttttcaagagacatctctagagttaatgggtttagttgatgaccaggctccagatcggcgacaaactcaccatcggactcggactcctcctcctcttcttcttctacttccactggctccgatatggagtagaagtaataaggacgaggatcttcgcggtcttcgattttacacattagcggacttcaggtatcaagtacgaacacgacaggatcgagatagagaaagagagattgaagtacgagaaaagacaggataagatcagagacaatagacaaatggacagcttctttttagggcactagggatttccgtgacagtaaattacgaaaataccctcattgaagatttttttgttgagcccaggtttttttttgttgttgatcccaggttcttgagaaacaattaaacaaatatcgaacggtaacttaaccaatgagctcaccgagattttgataagcagatatttatcgtctacgaatagcgtgaagggtttcaaatgcagagaatcttcttcgtctttgtcttcactctccgaatctgacgacattactccaactgaaccggaattggtctcggagtcttaaatcttcgaggccttcacctatatcgtcatcatcgtcgttgtcagctccgtataatttttcgcgattcatcgccttacagagagaaacaaacgtctgtagacgagaaaattgtatcgaagaaaatagaagaagagcatgattgcatttgcatgcatgaacaaaaaagggttcgttaagttaacaatggtgggatcagaaacaaacgggtcgaattagcttggatcgggttggactattctttatactagtagtgggctttaagcccatatgttcgacatttgaaaataaagtttaccaataacagtaaccggattattaacctgttggtttgaccacaaaaatttcggtttttattcggttaatgctgacggttcacaaaaataaacacctcttatttttttatttttttttgaataaacacttttttttttttttttttgaagaaacttagtcatcattaaaatgtgaacgtcttactacttgtaccatattataattcgagtgttcacatgcaaaccggaattttcagaatggccatatggttccaaatttattatattcgcaagtgttataacatgaaaaaaaaaatttagatgtaatggcaatggtctagccaaaatagtaaaaacaaaattaaaaaacttctgtatttaaatactgttttaaaaataaaaaattagatgtaatggcaatggtctagaataaaaccgtattaaaaaactagtttggagtaaagaaaatacggttttattctctgacaaaacatatattctctttattgttattgaatccactctaatttttttggttagaatttaaattgaaaagtatggaccaaaactcatacttcttttttcacaacataaattctaaccaaaatattttttctatatgagtatggacctaaatttctttctttttgctgtatctttacattccaaggttcgctaatgtgttagcagatttttaggctaaaaatgtcttattgtttgtaatgctacctcctataatgaagttcaattctttcagtaagggaagtaataataaaagatgaactgaaaaaaaagcactcaagaaagtccaaattgttttggatttggtcataaatctcatggtgacatttatgaattatctataaaaattctatatcaataaaagttgacaaaagaaattatatatatgtatcaatcaattttcgatttgagataagcataattttattcatttttcatgtggttttaattgttctcacgtatatgtttgaccattgaaatcaatcagttattactgtttggcgcgaccttaactagttagtcatcgaaatcaatctagaagactaaaacggaaatgagataattattaacgtcaagaactttctattcttactaaattcaacgtaccatatctagaataatggattttatcttcactaatctacaattaaatatttgttttttgttaaatgacataaagataggccggagcttctacttctagcatattaaactagccacgacatggagttatataaaatttgaaaattaagtaagaaaatatcaagttgctcaaaaaaaaaaaaggggtaagaaaatatcaaaagagctattaagaatttggtaagaaaaaatcttaggtatctgaaaacatggcaagaaaaaaggaaaaggagaattattcatgtccgaagaagaatatatgtttatgttgttggataaaaagaaagatgatcacgaatattttggagttgggatcttgaccgaagaatgttgggttacttaataaatcagcaattaaaaatgcttcttctttaaactttcggtttctgaagatgagtacttcattatctatatgtattaagataacgataacgcttatcaacattcaagggtttatctatcattttccagacctaccaaaaaagacctttcataataatttcataaagccaatgaaaacaagattaatttttaaaaaaaaacaattgagtgatcgaatctcgtagacaaaaaattattttacttattttttgaaatttatttacatgacattaggttaaatggttaaagaggaaagttttgtttcagtttcaccatgacatgtcagaaatttataatttatgtttccacataatcagcaaatgatttaaattcactatccataactcttttttaaaagtaactcttatattaatcgtacgaacttcgaagcaggctggatacacgattaccgactcagttaactgtctcttatgcatatgatcatgtaatctcttatgcatatatgtaaaaagcttacgacacgtgtgacgtattttacaaatgtgaatggaattaaatattcatcatgtgtttgaaaagtgtaagaagactttactaacctcttttccctattcttttgaccagatttttgcataatatatatgccttattatcccatgcgtgttttatgagttttttttttctttttctgaaagattgtccagagtattttatttattccttttcatttattttgtgatcttattatgttagccatttttgttgattgtcacccaaaaaaagaagctaatatatggtcgtaactcgtaatgcatatgttcgtttattcatttatttttcgatagatcggtggtaccttactactctagattgtggaaataaacaaaataagcaattcaactatgacgtgggatgaggttttctatcttcgacgacattctagaataccttacaaaactacaccattcaactgtttttgataaaatatttggtttagtttcacaggtatactttccattcatatgcacgtgaagaggatcattaggtgaaccttttccgctcttgcatatatgcccaccaccaaaccaagtttatttaaccctcgacgaaatgtttttttctttaatcattacacacacatttatattattgagatatatgacttgactatgattttttcacattatattatatatctttggttggctataaatctactcatattacatgcaaaacatggcgcacaaataaaactttcttcgcactaaaacatacgataagcataaatgttcgaatagcccactcattgtttaatttgaaacattttcgaaattaaatcaaaatgtgtatcgtcttgttctcatccaacggtcaccttttttccgtggtcacatgatattttgcttttttgagcaatcattcacacacagcaacaacatcaaataatttagtagggccgtaaaattataatctaacacggcatgaataaagagcatcttcttatataattattactaactaacataaaactataattcaataattaaaatttgagcgatatatatgactcgttttatgacgccataaaggtagttaactttaccctttataagtttctatggttcacatttggcagcatctcgctatttgtcaactcgtgtatcactataaattcacctaactggcttcatctgctattcatcctcacatcttataattctctatctctcttctcaggctcccattatctttctctattttgcaaatcagtatgggtaagttcacaaccattttcatcatggctctccttctttgctctacgctaacctacgcagcaaggctgactccgacgacaaccaccgctttgtccagagaaaactccgtcaaggttcgttaacttctttgtctttttcagtatagtactagtcgaaacatatctgcaattgcaaaacaaagaattaatctatcgcagtatatgtcaaagtttctatatatagtacaaaacaaaaaaccaaaaagagtttgcatgcatgctccttaagatttgtttcgtgtaatagattatataatatcacacgatttgtttatttgttaccgcggtagtttagaaattaacaccgacgttcatatgttgttgtatatattatgtataggaaattgaaggagacaaggttgaagaagaaagctgcaacggaattggagaagaagaatgtttgataagacgaagccttgttcttcacaccgattacatttatactcagaatcacaagccctaagtttctgtattagagcaattaattaactaattacattatcaaacctatcactgtagtactttctgttttctgttcgtctttttgttttgttttgtttatgttatggctattttaaagtttcattgttattttgaaagttcttacaccatccttattgatagtctcttaaaacaactattatgttaagagatatatcttataactaacaaaaatatcttaaagtcttttaaataagagttttttgttaattataagacatgtatctcaacataagacttggcctaagagataatcatttataaagatggtcttattattctcactcgtttgtattattattatggattctaatatagctaaaagtattttatttgtaagctaaggtttatattaactattaagtcacaacaaatatttgattctgtccaactttcgagtttggttgtaaccaccagctgtatttttgtcttagaattagacgcgttgactgaggaaaaaaactagttgacttttcttgtgaagacttacttttctaacacctctatcaggcaggggcctttgactgggccacttgattgtatgatacgttaattatgggctaaggccctcaaacacacaaaaatatcaaactgtaattagagtttttattaggtgatttgaatggcgacttggttgatattaaaaaaatattgttgcatcagtctggaagattttaaaggaatttgtttgtgagctttgcatatctctttgttttctcaccccaaataaatcactcgtattttttgtataattgagagggtctcttatttttttcacccaagtgtgtttaactcatccagttaaagaggtgttgttagttatgactacaaaggttttggcaactacttagttatagatgctagtgaacaacaaagtagaagaggaagagaagaaatattgaagattagctcactttgggaatattagccaggatctccacgaccacttactcgacttcgattaccgcgacctccaacaatagtccactgcaacttcttagaacttttgagatggttttaccggccttttcagaggatcttttgtgtatgcgaatattatgagtccggaacatataccattttgctcaattgcgtaatcttgtttgtttcctaactctctaaattaatcatcaataagaggcaataataaggaaaggggtgttgttaaaatgctataggaagcacgttcgagttctatacgtgtctatttgagaagagatgatttatgtatatggatccgccacaaatatttgcaaatgctggtctcggagtctcggacttagaaaacctatgaaccaacaatcacgaacttcctaagtatagataaaataagtatatggaaccaaacccattatattatttggaagccttggtccatctgaaacaatcaaacaaagcacagcttgtagacttatgtactaatgatataatctctgttatggaaaaatcttgaatgacataattgtcattgtgttgagattaagcagaatttgagctatataatctgcctttaacattgctttttgctgaatgtcgtggtatagttacacactaaacgttgcaaatttatgaaaaaaatatatcaaagtataagctgaagttaggtgatcagaccaaatcaggatgagaaagttgttgttatcagcctgtgttttcaggataacaagaaacttctttgttacttattgactctttctcataaaagaaacatgtagaccttgtcccatccacgtcaccacatttactcagcaactatatccataccatatattatccacaaaagtgtaacaaataatgtcccacacttatcattatccaaatatccaaatccaaaaaaaacattcaaaccaacccatttctttctatccaaaaaagtcaaaaacaatcatctcctcaaataaaataaaaaaaaaaaacaattttacatcaaatttgattgatgaatccaagaattaaaccaaacacaaaagtgtttcttgtcttttagcctgaaaatccgaaaatcagtttcttggagtcagcatccatggagcttcaacaatctgtaaacagagagacaaacataaactatgaagaagtgatgttttaactctcacaaatctccttgtctcatttcctctctctctcactttctccacataactctccactttaccatttgctctctcaatcaacacttctaacaacgatctaaccgtctcaaacgttacccgcccggttaaatccaccacatatttccggttactcggtaccgataacgacgacgacacccgatcgatccacgtcgcttgtttcgttgatccaacggtcagcgtttgagacgaatcttgacatgacgatgaccggttcaattgaaccggtttccgcgacgctcttacaaacgtctcaaccgcgctgttacatagcgttacaagcgtttgcttaacctttccttcatgtttcggattggttaaaccggcgaataaatcgtcgaatacgttaacatcgctcgtcttatcgagataaaccgaaaccgcagtactcacgaaacgctgaacgcaatcgccgatcaatctcctcccatcatcagagaaaaccgcgtcgagcaatttcgaattcgatccatcgccggcggaggaataaagcgcaacgactaagttcctcgcaaagctaccaacaatcgccgaagcaaaacccgacccggatttcgtaaagagcttatccataacccgatcagtaaaacccgacccggatccatcatcaattccacggatcaatccaacggtcatagcttgagtgaatcggatcaaagaagaattaagctcatctgatttcgcgattttggaaatctgcttcaaactatttgggatttgatctgaatcggatctgagaaactctgttagatctttggagataacactaacggtttcagcggaatcagaagcagcttcgatgagattgagaagaagagtgaaaagcttagagattcgtttccgtttctgggaaattgaaggagaatgataaaccctaaaagcaccgtaaccacttactgctaataatatccattttttgttcttgagagcgaaatcaaaataaccccttttgctcaaccctaacttatccataaaactacagaatttcgaaagaagattaaaaatggaaactttttatttgagaggaattgtattacccggaatctcaaacatgataaacccttttagctctcattcactttcccgggaaaaaagttgagaaaggaaccaactttttttttttgaaaacagagcaaagactgtaacgactaaagaaggaagtgggagaatcaagaatctctaaggaatgaaaaagagaaagagaaaaagaggaaaaattctgttaggaaatgggaattggataagaattcaaatggtgacgtcaaagtttgttaacagaattgtaacaaaagagtaagagagagagatagtgaattattgggggctgcaagtatctgatgatcagatcaatcaagtaggtgtgatggagacaaatacatgcgtgtaagagaaatccatagggttttattggaaggttcgagcatgggggtttagttaggtgatgataaagtcagttatggagtttttaaagttcaacatcttcgtcaaaatctcaatccattattaaaatgttttttttttttttggtttttgggcaaaaataatacttgtttttatgtatgaactcattaaaaatccttatcaagaaagtgcatggtcatcgtggtagattcgtggaaattttagtaatatgataaacactatcgataatttttgttttttatatttactatctacataggcacatagttttttttttttgggttctgttttcttgtttacatatggacatagttgtgtgacttgtgtcagtaatacataccacaattgggttggtgatagaagctgaaattccttacctcaaatggaaaacccttacctcaaaaaagatcccgtatctttccattgtttcccaatcttttttgttaaactttcaagaaacaaaaaaaaaaaaaaaaaggaaaattctacattacatcaagataatcatagatgatagaactgtaccgaaattgtatatatctaaactatagcatgtaaacgtttgatgaatatagtattagaataagagaaatattgtaattacattttctgaaaagcaaaaagcattaaatatcattcatccttcaagcacgagcagcagcggcagagagcaaaaagaagcggtggattagagctcaagatttaccaaattcatatcatatatatattcaactccaaaataattatatactctaatcaaacggcttttgtctattttaccaataacggatcaaactggacaatgttcttttctcattatcatattttatcaaatttaaatctttgattatttttgattaaatgctctacgtggcaaaaatattccatattttacaaatacggatttcaatttaggatctatccatattatacgtccacaaaaaaaaacagaatttccatactaaaattagtttcataaaaaaattaaaatttgttgaaaattttcataaacttttgccatagttttatcttttttacttataacaaatacttgctgtgatttaaaatggtaaaaaaaaaaaaaggaatatactcaacttcgtttgggacctttggaaatgggccgaccttgcattcataaccttatattttaattttcttatgcagaattaattttcaattctttctaataaataacaagttgaagccaatggataatggcggtggctattttcttacgaatgaaaggaagacgaagcaaaaaattaggtttgaacatgaaatcggagccagacacgtggatggtgaggtgctaacgccttggaagaggcgagccgtcgcgtatcttgtaagtcagatttttcatttttcaccgccaatagagagttctattccacgtggtaacacgtggcagcttcttctttttttccgggctcctccaatctcttcatattaaaaggttttgtctcttcgaccatttcaaagttccaatatattcggagttctttgttttcttttcttttctttttattaaccggatctccgtacccaaatgcattgtaatactttgtgaagaccaaaaaaacaaatatttgccttggttaaaatgtgtacatttgtcaacataaaatcgtaagtcgtaacgaaactcaaattttgatatttcaaaatatactttccaataaataaaccaccaaaatttagttgaagatcgtttagttcaatttcattgtagcatgcaatgaatacattctttttttttgtaatgagcaaaattagcttcaaaatggtttatgatcaaaaataagttaataggagaatttctgagccaccatgtcataactcataaacatcatcatcacaatttggtgctgttttatttacaaaacaaaccatgcatcttttgaaaaggcaagcgtttacaaaaggtattcacaaacataaatttaattaacgtataggatcacaaatatagcatccatgttcgtcatcaacattcaagcccatcgtttgatttctatcttcgtctcgcttacctgaccagccgtgggacattattcttccagagccagccttttggagtaatggtgaggtcttttggaatcaggaattatttcttgtaacttacaggcacatcatcgtcgtcttcttcaagatcactgaacgacacatcttcatcaacatcctgcacaagatggttggtggtggcactaacagttcctgcattatcttcatccttcaaccaatcatcagcatcatcatccacttgaacatcaataactctaggtgaagaaccagtgactaggctctgcaccggcttgtcatggtacgctggtgctggtctttcttcgatgacaggcttatcaacaacttgtacctccttggtctcgactgtgtgcttctctgtctcaaactcagatctctcagccgaatgtattgtttcgacagtgatcgttttcacaggttctggttctgatttgggtgaaggattagtaggttgaaaaagaggttccacattttcactatcagctcctctatcactactctctggcaccactactgtatctttgtttctcttacgcaacagctcgtgagataatagtgctcttgattcaagtacctttatgaaaacgcaaaatcagtaactcacatcatagaagtttccctctttcccattcttatatcaaataattcacattaaaaacttgcaaacctaattcacatgctactagtaaagttcattattagcacaaagagaatcatctattcattgaaacataaagcataacatccaaatagctcgaaaactttgtaaacagaagaaaaagacagtaatgatcagcagtggtgttgagaatcaagctaacctgaggagttgagagagtcaaggcatcatgtttgctgaatataggatgcacaagtacaaagtaaatcctccagaagcaatactcgctcatgtacgcaggacaaagctcaatcctcaaagcagccagactcgatgcaagattctccacagccaacgcatgctcatattgggcatcagtcatttcaaagtctgatcataacagttgtaaaataccacttaacaacaacaccttcatataaaacaaaccctaaactctaaagtgatcagaaaaaactctcaaatacggaatatctaagtctagaccatagtagattccctcatcaacataatcgattacaaattagtgtcgaatctgctgcgaaatcgaaaacgtaccatcaaagttatcatcctcgtcaggaaaaggaaaatcaagccaagtctcaggatgcagagcaagatctctagcaaacaaaactacttcctccgtcacaccaattgcatttccaatcgcaacatcacggttcttcgaatccacaccttccgatcccaattgcaagaaattcgaagccatatttgtaaacttcgataccggtaagtttccagagagtttcgagatcccagtcttaaatctacctccgatctcaacgaaatcgttcctgattccagcaatcagatcctcatcaccttccgcgagatccgatgacttccgagtctcctcatccacatgatccgccgtatcggaagaagaaggaggtggcgcgaggaaagaagcaacgccccatagctgacttcttaaggtcttggtgagttcagagatgtcttccttcacgcctcgtggagactgtgtttgcaacaccgatggcgaagacggttgatctgagccggaattttcaatcgaattggtcttaatcgtttccttttgatcatattcttcctcatcgatcttcagagaattcgcaatggatctagcaagccatgccatttttttggggatctctcacaagtctctcgagtatctctctcttaatccgcgacctttaacgagacaccattgacgctaaatattcaaccttacgaaacgtcgtcgctggattagttaatgagctacgtaaaaatagcccataagattgaaagtccagcccatctaggggctagggtatgcgggacaccattcaatttaagaaacgtcgttgtttaattatgcaaatgggcttagtagctaaagcccataaggtacaatatctagcccatctataggtttggttactgttattctctgttacagagttttatatgtcaagacaaaaactctcacatcacactgtgttatacacaaacccactcaaaacagagatttgctcagactcatttccaaaaacaggacaagtaaaataagcctatgtttatttttgtgttaaaaaacagtagaaattgttgaatgattcacttgtcaaatctcacatttcttttcaattgttcattacaacagtagtagttcagaacaatgtatggagacttttggtctccaccacaacttatgtgctctacttattagacaagaatcaaaattcacatcatactgtactttgagatgtcactctatgcaataacagtgattgatttttcaagaatcacgtttttgatatttacttcgttgaagacaataaggaggctgagaacaaagatgaaatcatgacaattgtctaattcctaatctaagtaaagctaaaagaaaacattgaatgaagaaaaaaagattcaaaagcttaaaagaggcttctacaagttcagggtcaaagattttgcttttttttttttttttttttctctgttgtgaatggtcaaaaagcaaaacaacctctcacaagaacccaaagtagagaggtttaacttaatatggttcctttcttcaaattcttctttttctttgttcttctgaaattgatttgagccagaggcggtaactttacacagtttttttctaattcccaatgcttattgcaaaacgaaccaatatggtaacattacataccgatccctcaaccacccggtttcttcgtcttccccatgtttccatcagctgattgcctcttcctttgaattgttaccaccaaaaccaatagctcaatcttcaaactcatcatctatatatacatcagggcaaaggcagattcgtaatgcaatgcacatttaccgtttcatggataacccgctgaatcctgtgatcaatcagtgccaatgctattggattgtccttgtgagtttgcatttggaaataaacatggtgtctgaataatgtagactacaaagcttaagtagctctgctgaccgctgcttcaacgctgcatcacacccgctctggatcacgagtaacagctttgcagcaagaccaacctcaacagcaagtggtgaacattcttctggagctaatttgcagacagaccaaagaatcgacagcgcgtagttagtgcaattctcagacaccctcatcagcaccctaactgtataaggtattgtgtttgcagagtctttgacagcaactcttccttccacgtctgtacacaaagcatcaagaacaaacagagctaactccaaacattccgggtctaaagacggtaagatatcaactaattgaggcactgctccaatgctaaccatcaagcttcgaacttgtttatgaaccgaaatcggtttaagcaaccgaagtgcaggagatactccatttctatgtctcttatccttaaccaatctcattaacccaacaagcaaactatgacttgaaacaagctctgctctaaaccctttctcttccaccaatcctctaatcaatctagcacaattgatcttagtctcattagatccatcattcaacatatcaacaatcaaagaaaccttagctggttgcatcaagccggatttcgaatcagaatcaagatcaagactcacaagaatagcaacaacctcagatccaacagcatgagaagtaaaaggacccaaaagagaagagatcacagagacaccaccttcttcaacaacagtcttcctcgccataagatgagcaataacaatctgtttaagctcactcaaagcatgaaccctagcttgacctttagctttcttcaaagtccccaaaatctcaatagctcgtccttgaacatcctcagaacgtttcttcatcaacacatacttctgagagaaccaagtatagatcaaatgatgaagagttttattaggagttaccgtatcatcccaaagctcttgcattgtagtaggacaagtcaagtgacctaggttaaaccatttgtgaatgtttaacctttcataggtttgaccagtacacaaagtcacaggatcttgcatcggctctaaggagataggacaaatgaaaacagaaggtatatcttgtaaatctagctcctttatcatcttcttcagatccaatttctcatcaacaactccaacaccaccaccattaacaccaccgagaactccatctttcactgcagtatccagatctaagacttgcccatcaccaccaccttcaaatcctattaacccatctctctttaacggctgaaacatcggcatttcgatagaatctatagaaacaaaaaaatctcaataaaaaaacagacttttcttctcaaactcacaacatttgggaaaataatgtgagctgaaaaagaaacgcatgtctttatctcagaaagaagcgttaaaacaacaacaacaacacaatcttcttcttcttctttttcctctttgctttaatttagtttttctcttttcaacggtcaaaaagaagattcattcaactcttgttaataatataacatcataaacacatgattgaaacccaactgctcccaaaaaaaatgtgaattttataaccacaaatttcgagaaacagaaaaaaggaggaatcatgaagaataatgagaaggaaaccaaaaaaaaatcaacgaacccagtacaaaggtttgaactttcaataccagaaaatctcaaaagataaaaaaggaagagaatttgagaaaacccagatgacgaaatcaaaaataaattcacgaattcgtgagaatgacgaagaagaaacccgtactctctcttttgtttgtttgtttctctcttaccttcttctgaggtagtgtgagtgattgttttgtttttgtttctttgagaggaaaaaaaaatggggtgaataaaataaaaaggagaaaaaaggggagagattaaagatttgttgaaagattcgggtggaaaatctaaaaaaattaaagataaggtgaccggtgaattcactggttatagccggtcatttagtcctctcgactcgcgtaccacacgtgcaagctacaccacatgtgacatgccctcacctcccggttttattataatacaactctcttttttaattaccattgaaaaactcagcttaataattttgatttccaattttgtccctaccttttatagttttaaaacgtaattaattaggcaaccaagaaaattctcccaataataaagaattagtaattttaaacacattatttcagtcaaattatacaggagatgtaattgttccttccaataaagtgtggaataaacactttggtatgtgaatgaatagttttagttttttctgataatattttggatttaaaattgggaatatcctttaattagtcaaaaaaagacaacagtgaaattctaaattttcttttagctttttttttcttaatatccacgctaactaaggataaatacttttcccatttatgttaaaaagatgtttgttaaggttaaggattttgttaaaaaaacaaaaaaaatgttgaaggataaacaaaaatgagggtaaagtggtaaaaatgaaagagtaaagaaaatccggcaacgtagtcaaaaaagctgagaagtttgcactaaactccaaacacccacggggaagagtaacccgtacaggtcggggcacgtgtgacgataatttctatgtttaatttcttaattacttttttaatttcaatcttatcatcgttattaattccaaaggaacaactcttgattttttgtttgttataccaataccttccttcacctctttttagtatataaaaaaaattaaaactgaaaaaaaaaaccgaaaccgattacccgaaccgaaaccgacccaaataattggatctaaaaccgaatccgaatcgaaagatttattatattgaattctaaattcctaaactaaaaaaatcgaatccaaccacaatccaaaaatactcaaatatttttattcgaaaatataaattttaccttaaacccaaaattttatccgaaaattcaagtatttacccgaatatattcgaacccaattaaatctaaacctatattttagatttattatattaaattctaacccaaacggatatttccctataatattacttcaaaaaaaattataatagctattaaaaaagcttattgccaaacaactttttgaatcgatttaatctgctgacgaataagaatttttatataaaaacaacatttaaaaattggttaaattgtttcacataattgcagtttcaaaataaaaaagttttaaaaataaatatttttttgagaaatatactttataaatatcacacactattagaaaagaaaaaaaaaacagagaggagtgagatggggaccacaaacaaaagtgccagctagacataatatttgaccgtgacagtgtcttgctttgactataagcgtcgatcgtctccgggtctaatctctttgccccctttgactgttccttttacccaatcatatcccaccacgtgtccacatctgcctcttccccacccaaccttcatttgttaattaatttggttttcaaatttttcatatttttaacaaaacaaactctctaccaaatcaagataatttaataataaaacttggaaattgatgggagtggggatagagaaagagatagagatctgtaagagagaccatgtgttctttttgttgcagttgagtactgacccataactgcaaagtttgctgtccaaacatatatttttatttattatttcattgaaaaatatattgattacttattactggacccatttttgaaatgaaattgcagattcaaatgaaatgattttcagagttgttgataatgataaaaccaaaaattttgtgtctatgacgttttttttttctagtcaaactaagatgatatactaaagtggaccggcaagtgtttaaatgtgatatgacttgttttgtaatcaagtttttttagcctttgggatgatgggagattgatagtgatattataaaaatataataacaataactatatcaaaaaacaaaattgatttaacatatcatctaagtagtaatacggaccgagtgctaatgactggtgtgagtggtggtgactagaggtggacctacgaataaaagcgtaaccatttcatgaaaacgaagtgacgaaaattcaactactgtgtgtcgtattttcgttgttgggatcaacagtttttaatacgtgtgttgaatttgttcttgttttatgtttgttgagctagaaggtttcaaattatgaaagaatgaactgacactaaccaattaagtggtggtctagtggtagacgtcgacatttcaaaagaggtaggtatgatttctgattcaagtcttgtttgggacaagatgatttacgcatgtctgcattgtatacttacgtataatatcaatcgctgcaacatgtaatggagatcgagactactagctcttaatttatgagctaaatatataaagaaactgactctaatgacacttaatcatgtagattcttcgacttgatggggatgagtgggctctaaagacatgatgcactgagcagttcgtgattttggagaatgtgaggaaaggtaactataggaattgatcactaattcgatggtatatcggattggcaatgtaacactcataacttttgatggtagagagtttgtggatgtcaaatatcgttcaactatgagaaataacttgacttctatagttctatgagaatacagtgaaataatgccactttaggtaatgaggttttgttgtgtcaatttataatgatgatgactgcaactaatacaatagaaatactcttgtatcaacttaaaatcgttgcggaaaaggttcaatttgtgtctaaacatatatgagatcacattgttaattgtatagcagattcaaacatatgttttaaagaaaatgaatttactgatatagaagggactaataaaaggcaagaaaattcgtaggtcgattatggaagattaatgaaaaataacaaactaattcaacaataacatagttctaatcaaattgtttttttcttgctttgtcgttatgactttatgccattttattctaccatttttgtctacgctttcgtcattctcggtgttaccaatcgagcccatgacatcggtaaacatgaatacactataatgcattgcctacgcatatgtttatctttagtattttaggctttagctcatttattttaacgttaaagaagtgtgaaacaatcttttaataaatgcaaaagtagaagcacgaaggaataaaaaaggtatataccgcattcctacgcgtattctatatgtttgattttctagccattttagctttggactgtcacgtgagtcgtgacgctctaccccctaaatctatgtctatagtagtatgtacatatcagacacatgcatgaggcacctatatatttgtaaataaattatacactatatgacgtatggattcaatgataccaagagtttttgcttgtaacgcccaagattttcgaaacctacaatctaggatctaaatagtgtacctccagttataaattatatttgtcgctctagataagttagagtaatggccaaatctcgataacaatttatttgtgatctcctcacatgaatttctttggaaccaaattaatcccaaacgataggattcaataatcagttaaagttttgtagtattcgatagtgggttagagtaatgtagtgatgcaaacaagagtgctaatctattgggtctatacattggatcaaatttaatatatgggccgaactatcataccaagcgtcatgctttgaagaaagtagttgaaccaagccattatacccttttaactactaactaacccatctcaaatatccagatttaaattggtgtccatattatatgaaataagttaagactgatttgccaacaaggcaacaacaccttaataaatttaaacatctaactgaaagaaatgtatttaatcatccaactaggtacatttaagaatagatcacattcataattttgttattatcatttacaacagtcatcatggatttgtcttctctttgatcctgtcttagtgtcttgaaatctttgagcatttcttcttcttcgtctcttataatatatttaaaaggttatatatttacatatatacaactttgatttcgatactcttgagaatccaataatgaaagcgaaagtcatagagaaagagaactgcttcgtatggttggttaaggctccttttcgtctgttgatcatggcacgtgacgcctacatacgaagcattacgtcatgctccggcgccggaatttattccggtggtggatcatctggttttggtcaactctccggaaacttccaaatctgcgatccgcctagcaccgcccttcctcgaagctttaccttgacgtcggcggcacatgatcaaggctgtctgacacgtggcggacaacctacgattgcaatgagacaatcattgtccttggatcatcggaagaacaatagatgcgttgttgtgatgggaagaatagatgaggagatgtcttgtgatgatgatgatgagtttcaagaagaagactcttttcttgattatggtaattgcgagattcttacaaaagaaatagaaaaaccatctgttgaccaaaaacataagcctctaggacgattttgattttgatttttaggtttattattaggttgttgcattgtgcttattgagaaatatggatcaaacacttgaaaagaaaaatcattttgtatcatttaatattatttcttgtattacttataattgatgttaaaaaaaattacatacgattctaaaagtggtgatgcaaataattcacattgttttgttaacaaccaatgcagttctacatgattttaatatcatgagtaatttctaaaaacaaattacaacaaaaattaatttcttttaaccacaataacttcacaaaattacaaacataaaatacaaattcaaaaccacaagcacaaaaaataataatttagaaagtttatcaattactatttttgctgtaagaaaaaaagtttctcaattttatttttgtctgcaatatctttacagattccaaaacaaaacaaaaaaactatctttttatttatatatatatatatatatatatatatataaatgtaaacttcctcataagtaaattaacaagaatatatatcaaacaaaatcttgtaattttttaatataaataaagctaaacctttacgaagaagaaagactctggtgattgattctccaaagtctaaacctagtaaaagccaagtctcattcctcgggtgaactcaacaaccgacgatggcagaactaaggttatcagaaactcgagacttaactaggatcgaaagaatcggagcacactcacacatacgaggtttaggtctcgactcagtactcgagccacgagccgtatccgaaggaatggttggtcaaatcaaagcacgtaaagccgccggagtaaccctcgagttgatcagagacggcaaaatctcgggtcgggctatacttatagcgggtcaacccggaacgggtaaaatcgcaatagcaatgggtatagcaaaatcacttggacaagaaacaccattcactatgattgcaggaagtgagatcttttctttagagatgtcaaagactgaagctttaactcaagcttttcgtaaagctattggtgttaggatcaaagaagagactgacgtgatagaaggagaagttgtgacgatttcgattgatagacctgcttcttctggtggttctgtgaagaagactgggaagataacaatgaagacgactgatatggaatctaattttgatttgggatggaaattgattgagccattggataaggagaaagtacagagtggtgatgttattgttttggataggttttgtgggaagattactaagcttggaagatcttttacgaggtctagagattttgatgttatgggttcaaagactaagtttgtgcagtgccctgaaggtgagcttgagaagaggaaggaggttttgcattctgtcacacttcatgagattgatgttattaatagcaggtttgtttcttgatcttgttctgtatttgtcaattgcttagttttaggtttaggttaaaaagattgcttctttttcacgtattgatgctttttcaagttcttatttggattcttgttttctttctgttgtttgcaggactcaagggtatctagccctcttcacaggtgatacaggcgagattcgttcagaaacccgagagcaaagcgatactaaagtggcagagtggagagaagaagggaaagctgaaatagtacctggtgttctcttcattgatgaagtccatatgcttgatatcgaatgcttctctttcctgaatagagctctcgaaaacgatatgtcaccaatcctggtcgtggctacaaacagaggaatgacaacaatccgaggaacaaaccagatatcagcacatgggatcccaatcgattttcttgaccgtcttcttattatcacaacacagccttacacacaagacgagatcagaaatattttagagatccgttgccaagaagaggatgtggagatgaacgaggaagcgaaacagcttctgactttgatcggatgtaatacctcgcttaggtacgcgattcatctaatcaatgcagctgccctagcttgcctgaaacgtaaagggaaagtcgtagagattcaggacattgagagagtttatagattgtttttagacaccaagagatcgatgcagtacttggttgagcatgagagcgagtacttgtttagcgtgcctataaaaaacacacaggaggctactgcaggagaagaaacagaacacgaggccatggaagtttgagaattttgttttattgctttttcaagaacttattttttcaccccattttgtcatggactcatgggacatggttgaacaaaagatggaatttttcaagttttcgagttctcattgagagatagacaacgttttgtactgtgtttttgacggagcgataagatggtatgacaaaaaggtaagattgtggagacgtttgaagggttaattggtaaggctacctaagttctcacctaatgtttgtattcaattggctgattatggtggaaagatggcggttttgtgggtcgaacaatctccttgtagtaacaacggctataagaataagatttggtgcgcggagattgctcttgaaaaacaagaaagttgtgaaatttggggagaagttgagtggtttggtcatgtgcttacagttccttcaacatgttttgttgccaaggttattgctgctactgtttgatgatgaatgaatgtgtcacaaagcttaaatatgtttttttttggtgtatgcagatatgatgatgacatggcttaattttgtctcttttatttatgtgactgcttttactttcgtacgatttcttcatccaaaaaacaaaacccagaaaaatcgatgagtgactcatcatcagtcattgtccgaagctcaaatttcattgtcgtgattctcttcctcaacctcgtcactttcttctcccttgtctcctccaatgaacttgtctttggtaagtttgtgtcggaattgaattatacttttagggctttcttcaattctttatgggactcgaattttgtagtttagaatcaccaaatttcaaacctttttttacataattaagacaattgcgatgaattatataaaaaaagatccaattttgttgtttattagcagctgtgggtgaaactggttcactacaagtgactccaagaacagaggtgatatattcacctggtctgaaacgaggtataacatcgatatgtgagagattacatatccatggattacaaagaagacttgagcacattgatagatatgcacattcactaaagttgactcttttgagtaataatgcttccaacagtatcgacgtttgcttccacaggtaaaatctagtatctgtgtaatctctatgaatcaatctagtatctgtgaaatcttaaagtttacttctttctgattataggaattcgtcgcgtgcaattggaatgtgtcctgataatcagtggaagagagtgtccaaagggttaccttgggttgggataatgtcaccttttgactataagattcttgatataagaacatttggtggctcatctaatgtcagcaccgtggagttggttgctaaacaaggtagagtgcttgtgttgttttgtgttttgcaaaattctaaaactaaacaaagtagagtttgtatttgcagagtttttcatataccggattgtgtttttaatcatggggatagtgttactgagtttggcttctagacttagcaaatcagttgcgttttactatatcggtgcaatgtctattgggattgtcattcttgtaactcttatcattaatcaggtaaaagttttcataacgctatcttttgttatatgtttcatggttttttctctggttaacgtgataaacggttgtgcaggggataaagcgtctaccaactagagggaagagtcgttttcagttatttttctactcgtctatggtgagagttgtcttctctttgagttcttttgtcgaacatgtactaaccaaagccttcttttatattctcagattggtgtgggaggttactttcttcaatacatacgcggtttagttcaagatttgctaatgcagatagaaatcagtgaagatttgtacatccctgtatgtaagttttggtacttgttgttatgtcacatattcatattctggtttgattaatcttaaacggcttatgtaaaattttgcagctggcgattcttttggttgtgtttgtatttatgttgggagcgtggtcaggattttggactgtcaagaaatttgttgtgacaaaagatggttctgttgacattagtacatcaatctttgtctcttggtccatccgagcttttgctgtggctctgatccttcaggtacttcgttttttctctgcttttgcttctgattcatctttgattataaccaaaccttttggtgattgaagtcttgatcttgtgttaattaacagagctctttagatccattacttgctggaggagcgttgataactggaattctcatctcattgattctaaagagtattagcagaaagctgttagctcaaagaatatatgagcaagatgatgaaactgagagttgtagccccggcttgatccatgctacctcgtttgcttctcctcttcctagaggttttgattttttctctttgtgtctctagtggtctgatttctttatactagtccctttatctcgtaatgttgttcttgaagaaccggtttttcttctgtaaatggtttttgcaggttccaacaagaagttgaggacagtaccattatctgagtcagatatctttccttcttcattccacaaaacaccagaagggagaaggaagctaacgaaggaagagttgcaaaaattcactaaagagagcacggaaaatgcattgaaggaattggtttcttcacctggttttggcgaatgggcggtgaaaaatgctaaaagaatcactgtaaatccgataaaggaatcgtcaagtaaatagggtgatactgttaagcgcagaagaaggttcctctggttctgaaaagcaagcagctaggggaacttctgaaccagtcggagagtgtagtaggttgcttgtgaacaaagcaacaagccttgcttatatatagtcttctggaaaagaactaatgagcaaggcgaaaaagttgagagattaacttctaaatcaacaaaatgtaacctttgacataaattgatattgaccaataagatcatacgtttccatgtgtgtagtcatcaatgatgtgaaactcaatactatagtgtattttatttgaatggacgatgatagttggtataataaaggaggaaataaataaagtcatctttttgttatttaacggctgaaatttcaatagcaatttaatttgaatgattccagttccacaaatatgagttggtcatctatatcacatgtaagttttcttagttatatttaaaaatcattaaaatctaagagtagtccttggagagaacatgtctcttgtctcctaaacctcctttattatccatcatcattgtcactaaccctattattattccattcacagcgaagaaaaagaagcaaagagttcgttataaagaaagaaataaaccctcagataagagcataacagagaagaagaagaagatgtcttatcaagacccacaacatcccgttagtgctcctcctcctcaaggtaattcccaattttttccaagtttttagggtatttttgtttcttgtttcttaagtttcgatgttgttgttttgtcagggtatcctcctaaggaaggatatccaccagcagggtatcctccaccagcaggttatcctccaccacaatatcctcaagcgggatatcctccagcaggttatcctccaccgcagcaaggatacggtcaaggatatccagcacaaggctatcctccaccgcaatatcctcaaggtcatccaccacaatatccttatcaaggtcctccaccaccgcattatggtcaggctccaccgaaaaataagaaagataagaaggattcaggaggcttcatggaaggatggtgcgttgaccaattatctctctctttttatattaacatatagttttgaatacttgaagctgatgatatacctttttttggttcattattcataaattttggtatggagtaatatggatattcaaagtctatatgtttggtacttataaaatgtgtatttgttttgtattacagtttggctatgctctgctgttgcgttctcttggaagcttgcttttgatcggaagatgagctgatatttgccgttgaccgtcttgaggatgctattcaattttgtcaaacatgttaaaaagacgtgtttgatatacattttagatctcttcttctggttatgtgtgtccacgttttgggtttgtttctttaattttctttaattttatgaatgaatccgaatttgacttgaggtcttgtttactttcatgactattgattgattcagggtatgttacccatcttttgtatatgtgtgttttatcttttgtataaaagccattcattctttccaactagaggaacacaaaaaaagaaagcaacccaattttgttctctttctcatcaaaaatgtaagaagaagtgactgtatcaacgtgatcaaaacttagcattaccatcaaacttatataaatttatacttacggtccgatatatttccattttccgtctcaaacatatatgtcacatccaccattcctcggttgatcaactattcaatgtacaaatttttataaaaatactactaaatcgtatataatcttgagtcttcacttcttatatttaatgtaagagagtggtttagtatccaccgattaactcggttcaaaccaaaaatacaccaaaatgatatgactgaattgtgaaatcagtccaagaactaaaagtcgatgagctcggcatcgacctccatgaagataaggaaagattcactcaaatcttaagaaataatacggtaaagaatattagacatattcccatccgaaaaataagaagctcgatgaccaaacaaaaaatccgtaattctattttcgaaaaccctaaatttattatattactaaaaaatctcttgtaattgtcaagtttactctcaaaaatcatttttcttgaatctcttgtttactctaatttctactttgcttttactcgcattgttaatttaatttcataaattaatccctaatagatcaaatgggtgtatttttgcaattataaagtttaagacgaatttgtaaaaatgaagataataaagggctcccagtaaagcacctcaaaatcgatacatacttcatcctccaacatgcgtaggtgaatcgaaagattaaaggtcaaatttttgtgtcttctcttcctctgtctcatgccacaatttttagatttcaaactttgatccatgacactctccatagcttcctctctcattcccttcagctttctcaggcatgtcttcttcttcctcttcttctccttgttaatttccccatttccctgatcgaaagctttaatctttttctcgtgcgtgtcttcgtaatctctggcgtttctattgaattactaatgcaattgaaaaacttggggatttcattataaagtattgatctttgtgatgttttcatctgttcacagagaattgaagtcgagacattagaagtgtttgttgtgtgtgtgtgtgtgtttctatagaatttttgaattttgtgataaaattgtgtgaatgggagctccaaagctgaagtggacaccagaagaagaaacagctcttaaagctggagtacttaaacatggaactggaaaatggcgtaccattctctcagatcctgtgtatagcacaattctgaagtctcgttctaatgtggatctcaaggtaaaaacatcaacaactttaaagtgaagagagattatagaaaagttcgaaacttatactattgttgttgtctacaggacaaatggagaaatataagtgtaacagctttatggggatctaggaagaaggctaagcttgctcttaaaagaactcctttgtcgggtagtaggcaagacgataacgctacagctattaccattgtgtctttagctaatggtgatgtaggaggacaacagattgatgcaccatctcctcctgcaggttcttgtgaacctccaagaccttctacaaggtttggtctctcttcttgtatttgtatgaattcttgatgctgtgaatgtggaatatgggaatagtgaggaatataataggcttgttttaatgtgtttgttgtagtgtggataagattatattggaggctattaccagcttgaagagaccatttggtcctgacggaaagtcgatcttgatgtatatagaggtacaatgaagttttccttctgtgtttattcgttgtgtctgtaaatagttaagcattgcttactgcatctatatacaatcatcaaggtcttagtgttgctgtaaattttcaggagaatttcaagatgcaaccggatatgaaacggcttgtgacttcaaggctgaagtatttgacaaatgttggaacattagttaaggtataaagagagatactttgatcgaaatttcctcttgcaaatgtcacaaatttagcactgacttaacaatggttttcttgcgtttgttctcacctttcagaaaaagcacaaatacaggatttctcagaattatatggctgaaggagaaggacaaaggtctcctcaactcttgttggaaggaaacaaggaaaacactccgaaaccggaggagaatggcgtcaaaaatcttactaaatcccaagtaggtggagaagttatgataatgggtatgacagaaaaagaagctgctgcagcagctgcaagagctgtggcagaagcagaatttgcaatggcagaagctgaagaagcagcaagagaggcagataaagcagaagccgaagctgaagctgcccatatttttgcaaaagcggcgatgaaagctgtgaagtatagaatgcatagccaaactcggtaagaattaagaaaatcattgatgttgtatcggttgatatatcttcaattcttcatgttatgtcaagtttcgatcttgcatcgaaatcaacattttacaatcgccgcagtgtttttagtcagtaacagtgtcttctaactcagatgattatgtaaaacctgttccttctcttgcttctgttgatctggttttgttagtaacttcacaggtttctcgtgaaccattttgaaactggtttgaaaagatataaataaggcctttgatttgtatacagagcttatttccgtttccttggatttttagaagttgaaaaattgagacacttatgtttttgttgcaaagccttaagaatagaaaacaacctcttgagcaaactagaccagaccagaccagcaggtgagacagaagacaaataaagacaaactcttgtttcacgcgaaattagttcaagactcatcatcatcattaaccagacaacagaggacgagtaagaagatcaagaagagagaacatatgatgttcttgttgaagtttagttctttgattttgagtgatttacaagccaatcagtgagctgatcaatggtggtagggttcttgcaggatatcatgagacagcagacttctctacttgtaaccgaactaagccccctgcaacaaaaacaaggcaagaagcataatcagatcgagctaaatgagatgcctttagtgctgtttttggagtgttcagatgaataaagagctatacatttcttctgtcaaggcttctttggaaagagctccatgtatgtcaatcttgttcccaagaaccaaaagaggaataccaataagcgaagcattgctcaacaaatcatggagttcacttctcgagacactcaagttttcagtatctgcagcatcaactacgtacctagaaattggaatcaacatgaaaccaagttgtgaataagccaagcaataaagataacagagaaacctgcctctaagatccttacacaatcatagaaacagcgcgacagtaacgttcccacatgcagcggaatcttggttgaccaccaagatcccatagtctgattgcaacattttcttttgtcactttcctcatgttaaacccgacctgataaacccacaaagacgaatctcttcatgttgttccaaaaaaaaaaaacaggttttggatcgaaaaccgtatttgatcaaagatgcagtgtaacaattaccgtaggaatcatgtcttcactgtattcaccagtctaaacaagtaaaaagacatcattatatccccaaccaccatcatataagtgttaaagagattatcaaaatggaagcatagtatacttactgcaacaacattaacaagtgatgtctttcctgaattttgaagtcctaccaaagaaagctccatttcttttgcttgaagattaggctgcaaagtcatattgatcgaaacaaacaaatgaataggtcctcctcaaaatgtcaactaagagaagaagagagagcactaagttattgtctttttacagcgaatctataattttatatttagatagttgaggcaagtagctactttatttttgttagctactttatatttgttcgatatctagtttctatttcagatatacaataaccagagttaagagtttatttctcttcctacagaacgccgttgattttcagaagtaaaattttttttgggacacttatgtttttgtgtttcaaaaattgcaaagccttgggaatagaaaaacaatccacatctaatatacaaagacaagactggaggaccaaacaagaccagaccagcagaagaaggagagacggaaggcgaaaaataaagacactcttgtttcacacgaaaaattgtcaccatcatcatcaactagacaatacaggaagactaagaagaatcaagaagagagaatatatgttcttggtgaagattagttcttcgactttgaatgctttacgagccaatcaatgacttgatcaatgttggtagagttcttgcatgatatcatgaaacagcagacttctctatctgtaagtgatgtaagtcccctgcaacgataacaaacataatcagatcgacctaaagttgtgcctttactggatggtttagatgaagataaagagctatacatttcgtctgttaaggcttctttggacagagctccaggtttgtcaatcttgttcccaagaacgagaagagggataccattaagcgaagtcttgctcaacaaatcatggagttcacttttcgacacacttaggttgtcaggatctgcagcatcaactacatacctggaaatggaatcaacatgagaccaaaattgtgggagatacagagtgaagagaaactcgagtcgaagatccttacacaatggcagaaacagcgcgacagtaacgttcccacatgctgcggaatcttggttgaccaccaagatcccatagtttgattgtaacatttccttttgttactttcctcatgttaaacccgacctgatcaaaaacacaaaggagatatctcttcatgttattccacaagttaggtgaaagatgaactttataagacatgtagtgtaacgcttaccgtaggaatcatgtcttcactgtatccaccagtctaaacaagtaaaaagataagagtagacatcatcagatccccaaccaccatcatctaagtgttaaagagaatatcaaaagggaagcatattatacttactgcaacaacatttacaagtgatgtctttcctgcattttgaagtcctatcaaagaaagctccatttcttgcttgaagaagaggctgcaaaatcatatggaaacaaacaattgaataccgaatcgaaacataaattagataccaaaaagaaccaatctttcatgaaattttacgattgttagaagttagaacctgttctacatgccttgaaaaaacgcatcttttcaactagattgatgttacaccgatagtttcttcataaaccacattaaagatgctatcattcttacacatagctaaaattggcaatctaaaaagaaaacaaggtcacaccaaatgcctaaagtttgctcttttaaaaactaaaagatacagaatctgcctttatttgtagaaccttgtcaaaactagcccacgataagaaactagaccacgattcaaatactattgagctgataacggtgatgtaatttggttgcaacacgatttcaattgaagaagaagaagaaatcttaaggaaggctctttacctacgaagccaattgagaaaagcttccaacaaacccattgatgatgatgattcacaaaagctccgacaaacagatccgcctgagagaattctcctccacggatctctctgagaagcttcttgtcctcgttgatctctgtcgatgatatctctctctctctctgtccagtgacggcgaattaaaagagtcaaagacaatgaatttggaccgttcgattttttatctggtataccaaatcaacggtacagatcttgtttaagtttttggttgatagaccgagaatcatggggttgctatttaaaataaatattttaaatttggattggccaatcagaggagagacacggtgacagatacaccagaagttcggaagaatgaatggatgaattactcaaccactcgcgtttatgaagcgcgtgactaacacgtatgtaccgtccgttgtttttttttggatgggtggtgccgccaaagattttggcggtgatatgatattggatagtgatcgggaagtgcacttacacgtgtcatttccaataatttatgggttgaaaacatatgtttgatgagttcttagtcatgggcctttatttgacccactagtgatgagtcgacccatcaatgattttctcctttttttattttcttgtagtatatgatgtttttgcttacactttgcatttcccatttaggacaaattaacattgaaatggacaaatggtattcaagtcatgtttatcttctacaagatacactatttgctttgtttaaattggggtaagttttttgattaatgaaaaaaaacattatgcttaatcggaataagtaaaacataattcaaaatagctttcacttgctcaaagatacaattatcaagagttggcttcattaaactgtaaacataaataaatgaacagcggagatacaaaaaaaaggtgaagaatgaattggtcaaccactaaagcagttataggtttaacacttttttattgcatgattaattatccaatagttgacaaaaaagaaaaaataattatccaattattgatttataaaaataaaaaaagttctacactagaacatattttaggaaccagagctgtaatttaatactagtttaatgtgtatgtttgatttatttgttaacaagaaatattagtaatattagattttatcccgcggtacaccgcggtaacaatttatctttttaaagttagtataattttttttttcaaattgtatctatctataatatatttttattttatagtttacaattgttattaaataacgtcctgccaaactcatcccgccaaacctgtcccgtaaaaaaaccatttatttatattaatgttgatcttatttatgatatgtttataaatcattgtctaaatatttttgtcgatgcgagatgttgaacctacacattttttgctaattggttaatatatgtttatttttaaaattttgaatcataaaatatgacagaaaaaattaagatttttttaaactctatatattatataatgatgttaaaaaattgtaatatatcaaactttttataagtttaaatattaataatgttttataaattttaaatatataaataataatatttaaaaaattaatatttttgcttataaggtaatgacataataactctaaaagcaaagatttagaagatttaaatttttaattaaatattttcattaataaataattaatctcagtgacatgacattgtaaataagttcaaatacaaaatttatttatttaaacaaaaaaggtttagtaagaataatatttatttaacaaaaaactttgttttaaaatattgttaacaaatatgtttatgctaattttaagggattgatttgaagtttggtgggattaaatttgattgataatgtgattgacaatttaaatcaaaaattttaaataaaattaattattttgaaaaaaagatttaatgctaatagcattaaattgtaaataaatctaaatttaaaatttatttgctaaaatgcctgcaaaaatgtatatataggtcaacaaaatataagtgttttcatcgaattacttttacttgtcgtctaattttctctcatttgttactattttaagccatttttaattgaaagaagtggtacatatatagcattaatgaatgctatactcaaggagaaagtatattaacgggacaatcattaaatttaccagaacgacaagatcccaataaaatgaaataaaaccaaaaaccaactcagatgagtaaacaaagtatcattcatcggtctcgtcttttggtcgcacgtctgaatccatcatcatcatcaaagacctctctttgttcccgtgacagatccttcttaaccaaacctcaccgacccttgtctttatttccccaattctactcctgggtttcgtaattacgttcccaggttcgagctttcttctccggagaatctgaaatcgaacaatttagtgtctttttctcagacattgtttacttctgagaaagcttaggtctttagactctcattacatgtcggaagtttcagctccggcttctttttcaggtaagatcccgaggtttttctgtctcctagttttctgtgtttattgaacttttgtgttcatcttccgctggaaattagctgtctttagggtttagcttgtgcttatttggatctggtatcgaaatttgtgctaatcaacttgctaaaattgacaatttgaccctcttatgtgtaagccaaatctgttataaggtcaaaatttcatctcccaaaagagtaattagttatagaacacttgtatttaactttagacacttacacttgtatacttcttttttttttttttttgtgtggatggatctacataggttgtgtattgtggagataaatctttggaaacaaagatgagggtgatgaagaacaaacacaacaagaaagcaacgtttttgcgttgttcaccgtttggtttagtatctacagttgtgggatgtgttttcatgattcatttaaccatgttatatagcagaagttatagtgtagatcttgatctttcacctcagttacttatccatcatccgattgtccgtgagctcgaacgcgttgaagaagagaatatccatatgccgcctcctaggaagcgttctcctcgcgctatcaaacggaaaccaaaaacaccaaccactttagtcgaagagtttctcgacgagaattcacagattcgacatctttttttccctgatatgaaatcagcttttggtcctaccaaggaagatactaatgacacatcgcattactacttcccggggagaatttggacagacacggaagggaatccgattcaagcacacggtggtggcattttgtttgatgacatatcaaaggtttactattggtatggtgaatataaagatggaccaacttatctttctcacaagaaaggtgctgctagagtaagttttaaccgtttcttgctttccattaatgtctcactcttggactttagaattagaatgtgaaaacagcttcttggatttgtttcaggttgatataatcggtgttggatgttactcgtcgaaagatttatggacatggaaaaacgaaggtgttgtattagcagccgaagaaacagatgagacacatgacttacacaaatccaatgttcttgagcgtcctaaagtgatatacaattcagatacaggtaagtacgtgatgtggatgcatatcgacgatgcaaactacactaaagcttcggttggtgtagccattagcgataacccaacaggtccattcgattacttatacagcagatcgccacacgggtttgatagtagagacatgacagtctacaaagacgatgataacgtagcctacttgatatattcatcagaggacaacagcgtgctgcatatcggtcccctgaccgagaattacctcgatgtgaagccggtaatgaagagaatcatggtgggacaacacagagaagctccggctatcttcaaacatcaaaacacttactacatgatcacgtctggttgcaccggatgggcaccaaacgaagcattagctcatgccgctgagtcgataatgggtccgtgggagacattagggaatccatgtgttggcgggaacagtattttccgttcgacgacgtttttcgcgcagagcacgttcgtgattccgttaccaggtgttcctggtgtgtttatatttatggccgataggtggaatccggcggatttgcgagattcgagatatttgtggttaccgttgatagttggtggaccggctgatcgtcctcttgagtatagtttcgggtttccgatgtggtcgagagtttctgtatattggcatagacaatggcggttgccttcagcaagagagaagaagattgcttagagaaaaagacaaagcttttcaaagtctttttcacctgttacttcttcttcttcttcttcttcttcttcctttggtcagttgttgtgatgctgctcatattgtcattgttgttgttgttgttgttgttgttgttgttgttgttgttgttgttgtgctgctctgttttcgtcgtttacaggttagaaagttatagagagagaactatagggccattgtgaatacagatcactttaaggatagtgtatgagttctgtaacatttactttaggacacagttctgttacttttcttttaagagtttccagttccggttttatagttcggtttcatttaatttagtctcaagatccaacagtgactgacccagctcttccatcaggttgttaaagcatcaaaattgtaagatattttatgcatccattttcttatgtgattgattgtttcttagagatcagtattttatttgagttttggatttgatttcagtacatagcatattgtgccacactactatcaaagcgatcgatatatctagcagatagattacagttgaatatggcttcttgccttcttcatgtatacaagggtgtttccataaatatcaaaggtttggggtatttatgtcaataacaaaagatattgaggctttcattaaatacgaaaatctccaagggtattttgataaaaccccagatattctggggtaatttggtagtactaaaagattcggggtccataattaaactaatctctcttccgtgtcaaaattaaacccgacccgaatccggaaaaagtgttatctaataaacccttgacgacgttcttctgccggagattacgcagttcacggtaagacatagaaacaaagtagagagatttcacggcgacggtattggaatggctaaacgggagttaagtggaggagatagcagcagcgaagatgaagatcccaagtggagagctgcaatcaattcgatagccaccaccaccgtttacggcgcctccgccacgaaacccgcagctactcagtcacataactatggagattttcgtctcaaacctaaaaaactaacacatgggcaaatcaaggttagtcattacttcatatattgaatgtgaattttcatctacatatagctcttttgatggcaattagactttgtttaagagtttcaatggttaatgttgaatgttagaaagttgcagaagttgagtggatttgagtgatcagtcatcagtgtattgtgtgttcttgaaactattgtttatggtgtttacgactgtgtttatctctagtctgtgttcatgctagttgagttggttatttgttgctgattgaggtaagatttaataacaggtgaagaatcttttgaatgaaatggtggagaagactttagactttgttgaagatcctgtcaatattcctgaggataaacccgagaatgactgtggagttcggttatttaagcggtgtgctactggcattgtatttgatcatgtaggttagtcatcaccgagaatccagctccgaatctgtgaactgtattattattatgaatccgtcgagaaacttgttttcgtgtttttcttgtcaaccagatgagattagaggacctaaaaagaagcctaatttacgccctgacaaaggagttgaaggaagctctaaagaggttgttatcaaacattgttctgttttgcgcgggattatgaaactatcaaagctaatttctttctgttttttgtgggtactgcagtttaagaaacgagtaaaatcaattgctgttgatggttcggatattttaactgctgctgtggaagcggcgaagaaagcctcggctagattagatgcgaaagaagtggcagcgaaagataaagctaagaaagaggaagagagaatcgcagagttgaagaaagtaagaggagaaaaatggttaccttctattgaaagggcaatgaaaaaggaaatgaaggtacgttatacatatggtttctcatatttgtgtttcattcttgtgttagtagtagtaacatatcaacttaacaaatctcgctatgtatttgcagcgtatcaaacataccgcatggaagtctgcaatgtcgtgagctttcttcttttgaacttattatcaattttggagtctcattaattgaagaagaaacacagaatcattcactcttggctacaaaacttttactgaaagaagattatgaaattattatgtagagtagagagagattatttgttcttaatgtagtgagagtgaagttcttcagagatgttgtcatcattgtcgtctttgatccagacgaagtcttctaatccatcataaatctcctctactgcatatgcatttttcttgggtacttgtttggatgatgtagagaaagcattctttattcccataatcagtctttttccgatacttttctgcggttgtgcttgtggtggagatgctcttcttcgccggtaagttgtgctcaggtttgaaacagaacctctatcgcctctctgcgtcttgtttacgttactcggttggtgaacgcaatggaaactcgcggatcgagcagaatccatcacgcttcttgacctcgactccacgatattccggtccgatttctgcttctctgattctttcgataggaatctcttcattgtgtcgagctctttctctaggctttcaatcctcgagcttgtggaattcatcgcagctcttagccgacagttttgcctcgccgccgtatctcgctggaggagcgatccaagcgtcacggaggagtctctcgcctctgtggcaatctctctgtgtcgaacaccagtaggagccgcgcaggacgcagcaacagcagctaccatgatcgagtggcgagtgttgagctgctcttgtagcatcgcccgaactataaacctcaggggcattttcgggttttgaacagcgtgaagtagtaaagggggcgagagtttgtcacagtctatcgaattacatatctgaaccttctcttcctccgtcatctctccgtcatgttcctgaagaaaaattcaaaagttttatccaatcataagataacaagtaacataatcggttaagacacgtttgagttgacgaaagtaccctttttaccttcacataagcatcaacgattctataaagcaaatcgtgacgcgggaaccgctgctgcacggcgtcagcgacgacgttaaaatcgccggcgggaagtttaacagcttcttctagaaactcgttaacgcaatcaccgtctccgatttccatcaaagcttctacacaacgtccgatcagaaacgccgtcgtttcagactccggaagaagaagaaggcacgaacggagaacgatctgaatgtaatcaacgtttacgaagacgactcgtcggagataagactccgtcaagttcctcaagctatctctaactcttcctccgtcgtcagcttccgtaatcagaagaacctccacggcgattctcaacgaaacgacattggacggcgttaactcaatgtgagcgccgtaacagaaaccggcaactaacgaaaacgtttcagccgttatgtttaacggcggtgagagagttaattcgttaacgcccgttaggtggcgttttaaatagccactctttgacagaggatcctatgggattataattaaaacatcacataatgacataaaacataacctcccaataaaaatcaaacctttttgcttattttgcaataaatgtgtaattttttaaatttataacaaatatacaattaaaaatcaaataaaaatatcatagtttttgttaaaaaaaaattgttttttttatgaaaattgacaaataaaagcttgaaaatatgtaaccttgtgaagatggaaccttgtgcctcccacatttacgaatacatcaggtttagagttattagccaacgacctgaataaaaatatagaaaaaacacccaaaaaaaagagaaattataatttggtaaagatttttctaccaaaaaaaaaaatgtggtaaagatttggtaaattttctaagagaaacattaccatttatggactcgagattcaagctccattgaaggagaagaagagagattgataggttgtttaggagaaagagacaaagatgaagaagaagaagataaagaagaagagtgatgatctacgtagtcttcgtcttcataaatcgtatcaacaaaccctaagtttgtccatcgcttcatgtctttttttccgagagagaagagatcaaagaatgagaataatttgtgtgagttttgagaagattcgaattcgccggttaggttttagtatcaagaagagaaggaaattttggacagtgaatgggcaataaatgtgagtaatatgggaaataaatgaatttaagaggatttgttgtgatcgttattatatgcgtgaaagtctttaaatgcgtttttcctttttcttcaccataaaccttctagttcatatagagggaccacgtcccacatgttctccaaaatgtacattcgttctaacattcaaatttcacgagatttcatttaggtttaaattgagcttaaattgttgtgtatatatagtactagtgcaagtttgatcggttatttttctttactaattgacatacttgtcgttgtcgtaaaaaacatggattgtttatttgtttatatcaatttgtttgcaccaaccaccacaagaaaattagttttgatcggccagtttaatacaaagtccacttcatatgatacttatttctttcataatttgttagcccctctgattattattatgtacaacatcattattttgcttgaaaatatatatatccaagagtctttggaagtccttgttcaaacattggcaatgggttctaaaatgtaagagtttcgacctgagattttctccgggatgtatatcacattatagttatgaatgtctaatatattgtataaaaacatactgatataataataataataattttctaattattttatttattttcctgatgtctcaaatccaaggtatcatttgaaaactacaatttgacctgcaaaatgaaaaagctcaaagaaatcatgaaacaagacaagaaaccgaaacatatcaaaagattaagatcaatgacgcaaaagattcgctatcgatgaaaggagcgaaaccatgaagcaagataggttgtagatgaactaggaaaggttgaagatggactaattttgtactggaaaaggtgacggtatagacctgtaagcttgaatttccttaacaagtaaccgagccggtttggagacagtagtgtgaagccttgcatttctttctctccacaaagtgtaaacagctgcttgaaaaataatttttttgttaaattaatattaattttttgaatataatgttaaattaaatatataaaaataacgtttttacaactagtgcatcgtgtttttgaaaatcgaatctaaaaaggcagaatatatgaattgaaacacaactctatttaaattaatatatcatccaaacgttatgcttttgtttctctcaaaaataaaagttctaaattgcatgatacaaaacttctctaaattgcatgatacagctagcctattacaacatgagaataccaactatatcagtgtagtcgttttgtttttacctctttcgctaaactgattgcatccaagaatgaattaacttttactaggccagaagtgtagctaacatagaagaggcccattataaaactctttaaaatcaaaatctaaaacaggcccagcccattcataacaaagccctaatatatcgagtaaacctagctccactcaaaacctaactatataaccttcacacacactcataacctcttcctcatccccttaaaaaaccctaagagtagagactctctcaatcccggcggcgaagatgaagtacaacccaagagtgacctcttctcgcagaaagaacaggaaggctcatttcacagcttcctccagcgagaggcgtgtgataatgagctctcctctctccaccgatcttcgtcagaagtacaatgtcagatccatgccgatccgtaaagacgacgaggttcagatcgttcgtggtacttacaagggacgtgaaggcaaagttgttcaggtttaccgtcgcaaatgggtgattcacatcgagagaatcacgagggagaaggtgaatggaacaaccgtgaacgttgggattcagccgtcgaaagttgtgataacgaagcttcgtcttgataaagataggaaatcgcttttggagaggaaggctaagggacgtgctgctgctgataaggagaagggtactaagtttacgtctgaggatgttatgcagaacgttgattaagtaagaaggaagaagaaatcttcttgaaaggttttatcttttagagttatcttcaatcgctttttaattttcaagttttggatattttggaatgttgtcagtggatctttatggtgctagacatgagaacttatgttttgattttgagtatttgaagtttggttatggaagtttatctctttgtctcattctttataatgatgtgtttgtttggtttagcttttgattatgtgttggatgtgtgttgagattggtgttgaactcctgatttgacataggagtcttgcgtttatcagtctattgcagtagaattgatgatattggtcatttatgtggtgacttagttgaaatgattctctagagtagtgttcttggtttaggttatttcgtttgatagtgggggttccatttttcgacagtggttttcatttttgaacatattggaatgacgagtttgtgtctttaaacgacatatcaatttatcagaccaatcctttcgtctcttcacacttatctctgcaattttgtgttgtctaagacgtttgtggtataggttgagttcgaacttggtggttttcaattgtaattttttgtttggcataagcattactgtggatttaaaagaattgccactctgattaacagcaaatcatttcatttctatgaaactgattctttctcattaccttaaaaaatagtcgtttcctcgagaaaaaagatagaactaaaaaaacatatctcaaatgcaattatccgactgaacagttttcacatttgatgtacatgtgtagaagacctatctctgattcttttccaacttgagtctttgattgattctagtttcacataaggtttgtttctcttaacaaaacaataaaaaaaaactctcagaaaagagcgatataactgttcctattaagcgtgagccccaaaagaaacaaatccgaaaaagaattatcagaaataaggagattagccgagggattcattattcaataaccaactcaactctaaacaatgtcataggagacagaaagggtagtctccattgttaaacctaacttccattggtatgtgtagctcttcaaggtttaagggaaagcgagagacctaaccttgggtacttgtctaatgtcttggtatcaatctcacctgagattgtcactatcgattttggaaggccctcgtgttgcagaagagctccaaacttaccgttactgttcagcttagctttcacattcgttaagtgatcaaccgcatacaatccaccaacagttactgttgtctcattagttgagattttcctgataacctctccaactgttgcgcttctcgtcgactcatctaggtaatatacataagaggctttgatcgaatctcctttatctcccctgagattttccaagaaaagattcagaatatattaagaacagctcgatagaactttgattagtaggagcttctttatcttacaatattatggagacacattgatctggctttgtgacactgactccgacgttgtactttgtgaaagttcgagatgtggtgtcatacccagcttcagcaccaaatgagatagttggtgagccaagagcagcagttacatcaattagagggttttattgtaaggctgcagcggctgtaactgttgcgtgatcatggaaatattggacttccagctgtaaatcatagttgagtttaaattcatttggctgaaaaagtcattatatgtgtatatataactagcttaaagaattctgaaatgcataaccttgctagagttgtaatcaggcactttgaaggaagcaatggcttttgtcgatgggaggatctcagtgatgtgatggttgtcaggatctgatcaagtgaaaaaaaaaaagaggcacaaacttagcgtattgtgatcaattgagacaaatttattcattggataaacaagagacttaacattgaaatcagtatcgatcttgacatcgaagaaagtgtttctgtacttgtattgtgtggcaacattagcagcatgtagtactccattcttgagagcagtggaagtaagagcctacgataaaataacagaacacatagcgtcaatggatgcagaaattttaagcgttgccaggcaaaataaacaaagcaacctataagtagctcatattctcaagtatccttgtggtttaaagcgacaaatgtatattaccatgatacatgttattagctagcaatatcatctacattgttcatcagcctgttatgctaactccaatacagagataatcttaacaaagaacacaagtacatgccgattacccaagtcacagaagatattgcacaatgcttaggcagtagaatccatcaagaggaggtttttgcctccaaaatcacaggtatatcaaaattgactttaacttcactcaaatgcgttgtcaatttccaatgattcactccccagctagagtatagatcaaatctataaccagcaagaagatactactcttgaggaaatacatgatagaagaagaagaagaacctaaaatagtacttgttaagcaaaacatttgctacaaattcatcaatgtgaaacaaaatctactagactgcgaagaacacatcatatgattcacagattataaaaaagctagaaacgagattagatacttacgacgccggagacactgttagtggagatactgaatttctgatcggtactgtaatctctcgtcaacagatctaacacaaaaagggaaaaacacaaaattgagcttacgaaaacaccaggattcatcaatcacactctctctcgacctccaatgatcacattaatacaactacatcgagaaaactcgaaagttgacatcaaaactaatggagatgaagaaggaagggaagattatcatacctttcgcatattttccgatgtcggcgaatagtcccggacccttactcatggtgatcggagaatttgagagagaggaaaccaaatagagatagtgacggcagtaaaattgtccaagtcaataatagttaaaatcaatgattaacggacgtgtaacaacaaaaggtttcgtggtgtagttggttatcacgtcagtctaacacactgaaggtctccggttcgaacccgggcgaagccatttcttcttttaattttttttttttactttgtaaaagaacattacgcttggaatgtcaggagtccattaagctt

SEQ ID NO: 91 - DNA, 108158 bp, Arabidopsis thaliana
gaattcgccggttaggttttagtatcaagaagagaaggaaattttggacagtgaatgggcaataaatgtgagtaatatgggaaataaatgaatttaagaggatttgttgtgatcgttattatatgcgtgaaagtctttaaatgcgtttttcctttttcttcaccataaaccttctagttcatatagagggaccacgtcccacatgttctccaaaatgtacattcgttctaacattcaaatttcacgagatttcatttaggtttaaattgagcttaaattgttgtgtatatatagtactagtgcaagtttgatcggttatttttctttactaattgacatacttgtcgttgtcgtaaaaaacatggattgtttatttgtttatatcaatttgtttgcaccaaccaccacaagaaaattagttttgatcggccagtttaatacaaagtccacttcatatgatacttatttctttcataatttgttagcccctctgattattattatgtacaacatcattattttgcttgaaaatatatatatccaagagtctttggaagtccttgttcaaacattggcaatgggttctaaaatgtaagagtttcgacctgagattttctccgggatgtatatcacattatagttatgaatgtctaatatattgtataaaaacatactgatataataataataataattttctaattattttatttattttcctgatgtctcaaatccaaggtatcatttgaaaactacaatttgacctgcaaaatgaaaaagctcaaagaaatcatgaaacaagacaagaaaccgaaacatatcaaaagattaagatcaatgacgcaaaagattcgctatcgatgaaaggagcgaaaccatgaagcaagataggttgtagatgaactaggaaaggttgaagatggactaattttgtactggaaaaggtgacggtatagacctgtaagcttgaatttccttaacaagtaaccgagccggtttggagacagtagtgtgaagccttgcatttctttctctccacaaagtgtaaacagctgcttgaaaaataatttttttgttaaattaatattaattttttgaatataatgttaaattaaatatataaaaataacgtttttacaactagtgcatcgtgtttttgaaaatcgaatctaaaaaggcagaatatatgaattgaaacacaactctatttaaattaatatatcatccaaacgttatgcttttgtttctctcaaaaataaaagttctaaattgcatgatacaaaacttctctaaattgcatgatacagctagcctattacaacatgagaataccaactatatcagtgtagtcgttttgtttttacctctttcgctaaactgattgcatccaagaatgaattaacttttactaggccagaagtgtagctaacatagaagaggcccattataaaactctttaaaatcaaaatctaaaacaggcccagcccattcataacaaagccctaatatatcgagtaaacctagctccactcaaaacctaactatataaccttcacacacactcataacctcttcctcatccccttaaaaaaccctaagagtagagactctctcaatcccggcggcgaagatgaagtacaacccaagagtgacctcttctcgcagaaagaacaggaaggctcatttcacagcttcctccagcgagaggcgtgtgataatgagctctcctctctccaccgatcttcgtcagaagtacaatgtcagatccatgccgatccgtaaagacgacgaggttcagatcgttcgtggtacttacaagggacgtgaaggcaaagttgttcaggtttaccgtcgcaaatgggtgattcacatcgagagaatcacgagggagaaggtgaatggaacaaccgtgaacgttgggattcagccgtcgaaagttgtgataacgaagcttcgtcttgataaagataggaaatcgcttttggagaggaaggctaagggacgtgctgctgctgataaggagaagggtactaagtttacgtctgaggatgttatgcagaacgttgattaagtaagaaggaagaagaaatcttcttgaaaggttttatcttttagagttatcttcaatcgctttttaattttcaagttttggatattttggaatgttgtcagtggatctttatggtgctagacatgagaacttatgttttgattttgagtatttgaagtttggttatggaagtttatctctttgtctcattctttataatgatgtgtttgtttggtttagcttttgattatgtgttggatgtgtgttgagattggtgttgaactcctgatttgacataggagtcttgcgtttatcagtctattgcagtagaattgatgatattggtcatttatgtggtgacttagttgaaatgattctctagagtagtgttcttggtttaggttatttcgtttgatagtgggggttccatttttcgacagtggttttcatttttgaacatattggaatgacgagtttgtgtctttaaacgacatatcaatttatcagaccaatcctttcgtctcttcacacttatctctgcaattttgtgttgtctaagacgtttgtggtataggttgagttcgaacttggtggttttcaattgtaattttttgtttggcataagcattactgtggatttaaaagaattgccactctgattaacagcaaatcatttcatttctatgaaactgattctttctcattaccttaaaaaatagtcgtttcctcgagaaaaaagatagaactaaaaaaacatatctcaaatgcaattatccgactgaacagttttcacatttgatgtacatgtgtagaagacctatctctgattcttttccaacttgagtctttgattgattctagtttcacataaggtttgtttctcttaacaaaacaataaaaaaaaactctcagaaaagagcgatataactgttcctattaagcgtgagccccaaaagaaacaaatccgaaaaagaattatcagaaataaggagattagccgagggattcattattcaataaccaactcaactctaaacaatgtcataggagacagaaagggtagtctccattgttaaacctaacttccattggtatgtgtagctcttcaaggtttaagggaaagcgagagacctaaccttgggtacttgtctaatgtcttggtatcaatctcacctgagattgtcactatcgattttggaaggccctcgtgttgcagaagagctccaaacttaccgttactgttcagcttagctttcacattcgttaagtgatcaaccgcatacaatccaccaacagttactgttgtctcattagttgagattttcctgataacctctccaactgttgcgcttctcgtcgactcatctaggtaatatacataagaggctttgatcgaatctcctttatctcccctgagattttccaagaaaagattcagaatatattaagaacagctcgatagaactttgattagtaggagcttctttatcttacaatattatggagacacattgatctggctttgtgacactgactccgacgttgtactttgtgaaagttcgagatgtggtgtcatacccagcttcagcaccaaatgagatagttggtgagccaagagcagcagttacatcaattagagggttttattgtaaggctgcagcggctgtaactgttgcgtgatcatggaaatattggacttccagctgtaaatcatagttgagtttaaattcatttggctgaaaaagtcattatatgtgtatatataactagcttaaagaattctgaaatgcataaccttgctagagttgtaatcaggcactttgaaggaagcaatggcttttgtcgatgggaggatctcagtgatgtgatggttgtcaggatctgatcaagtgaaaaaaaaaaagaggcacaaacttagcgtattgtgatcaattgagacaaatttattcattggataaacaagagacttaacattgaaatcagtatcgatcttgacatcgaagaaagtgtttctgtacttgtattgtgtggcaacattagcagcatgtagtactccattcttgagagcagtggaagtaagagcctacgataaaataacagaacacatagcgtcaatggatgcagaaattttaagcgttgccaggcaaaataaacaaagcaacctataagtagctcatattctcaagtatccttgtggtttaaagcgacaaatgtatattaccatgatacatgttattagctagcaatatcatctacattgttcatcagcctgttatgctaactccaatacagagataatcttaacaaagaacacaagtacatgccgattacccaagtcacagaagatattgcacaatgcttaggcagtagaatccatcaagaggaggtttttgcctccaaaatcacaggtatatcaaaattgactttaacttcactcaaatgcgttgtcaatttccaatgattcactccccagctagagtatagatcaaatctataaccagcaagaagatactactcttgaggaaatacatgatagaagaagaagaagaacctaaaatagtacttgttaagcaaaacatttgctacaaattcatcaatgtgaaacaaaatctactagactgcgaagaacacatcatatgattcacagattataaaaaagctagaaacgagattagatacttacgacgccggagacactgttagtggagatactgaatttctgatcggtactgtaatctctcgtcaacagatctaacacaaaaagggaaaaacacaaaattgagcttacgaaaacaccaggattcatcaatcacactctctctcgacctccaatgatcacattaatacaactacatcgagaaaactcgaaagttgacatcaaaactaatggagatgaagaaggaagggaagattatcatacctttcgcatattttccgatgtcggcgaatagtcccggacccttactcatggtgatcggagaatttgagagagaggaaaccaaatagagatagtgacggcagtaaaattgtccaagtcaataatagttaaaatcaatgattaacggacgtgtaacaacaaaaggtttcgtggtgtagttggttatcacgtcagtctaacacactgaaggtctccggttcgaacccgggcgaagccatttcttcttttaattttttttttttactttgtaaaagaacattacgcttggaatgtcaggagtccattaagcttacattatttaaatcgataagtctttaacaacaaacgtggttatttcactttgtactaattattcttgattatgcgttatttccattttctttgtgtcttatggttagttttaatgtggatttggaagttctcgatgcagattatgaagccgtgaaatattatttgatgagatgattgaattgtgcccccaacaaaaagatgagatgattgaataaatactgaagcatgattgatggaatagtttgtgtattcattaatgatataaactatgtttttcgaatctacataacaactcgatactttgctcacatgtacgttgctcttttgaatttaggattttatatgtttgggaatatattttcaatattttataaaagattgctaggcatatgtcaacgtattttatgatgcaagacaaataaaacttcaaagatgaataacattgctcgttattatgctctatgctattattattaaagcaagctacaaagcccaatagtaccattactagtctaaactctgaaagcctatgtaagtagggttttgcaatcaagattatgttttcatataaggatgtgtaatgactcttaagatatataaccaagagagttgttaaagaggcagctctccttcttccctattttatgattgaatcaaagtattactaatcttggtgacaatctaaagtcctttttttttttactttctttgcacaataaagctcttcatgagctatgcaagttgttagtttatttctatcttaataagctcatttgactttgagttttaattttgttgtgcaaagaaaacttaactaacttcttgtatataggacctaaattcctccattattcatatatcatctcttaatctcctcagattttgtttttcttataaaaatctataataaatcatgatctgtatataaaaacttgaaggaaataaataagcaagtaatgtcaagtatataagacgaagtttttttaagcaactaaactatgagatcctaaacttgatggttgtaaactaaaatacaaaagaaaataaataaaattagttgcttatgaagtgggtggtgtcactcacaaccatgtcgcctgagccttaagaaagtgtctcgtaccgtcttttttaagtctccaccaaatcgtaccatttccaccatacataactaaccacgtgtccccaacgaaagaatctaacctgcttccaaccaatgaaaaattgacaactcagttatgacccaacgccatgaaaagattcgctaacctggcctaacctttaaactaactccgaagatatggcaactcaaatcttcatcaacacctgtcgcattttatgccttgttgtttttttagtttcttgcttttaatagtaaactaaattatcctctcaatataataataatacattaatactatagactacactacaaatgtaaaagttccttttacttttacaatcattattataaccaaaaaaaaaaggtctaatgtaaaattatgtgtggatatatgtttatttttgaataaagtgtattgaaattgacaattcggataataaattgttgccaatagaaaaaaagaggaagaagaagatattgaataagctgatcagctcatgatttggactgctacctatcgacaaaattagcacaactttgataagtactttagttttccatctttgtgaatgtgttacttttttcggctttccaataaagtttgatgttagactctaatacatttatagttacatgacttcccccacaacacataatttttaaaataggcattcttagattacgcattattggacaaggtgccactgaaaagatagtttttctttgatttactttatttttttataatattttcacaaatttatcattattgatcattcaaaattcatctctatttcattgattctacatcgactgcatcaaactctaatattcttttttcgttcatttttgatatattggaaatttggaaagaatttagttcaattatataaataaatttatgttaaagaaaaatatataaaagatgaaaataggatgagatattaatggatatggagaaataagagaagaagcaccacttgatcacttagagcccacgttcccactcttaatcacccaaaaaaaattaaaacaaagacgtgctcacatctcatctcactccctcaccagctcacttcactctctctttctctttttttttcttttttttataatcatctctctcaattctcaatcatcttctaatcaaagatcaccaccatatggctctcgacactctcaattctcccacctccaccaccacaaccaccgctcctcctcctttcctccgttgcctcgacgaaaccgagcccgaaaacctcgaatcatggaccaaaagaaaacgtacaaaacgtcaccgtatagatcaaccaaaccctcctccttctgaagaagagtatctcgctctttgcctccttatgctcgctcgtggctcctccgatcatcactctccaccgtcggatcatcactctctttctccactgtccgatcatcagaaagattacaagtgttccgtctgtggcaaatctttcccgtcttaccaagcgttaggtggacacaaaacaagtcaccggaaaccggttagtgtcgatgttaataatagtaacggaaccgttactaataacggaaatattagtaacggtttagttggtcaaagtgggaagactcataactgctctatatgttttaagtcgtttccctctggtcaagcattgggtggtcacaaacgttgtcactatgatggtggtaacggtaacagtaacggtgacaatagccacaagtttgacctaaatttaccggctgatcaagttagtgatgagacaattggaaaaagtcaactctccggtgaagaaacaaagtcggtgttgtgattattattattttttaccgatcgggattagctagtggttgatcattagctgagtctgtaatgaaaatgattggagtggactttggattattttaatttctgtttacgtatatggaaagaaaataatcttcaaatgtttattcgttgttggtttttgtttataaaaagtaaaaaaaaaaaaggatatatttgaaattattattaattttgttaataataaaaagaattggattaatgaaaattgaaaactactatttcatggaaacttcctactgttgtttttcttcattacttgattaatttttcatttactatttccgcaagcaaaggaaccacttctttgaatctgtcactcccagcttgaagtgatctgttcctaagaatttaactatttgattaaacatttcagatttctatttaaaaacataatttgataggagaaatagtattaattttgggttatgttagtattaattattgaagtagtgatagatcggttagtagtacctaacgaagctaatccttaagtggcttgtcgactttgattggttggcactcacacttccctccacgcttaaattatttttataattctgtattatttcgttttcacgagttttacgagtcttttaataattaattaattgtataatttgttacgataaatatcttacacgtcttaatcgatcccagttcttatgtatcttctaagaaaaagagtagttatacattccgagaaaaatatggatattgggtattttctgaattaaatgccgggaaaatattgtttttttggtggcacaaaaaattgacttataattattctttataactatattgtagtatctgatggttaagaatttttggaattattttaagatttgtttttttcttgtcaaccgatttttatttagagttcagaaaactcatcccttaaaaatgttgtttatatatgtgatattatgcggttcggtataaacttttcgtcaaattaagatttggctttgaaaagacaaaagcaaaaattttaaatctaaaatggtgtgggaaaaaataataataataccttgctaaataagacggaaaatatgtcgtgcagcttactgcttatacttacatcttacattacctattaggctataacctaatgcttgtgttataagtctgtaagatttggtcattcattctctttgtactattgtcttcttatattgctagaaacttagaaactaaagaatttcaccaatttttgtgggcatagtatatagcttattagcttgtaataaggcctaataaggccctcgagcgttacaataacatccaaattagttttggcatggtaccgttaaagtggtgttaaactattaatttaccaaagactcattgtttggactttggaccatacgaaaaatgcagtagagcccatagtgacatagtgtaccggctcttatagctgagaaattatatcccaattaacagcccagtatttaatcatttagaactcaacgtgaaagaggacatgttaaagcccaacacaagtccatagactcatgaaatacaagtccacaaacccaccttatctaaccatgtaattaggttttatagcataatataatgaacatcaatgaatgtaagtaggaatgcaatttgtgcaacctctatttgacaatttctttcatttcttctcaatagtttacaagtctcatacattgtttttgttctgttttcaaagaaatagttttggtttttctattgtatgcaatatgacttcccactgtacatcataaacattgaagtatatataatattttttctattgtgttctgccgtacgtctaacttataatctattttataacattgattttactaaatatataaaggtaaaatctatcttgttgcattcacttcagaaaataaatttttggaagaagggccacaaaacaatactaattttcaaaaattgagattgaaattatgttataagattgatatttaaaataggaataccgttgtaaaaataagtagttgatttatcgaacatctaagcatctgtttaacaccaattttatgtcgttgttgatcaaaactgtcgcgttcaagtgtcttgtgtcgactaattaagcaaatgaactttaggtaccagaagttcaacgaaacaataatgcatttttaaattactaatggactgaagtaattgggaataaagaaatataaagagacggcggcattcagtggaaaatttgcctaattggagtgtaggtaagcacaccacgtaagccatgaacggcgccgtttcaccgcattgctataggaaagtagaagaagacactttgacttattaatatcattttgttgtagatcttctgttcatcatatatttgattttgttactagctaatgtaaaggagaaaagaaatgtttgatttggtcacacacgtgagacagcatcgtaggcaaaaaaacgcctctatctttcttctaaaacatttttcatattaaattatcaaaacccttaaggttgatttaagggtcaggtagtggatttgtttcgttgaagggtcagcttagccttaaccctaaacaaaacaatctcattggtttcataaataaattgtttacaaagtatacgtactgcatgaacgaatgaaccatatctatatttataaaactcatagagaccaatagtttaagagaggcacttatatagctcaacaaataatagcgaactagagagaatatgatctaattagttataaatctcaattttgaaattgaagtgcgttatttcatttgagaatctatgtgttttttttgttgttgttagatgagaagctaggtttttttcttttctttacaccgataatcgataatatatgttaatcacactgatttttgtttgagacatgaagattcgaaaaatttgtcaacgaataaacactggatagatagaattgagatctgccatcaaataatcgagatcgttcatgcatgacgcaaacatttatatagaaatgaagcaagtaaagaatatgaaaaagaatagaaatgagaaatttataaagaaagaaaaaaagaaccaatggttgaggaggcaactattcgcggggacacggagccgttcgcacccatcaccttggaatctctctttcttcctctctcctcatcaccaactagtcaacaaccacacaccatttttaactttcataattaaacctaacataacatttttttttgtataaactatagcataaattaaattcagttaatgataaaataaatatattttgtagcaatcattctattttgtaatttggtagggctctttaaactttgattattatccaatttttattaaaatataataaaatctcaaagccatgacccattccttcactcaagtatcaatgtctattgtctataaatattacataactcttcttcttcaaccaaacattgaaacactttgtcccactctctctctttctctttcttgtaccaaaagctttttgaatctccaagattatagcaaaaccaaagataaaatactaacttaaaagatttctgaaaataatgagttgcaatggttgtcgagttctacgaaaaggttgcagtgagaattgcatcctccgtccatgtattcaatggatcgaatcacctgaagctcaaggccacgccaccgtcttcgtcgctaagttcttcggccgtgccggtttaatgtctttcatctccgccgtaccggaatctcaatgccctggtacttaaaaacaaaaacctctcggtcctttagatcttcgtctaaacgttgtcgttttggtttctgatggtaagggtatttggtctttttacagctttgtttcagtctttgctatacgaagcttgtgggagaactgtgaatccggtgaacggagccgtcggattgttgtggacggggaattggaatgtttgtcaagcggcggttgagacggtgcttcgtggtggttctttaaaaccaataccggagcttcttaacggcggtggattcgccgggtttccgtctcctacttccgacgaagcttcggagatctgtacggaaatgttgaatctacgaaaagctgatgattccggtgatcggaacatttatcatcactgccgattctcaagctctagatctagatcaagatcaacagcttctccgccgaaacggaaacgattatcgtcggaacaacaaccttcgtcggagcttgatctctctcttattcctatttatccgattaaaaccttgccgtttaaggaagatacaccgtcgatgtactcggaggagtctgttaccacggtttcgtttcaaaacaacaacgccggtgatcggtacgtacgctgcggcggaggaggaggaggagcaacgacaaagttgctcaatctcttcgcttgaacggcgtcgtttttgttatgagggttaaaaatgtaatttcgagtaactttttgttgtggccttttttggattaatagcccttaatattttgtgaaatgtagcaaattacgtgatttatttctctctttaattatgagaaattatccaaagtaatagagaataatgatataattcgtcggtggtgtactattttatttttagttcataatcaattaatcatcattctcatcgaattcaaattaaaagataacaatgataatgtgtacgataaatcaatacttattagctactaaattatttgtttttatcgacatattcaacattaataataataatcacgaatcggagtcaaaatatacatctctccaaatccaaagcaccggcaaagtcttcgcacccaacatatttcgattctttaaggaccaacatgttgtaatgtacacacaatcatacacaacttgctattttgataatcatcttgattactactcgcaaaacaaaatattagcatttattatctccaggtttattgtctttcgatactacatttgttattcaatggtttaatgatacctagtaatagtataacacaatagtacgtattcctcgagatgtgatgatctttttgtgatatctcaaattatcctatactagtactgcaacggtcttcttcgcaacactctcaatggcatatgtacatcttcatgtgtttctttctatgtttaagattagtctaccacacattctccggatgaatacaaactctaaaaaagattaaacaaggtgcattacataatataagtaattgtatgtatagagtagatatgcattatataatgcatgtagttgggttgaacccaaaaagttggggttataaagggaaagcttttgggggaggcggcttttggacgacgcaaagagccgtttatgtcacacttcataccttcgtggaatcttcaaaagcactctttttttattgttcttctattcttcttcacattttgtttaataaaaacaacaaggtattgttgctctatggatgatggcgtagaaacaatgaaattgaccaataacatgtttgcttttgaaacgttgaaatgagaatggattgttgttggaacagaagaagtgatttgaagatcttatgaagtgggacatattttaaatatactttcgaccagccagtcactagtgggcaaacaattgcttgtggtccacgtcactctcctttccttttccgaccaccggactctttatgttatttttgaaaaatataagtttttagttctgaccatttcaagttttatcaacaaccgggtatcatcattcgttcaatctcgtctgttttttacatctaattagtgtctaatcatgagttacaaaatttatggagctaaatttctttttctacttttaaactatggagctaactatactagacgaattcgctttttaaaaatttggggaatacaatataacaatatggatggataaacatgaatccatcaagtataatgagaataaaataacattagcaagattcgtgtttaatgccaaaagccacgagcagccgcagtttcttatgggcccaatactttcatcaccttctccacttaagtcggtgtgtgtgagtccacttgatgttttcttaaacttttcttccgaaaacgaacaaaactttagttaattatttgtctttggtatgaatgtcaagaaaatggtagttaaattagtaaggaataactaaacttaaataatcaagttgaaaattaaaaccctaggtctcacatgattatgaaacatttactactttgtgtattccaaaaaacatggtgatcaataaaaaaatttgaaggtgaaaacaaaacgacgtggattatcaaatgatcacaagaaaactagtcaatctaaatagaatatcaaataacgacaaaaaaatagaatatcaaataattaattaagaccatcaaaatcaagttggtattcataatgattctggataaaatacagaattaagtaagtgattttttttggatatatatatatatatatatatgatttttttttggtgtgttaattcataatgattctggataaaatacagaattaagtaagtgatttgtttttggatatatatatatatatatatgattttttttttggtgtgttatatatatatgaatgataatagtaaagtaatattttctcattatttcaatttttatttttgcaaaagttatatatacatgattatctgactctcaaataaaacaaaaactagggttagctgaatattagctaccaaataacattttatcaaccggtaaacacacattagaccataacatcttgatatgtaaccgtacatagttcttgatgaattttttcgtacattactatacaaagtgatatattaattttctgaaactcaaaaaacgttatgcttaaagctgcatatattgtaaccaaagactttttaataaattttacattacaatgattcaaaaaaagaaaaaaaagtgatatattaatttctacaacacatatttggaaatttttgtaactgaatgtcatcatgtcccgattatccccagagattttgtatatgaacctctttaaaaaacaatctcaattgtttgtttcttgcttttagttttctcaagtcttttgctattcaagagtttatcgaataagtttcttgtggatcaatatcactatctaatttctaacgattgattttgttattaatatagatgatcataagacttagcttggtctacattttttgtggttcttagggttttgtgtgatcattcttcgagtaaggtgaggacccaagagccatcttgccccttcaaatcttttgttggccgtacattcatttacacttaattaggatattcttttcttaaagcaaaaatagagtttaacaaataaaatataaaaataagataactctagtctttgatctttatcgactcttctaatgtcggattgattcaagttttatagtatgattattaatgagaacgtcactaagataatcaagtgctaatcataatcctttgcgaaggctgttttttgtaaatttaaacgagactttggaggagctagaaaggatcagtgttgaagatttgggagagatcgcgacaaggacgtgaaatggatgcgacacgtgactttcacgtgactggttccctcatcgctggaacacataatccactctttcacctattgggtcctacaatagcttcttatctttgactaaatcatttttcatgttgtaataagtaactagaagatgtgcatatacgatacgaattagagaatacatacgtcctgataaaaatagaatatatatatatatatataccgacaaattaatcattttgtattcttggaaaaattatttcttctgctcacctaacattattaaccactcaataaccgttaatatagtttgtcaattctcattgagctgaataactagttaaatacatagtctctaaatgtgtatagtgtaaattggaccaatcaggaaaatgagatctaattattcattccttttccatagggtccttatttcttcgtcttttttttttttttttaataatcctttatcaaatgtacatgattgtaaactgtaatattttctatatattaaaaaatatataaaatatctttaaaaaatgatttcaagattccttaatatattataaaattttaaattaaaatcacaaatctttaagtctaaatttttgaatgacgtaaatgcaattctctttgtataatataattcattaaaatatttaaaattcaatttgtaacttttttttatagatgaatttttatatattgtatgatatttatatagctttttaatttaaaatatttagcttacaaaatttggttttaacatttttggattaaaactttgagttttagttataaattattctatcataaaattatatagcataagatttatcagtacatagcacatattcttacctagcttattttttttgaataaaatgtaaaatttattcgaaaaaacatgtttacatcaagtgcaccggaaatttaatcgctttaaagttacagacactgaaaaaataaaagagaactcggcctctttatcttgttgcaaaccaaactgtcatgtgcttctcatatcttccatctccttgatcttttagggaagatatcctattcctaacatccttgtctagctttctcattagttgagtcgggggagtgtgcttatcgccatgtcttctacaatttctttctctccaaattgagtagattacaatctgaaaagaatatcttagtagaaataagcgaaccttatcaagcgtgttgtccgtgagcagccttagaatcacgttcctatcggtagagaattttgcagctaggagtttagaggtgaggctcgaccaaactattttagagtaatggcagtcgaagaacaagtggtttctagtttcttacctagttactttgcttaaaaatcagtaattactacaaatttctaataaatgaataaatagggggggggggtattggatcaaagagtttaattgaattgaattggatacataattacagattttcactcattgcaaaagatttcaaatcttgttttcaattctaacgattacattttcactattttattagaattgaatagaactgtaatagaattaaaaaaagtactaataattcagttttgctaacaaccggacctatttcttctccacagtctccacttgtaaatctctaatcacacgtttcaaaatctgcaatatttcctccttcttcttcgtctcaaaaccactctcaatactactaagtttaacagatcccatagcttctccactttcctcgctaaatcctctgtgatcattgtagatttcgaaacatcttcattgtattcttctcggaattcacgttgataacgagagctatctccgcagctaagggcgtcgatgatgattatgcacaatgacgagagtactctatggtgcaaagaaccgttttctgagaaccagtaacattttaggcttgaaagtttggagagtacttgaagacaagaattaggaacatcaacaataccaacaataggcttattaatcgtgcaaaaggggaaattagcagcttattagcctttccactagatcgaacatgcccttatacgacaatttgaggccccttatatattttcatccaaatcacaacttaaaaggtaagaatttgttttgtgcattttgcactaatatttttattaaattcttgacaaatgacgttgtcatgaaaaattacaaaatattgaataacacttgaatttagtagaattaagaaattgagaaactgaataatactagaatttaaaagaatttataaaatgcctaattgaataacactagaatcaacattctaataaattccgtcaaattcattgctccaatacccccctccccccccccccccccccaagtaattgaaatgggcttgaaaccatggggccggaaattttcactttgtattattttgatgaagcccaatagactttacggaaagaccttaggtttcaagtaggtttttaagttttatgaaacagagaaacatatacgtgttcgtgaaggagaagacgtgaaggtaacttggactataaagtgtatagtgttagcgaaaaggtgaagcagaataaataaagtgttatgcgttatcaagtctacctaatataactagctagggatttctactcttgttttcataatcgatctacggacatttctcggaacgtggtcaagattcatgagtcttctgttttttatgtctctgttcaatttggtttagagattagtatgcttatttgtttatttcatatatggttatgagaggagaggctaatggcatatactctgatgtttgtgatggctgctaatatcgttgaggagttattcacgttgtttcatgcgcaaaaatcaacagaaaaaattctgattatgagccaactctgtgaacccttatagtgcgcccagaggtttgcgaggcaaaatcccgatgaaccagaaggaattttagatctctatcaacaataactatgatggagctcgtttaaattcatcacagcgacaacatcattaggctgcccaacgtctatgtctcctggaggtgatggtacttgatctctcaaccaattttcttgaaaatatcatgccttgtgagcgctttcatattgcgcctaaaatacccaatacgcaatgaacctacttccaaaggcatagaaaaaaaactgataatgataatgagatttgtcactatacttatcctatccctacataggagccgtttgattgtttagtccatgttttcattttgtttagtctaatgctatataacttttctttatcagtctattgttatatgacttatatatatctcaagagataaggccaataaatcttcttcttaattatatctgaagactcaaaacatattttgagtttaataaaataaataacgtccaaatgctacatacaaacggaccaaattcatggaggtataaatttaaattattttttgttccaaagtgtatgcagtgatttattgatgaatgcgatagagcggcgaaagagaataatcgtcacctagaagacaaattgatcggccgtacatatatacataaatacaaacctgccacttcacatgtcacccacctttaagcacccccttcacatacatactttctataacaaaaatatcagcttctagttcatatttatgttacaataactcgagtgaatcatactaaaaaaatgtaatgctttctctaaataggagataaaatgcaccctccgacctaactaaagattccttattttagctatttaagacatattgcacatgtatagagatacataaacacatatgcaatatgcacatcttctatacattgaaaaaagctgatcttgcaaatatttgtcttacacaacacaagcgaccaaagcgatgcgtttcccaatgataaggttacgacatacttacacgactctctctattgtctcgtctctttctttcctcatccctctcctttgtctcctttcactctatttttcacttttcagaatacttttacgtaaaaatcatggacatgtcattgtctccaccctactatactctttttttgttctttttgtttcctcttgtgtcacaaaaataacaagattaaacgtacatttctctctaaaaccagactcaaatgaccaaaacccggattctcaacccgacccgattcccttctcccaaacccttacgtggctgcggcgacgctaacttcatggaacagctcctccttcactgcgccaccgccatagactccaacgacgctgcattaactcaccaaatcctctgggtcctcaacaacatcgctccaccagacggtgactccacccaacgtcttacatccgcattcctccgcgcgttgctctcacgcgccgtctccaaaacccctacactatcatccaccattagcttcctacctcaggccgatgaactccatcgtttctcagtcgtggagttagccgctttcgtagacctcactccgtggcaccggttcggattcattgcagccaacgccgcgatcttaaccgccgttgaaggttactcaacggttcacatcgttgacttaagtttgactcattgtatgcaaatccctactcttatagacgccatggcaagccgactcaacaaacctcctccgcttcttaaactcaccgtcgtctcttcctccgaccacttcccaccattcatcaacatctcctacgaagaactcggatctaaactagtcaacttcgccaccacacgaaacattacaatggagttcacaatcgtaccttctacttactccgatggcttctcctccctcttacaacagttacggatttatccttcttcattcaacgaagctctcgtcgttaactgtcacatgatgctccgttacatccctgaagaacccctaacttcatcatcatcatcgctccgaacagttttcttgaaacaactccgatctttgaatccaagaatcgtaaccctaatcgaagaagacgtagatctcacatcggagaacttggttaaccggttaaaatcggcgtttaactacttctggattccgttcgatacgacggacacgtttatgagtgagcagagacggtggtacgaggcggagataagttggaagatagaaaacgtggtggcgaaggaaggtgcggagagagtggagaggacggagacgaagagacggtggatagagagaatgagagaggctgagttcggtggagttagggttaaagaagatgcggtggcggatgtgaaggcgatgctggaggagcacgctgtcgggtggggaatgaagaaggaagacgacgacgagagtctcgtgctgacgtggaaaggtcatagtgttgtgtttgctaccgtttgggttcccatttaaatcaggttgatttaatttaattagcgttttaattggatacctaatatagtagaatagcattgctttaatttctgatctaattacaatttaataatattttttattaacttttttttttgttctaatctagtgtcaattgttttgtactagttcaaaacattctaacgttgaaaaataatcgttattatgactaaacatattttacatcttcataagcacttttagtttacatagatatttttccgtgaataggcttagtgataacagtgaaaacttattataataggaaaaattgaatagtatatagttatttaaatttgtagcgagaataaacatgttggagatacaaagtagagaggatcagatacaattgccttcttaaaatgaagacataaacaaaacaaatgaaaaaccaataatatcttctcatcgtcaaaatgaacattcaaacattaataaaacgaaaggaaaataggagataagacaacttatattttcccattaccagctctagttaaacgcaccacaatcacgacggatgtttccattgctgctattcttaactccaacacggccaagtttggtcatggctatcacaaaagcgcggttaaaggccgtagagtttgaggcccaagcattaacggtgggcctagagcgaccatccgtgaagagaacttgatcggaggtgaagagacctttgccttgttgaagattcttgaagtaagtgttgtcaaacgtcttgggcgtgactgggtccatgttgattgcaattcttgggtccacattcttaggacaagccttttgaagctcaatagcgtaagccttgtttaaagttgggtccacggagttgatgccgttgaatttgtggattcttttaaagaccttgccacaatgtgcgaatccaagggtgtgagccgctacattatgaatttatcggtttagacatcgatgcatcttggtgatataaatacatataactatataagatgttttgatttaaatttggtttacctgaaagagcaatcatatcttcttgggtaagtttgtttttcgtgaaaagagcattaagtttgtctacattgtccgaaggtcctggtaagttcccttcgacacttgacgcggttgataccaaaccatcgaacctaccaagttcaacttcataggacggtcctccagcctatacatgcgtaaaaccttgttatataaaacatttctaaacaagcaatgtgatatactaatattaatgtgaaattttgtttaggattaattatctggttatagtaaggctagtacaaatactcaccgcaacaacaacatctcgggtggccaaagtaagaatatcggcacatgagaccttgttccggcaactagggttagagtcaagggctttcttagcttggatcaccacatcaaatccatctccagctagcgaaatgttatctggatgatccttctctgccttgttcttaggcgttgattggatcatgacagatgcatcacaaccctacaatgccaattacgccaaaggtaccaattaatcgcctaatgaaagaggagaaaaaagatatgaaaacgcttaaatagaaacatacattgacaaagcagtcgtggaagaagagacggagagtggcagggacggcgacgaatgtcttctttattttcttttggacagcatttctcacgatttgttcgacattggggcaagttttggagtagaaaccgcggcttagttgtgcggtggttgtatcgggaaagacagagattatgaggcaaagacctatgagtagaacaatatcgaagcgagccattgtatggacaaaaccgagagagagagagtgttgtatataaattgagccaagacaagaagaattgcttttgaaatgatgacggtaaaaggtgcacgataaaggtttatataatgatgggcttgaagaatataacgcaatattaaagaagattcatttgttttagtataggcttttgataaaattattcgatttttggttaactgcaccaggcctaccttgttcatttcatttatacttgttagcatgatgtacttcttacaagagtggaaaatcatcaacgaagagttcttcagtgagaatgaaatataaataacaatagcaagtttaattaaccttaattaattgtatactaaaatgattaattgtataaatatgtgattatggatttatctagtgaaaaaagtaaatgtggattgccaacaataatacaaatatggatcgtcgaaacatgaaagtggaatccaaatactgaaagtggagatgtggtttgcacgttgttacatgaactgatgaaagttagtgagagcatcataatgaaaaatatataagaataattgtagtacatgtaaatgaaccatataaataaattataaaaagaaaaataaattgacaataaaattagtttagacaattgtagtattcaccattaactgttataagactcatcattttttttctcttcataatatgttacttttatataggagtttttttctaacttagtaaatggaggttttagactgttttatgggttagattgtgattgttggtttatacttgatagacatttgaatcgatagaaaacaaaattaaatgagaatggaactccgcacacaatgcttaatatggagtaattgataaacttgtaataagtaaaaaagtttcagtaatatccctcaaaaccatacatagaatttgtatcttcattctgacacgccatgaaattatgagaaaagcaatgccctttttctttaataacaattatgagcagattgtgcaaggcacgctccttgtttgtgttgacaactttgttaatgtcaaaccattataatatctgcggtaactaaagtctaagcaaacggaaccaaaaccgaatttaaaccgatcaaaaccaaaccaaaatctatgttcaactatttggttaaccttttcctcaatcctaacggtttggtttttttttttgtaggaatcctaacggtttggttgtgatagttctaaatcaaaaataaaatcccacatttaactctaaccctaatgatcctaactaaaatcacgtttccactttaaattttccgattaccacaatacaaaagatgaaaagaagaagagtctctttgtatctttcttccccatgcttcgagtgtcttctaaattaagttttttttttttaatccgaataattaaattttctgttgactttttgagaattgctctatgacgacttaacgattcttaagattatactcaacacaaaatgtcgacaaaaaaaagattatactcaacacataaactcaaagacattctcagctctctatacaatcaacacagaaacatccatgactagaaattgaaaatttccaacaagaacaagtgttcatgtattgtttaagatatagagtgtcttctgcttttaggttgtttggtttgtccttgtttgaggccaaaagggttaataagctttccgagtttttgagaaacagagtttataaatgactttctaggtaatcgaggcttagccaccgaagcagttgaaaccgaagaagaacaatccgaaccactcatgacttcaaaagctttctccttctccaactccttgaacttcattttcactttgagcaactcaagcttcaagtattggttttcccggtttagtttggagagttcattcttgtaggagctgagctcaggaggagaaagagttttttctgctgttgctggtgctggagaatctgaattgcttaaattttcttggaaacgatcgttttgagctgcgtgagcatacacatctcgcgatagctttttacagtccattaagctacaaactttcttcttctccacttcacttatattcggatgtgtctgcaccaacaagattaaacaacattttctaagatctttaaacttttcaagatataggtcagaacattttgataatgttaaaagctctagtttattcatcaatatagttttagtgttatcaaataaatgtataccttgaggaagatgtcaatggctcgatacatcctagactgtttcggaatacattcagcaaaaccgatgaacttcgcgaagtttatgtttctatcagaagcgatttcagccagataagtctccattaattcaccaatatcactagcaaaatcagcagagtttccttcaacttcaaactcaagatagttcatgaggatacgttgaacagtatcaacatctaacattgtgttgtctccattgaatgaataataaggaatcaagagatcatcaataacagcttgtcttaattgcaatcccattctcttctccaaatcaagcctgcaagctaccgtggtttcgaggtatatcgcagctcttaaaagtatcgaaagaaaactaactgacactgagtttctctccctcggaagaagactcactattgtttcaaggatcaaccttttctcatgttcttgttctgcctccatcttctttgcctctttcccaaaaatgtcctgcatttcccacagagaaaccgacattacattattctttaaagtaagcaaacacattgttctgttaaaaaattcaagaatctcaccaaccctctaagagctttttcggcatagagtttaagtactggaccaagtgagtatctcttaaaccctctagcgatcatcgcgaccaagacacgtcgaaacatatcaatctttagaacagctaaatcgtcagcccaccagtcaactatatcctcattgctctggctctcctggcatattgcataagcgattgaatcgatacaccggtccacgagtctcactctctcggctataggcaacaaatcttgagatttttgcagaactttaactgattttgataaactcttgaggatcacttcgtttaagtaaacctctattgtctccactaggttttcaacagagtgttcctctgtcatctctagatactctgctgcacatagtagcatcgcaatgttctctgtgtttatctcgaagcttatgtcgtagcagaatttgatgactagctcaaatccttctgcacctccaggaaaatctgggattctgataatgttggaatcattgcttgattcagaagcaagtttctttataaacccacattttgaaacaagtggaaactgcagattatcacagagactatgtatatgagaaagtgatctccttgtgtataatttagtagatcttgaaaaaataaaatcaccttgtggagtaaaaacgaaagtttctccaacatgaacagtgacgtcactaggaatttcttgagaagaaatcctgaaatttaatttgtaaaaaataagaaataaaatgagaaaaagttggaacaaagtgaggattaaaccattcgctagttctcttcatggctgaggacaaaagctccttcttctttccagacatattacgaacacttgacgataacagtttcttcttgctcaagaaataaaccctagaactacttcaaagacatctctcattgatttatagatatagtttcatgcttgacattcttacacacaatcaaaagagacgatgaagaatatgatccaccaaagagtttatggatttgtgtggttcaaacgtcaaataggtaagagcaactccattgcacataaaagagagtgtcttcccacaattaaaatataatgtatgtaaagaaaatatcttattataatgttttagtgtctttaaacttaagacatatgtcttaaatgtcttgttaaagaaattttagagaagaatgtctcaaatttaaagacccataacatttaattattagtattttgtaactttaatttttttaatgtttatcaaagacccctttcctaatgtgcaatggggtggctctaagggtccttctgtatctgagacgtcttttcgaaataatccaaacaccaattattgtcaaatattttatcttttgaacgatcacaccgcaaaatagtgtgattttagaaatattatagtgtgaaaccgcataaaaatacacagaataattttatgttaccgacaaaaaacatgtggaatgactatcaataattccacaaagggcacataaagcttctattctttacttctttctccaaagtttaagatcttaaattttgttgactatcaatagctccaaaatgttatggtccatacagctttattatagagaacattcacggatttgtgaccgaacatgaacaaatgactcatgaagactaaataagctgcacgggccggattttgtgacagaacatatgtcttgtatcccccacaaagcttttattatcagatttatacatatcgtttgataattgaatttctgattaagacacactactcaacctttgctataaatggtgtcttttaatttgctctgtcactttcgtgaagtttgactagtaatagtgataaacactaatattaaagacgtccgcatccaaaaaacgattcaagatttgtaatcttgataaacaacaaaacactagcatgtcttttttttcgttccataaactaactattcagctctttttcgtttgcctccgattgttggatttgaatcaaacttggaacataatcaacaaaatgtggccaatatgaagtcattgtcactactggaaaatacactcgtgtggcattactatccgcctcaaccatggatactgttataaccggttggcattttttttggcatttctcacaacacacgacaatcttcttttcctcgtcgaccaagaaaggtctaccgctccacatataatatctagtaccgacttccacttcgaaaagctttctccacgacatctctttggtctcatcatccatcttatttgttatccatatctctcttcttggtgcatccttaagctgtaataccaccgaaagtttttcttctccaacaactgatagagaataatcatgatcagaaatatcacactgaaagggaagccatagacgttcaaatctctctgtggtataatcaaaactgattaaccctaactgctcgtctttcaaatcataagcaaaccagtaagtatttcccttcaaagacacgcggtaatcagaacaagtgaagtagttgcctggaatcggagtgacatcaagattcctccatgtattagattttatgtcatagattttgaattcttggtcgccataattataacccttgtagctcaatatcttgtagctcttatcgcttgatttattgtcttggtaatatccaagaacaaagtcttgaccgttttcgtcgagattttcgccggtttggatccacttcttttgaccagtacacggattccaaaccacgattctagtgtcttttaggatggtgcatacaaataagccatcacagtgaaatattttcattataatgacttgacttgaattagaatgataatcgattgggctaagttcacctgtaaactcttcagaaggaaatccactatggagattgatgctcagtgaagaaagcctacatctttcctctagtactgtgataagaaactgttttggggctttatcaaagtgttttcttgagaatgtcctatcgttgaataaacggttccattctttgcacgtaagtcgtaattgtttgagagatgtggccggaacacgacatagtatctcctctaacaactcctgtggaaggttcaacaccatcattggaagaaagaatcggtggctttgattactatcattattttttaggttttcgtgtttcaacgtttactcaatgttatcttattggagttgtatataactctttccttttttttcattttactgctatttttagttttttcttttcctatttgagctttttttttttttttttttaagtttttccttatcccatctgatttctatttttattgttttacaaggtttttatttcctgttatttctccaaatgattcatatatgtaattaatgtcagtaaaacattattatgccaagacaaatgtcactatgaagaacttgctcggttgctccacgacattactttggtgtttgatctcatcatcaatcttatttgttacccatatctctttctttgatgtatgtgtacgctttaataatcaacaccgaaagtttctcttctctaacgactcataaagagatagtttcataacaaccacgctgatagggaagacgtaaacgttcaaatctctctgttgtataatcaaaactgagtaagaatataccgagctgttcctatttatcttcatcataagcaaaccagtaagtgtttcccttcaaaagataggcggtagtcagaatttatgaagtggcagtccagagtgtgacatcatgattcctccatgaattagagttcatatcatcgatttggaattcttggtcgtcacagttttagttcttatagctaaaatatcttgtagctcttattgccagatttgttgtcttggtactccgttggtagtatccaagaacaaaggttaaattctgatttgagtcgactctgttctcatcactttctcgaaattagactagtaaaagtaataaataatattcaaaagtccacatccaaaacaagattcaagattttcaaatcttgatgaaaaagaaaaaacaaacagcaaatattacacgaaatggctggaaaaactggttttaaacagtctgagaattgttttgttttaccttagtcatattattttagaggtctcgacgatggaccagaggtagcaacagctctttgagcacgctgcgtttcaccgcaatacagcatctttgtctgtttcttaattatccttgcttctcgcttttcggcttttacagcatttttccgctctttcttctcttctttcgactcttgaccatgagtcttcctcttgatcggttcagcttttgggatttccgctttgacatcggtttgttcagctctcctaccaggtaaaaactcgacaggaatcctctctctcccttggagattaatgattcttccatttgaactcaatgcgttagctaatgtttcactcagcttcttctgcctagctgactctgcagcaaggattttaccagggaggttatcgagattcgagtatgttgagactatggtttcacaatcatgcttctcgctttcatcgctgctttcttcagtcagctctacaaattcatcttcattcccgttatcaaaattttcaccatattctacagttcggcggataacatgagcagcagtgtccacttcctctttatctctgacagagtcactgttcttcagtatatccgcagggttcatatatttttcttcaagctcataatcttttgccttcccatgaataagattctgaacttcttgagccatgaagtcttcttcttcttcttcttctccatcttcagctatgtaaccatcaccgtcactatcacttccatattcattgagttcgagctgatcaaatagctcatcaatttgacgaggaactctcgggttttcagccacaggttcatcactttctctttctctaacctcacgtcttacagaaaactcgagctctccattgctcacaccagaagattcacccttttgagtaagattagcttgaacaacaaaatcttcttccaaatcctcaacatcagaaccaaactcagacccatcactgttttcaagcaacgcagcaacttcaggatcaatagctttctgcaccttgacgttaacagtcttggacgcaacactatacatcaacttattatcattaccttcttcattcaccataccagagatcttcacacgagacgcatcataagccttaacatcacgaggtaactgagcaacctcatacttaggattcacatagaaattagaaccaccaccagtattcttaatctctctcaaatgctccaagtaattataaccatcatcaggataccctaactctaaaatctccttcctcacatgagcaggtaaagaactactcgaatccccaaaactagagtaaccataatccatctcttcaggagcatcatcaaaccgtgagctgtctccttcttcttcttcatcttcttcaatgaaaccattgatgttaacagggttttgatcaactcgtaagaagatcttatcaccacctggtgcatcactgtatcttgggtctgacgtatcacgaggacacaactcgaaagtcgccgcctttttcttatcaataaacttcttcttccccattacttactaattcacaccttcttaagggttttgcaaactgtaaaacaattacgaagatataagatgtctaacttctaagtcacagcaatcaactagactatgtttcaatcctgactaataaaatgtaaatttttatcatcaatcaacacgaaaacatcgaaaagggagaaactttaagtctagaaacgattcaaaaacactaatttaatgaaattgaagaagcttacctgaagagtttgagagagagaggcggagaacaatgcagatgaagaacaaaaacgctgttgaagatttttagttttagggtagagccacccaaaacgcatcattttagggtttaaccaaaacgctgcgtttttgtgttaagcaagccaaaacgcgtcgtttttggcaacaagtcaaattaaatatttgttttatttccataactcagtgtatgccactaaaagaaataatccaccgcgggagagtgcaccgaatggttacatgcacctaatcttcttcttctcctactttcttcgacggtacctgttgttattgtgcgccatcttgatcttacgtgcgccgttggcgcattctcttataccaccattaacgtgcgtcaacaccggaaccgttgaatcagacgttactggtatcaggttcgatcgttgcctcgataccgattctctcgccaagatctctctttccaccgtcatgtcgaaagctcgtgtttataccgatgttaacgtgatccgacctaaggattattgggattacgaatctctcaatgttcagtgggggtaagatcgtatttttcgaaaattatgaaaaccctaggaagctaatcagttaaaaaaattggatcttgtaatgtagaaattgagctttttgtctagctggcgatgttcttggtttttaatctggttttgaggagagtttgttggttattatgattatgatcatgatgggtgatgatgcttttgttaaagttttgagcttttttatgtgggtttcgttgtcagggagcaagatgattacgaggtagtgaggaaggtggggagagggaaatacagtgaggtttttgaggggattaacatgaataacaatgagaagtgtattatcaagattctcaagcctgttaagaagaagaaggtgagtgtctatattacttcaattggtgacttatgattgatagcaatgaatggtgttgcttttacaaaaggttttgtctttacttagttttgattttgggttgcctttctgaatttgtatgatccttttacagattagaagggagattaaaatacttcagaatctttgtggagggccaaatattgtaaagctgcttgatgttgtcagagatcaacactcaaaaacgccaagcttgatatttgagtatgtaaacagcacagactttaaggttctgtatccaacattgactgattatgacattcgctactacatctatgagctgttgaaggtaattttaatttattttatgtagagtttattatttcattacgacttctgatttgtggaattttctcggttccacaacaaatttagttcagtgataaccttgcaaatttcctatgatatgctgcaggctttggacttctgccactcacaaggaataatgcacagagatgtcaagccacacaatgtcatgatcgaccatgagctgcgcaaacttcgcctaatagattggggtctcgctgagttttatcatcctggaaaagagtacaacgtccgtgtggcctcaaggtatgtatgataggcgccttcaagataagttggtttcctatccatttttaatatttagtcgttatcagtatctaagcttgatcaaatgttgtctcagatacttcaaaggtcccgaacttctagttgatttacaggactatgactattccttggacatgtggagcctcggttgcatgtttgctgggatggtgagtaccttgcgaaatgctaggcttccaatgctacatttatatatgatcattcttttcaaaaaatttccaaaatatagtatcgtaatgatgaagtgtctaaattatcttttcttgtagatattccgcaaggaacctttcttctatggccatgacaaccaggatcagctcgtcaaaattgccaaggtaatcaaatgcgtgggtaaatgtgggaattttagagggattgagtgttttttcacatctttagagtgtatgtttgattcttgactcaggtactcggaactgatgaattgaatgcatatctgaataagtatcagttagaacttgatactcaactagaggcacttgttgggaggtaagcagaactcacatattctctctatagtataagagtagattaaagcagtgccaatgaccaatcctctttccacagacatagcaggaagccttggtccaaattcatcaacgctgacaataggcatttggtctcacctgaggtttgtttactttgttctctgtattctataagaaacacaaacgcttttgtttgttgccatggtttctctctcgagctgtaactttgttttaaatgtaggcgattgattatttggacaagctgctccggtatgatcatcaagacagattaactgcaaaagaagcaatggtaagtatcatataacgtaactcaaacaagttttcgttctcatagtctgctaaattgtgatggttttatgaattgatgacaggctcatccctatttcgctcaagtcagggcagcagaaagcagcagaatgaggactcaatagagatgtctcggccgatttttgtttcttcttcttctccagtgtgctcttttgttgtttactaatacattttcatatccatatggatttcttttataatgtcgaaattatggatttataaatatgagaattcttattactccctccggtttcttaaaagtttgtgttttgagatttttgacactttaaaaaattatttacagtaccaatatgaatctagactaagttgtaacttgtaacgaggctcagattacacacacatgccttgtttgtacacaattatgtgtctttgatcattttgatctacgttatgtttccaaattgatattttactgaacttgtatctatacttattgttccccagcagtagttatgaaattatgaaaaacaacaagcgttcaaaaatcacacagatgcaaagcaaaatacgataaatcacaacaatatcgaaacatatcagtgttttactttcaatacaacaaatgaaagttcttataacttggaagactaatggccaccaaggtagatcacctctttacttttagtaagtaaacatgatctggaacaatattcaaaaccattgcactggaaaaatgttttgtgtggacaacgcttcttgcaaataaagcaaaaaggtcgagacatatgatgattgtttggcagaacacttacctctgcaccgtacttgttgaaccattttgaaccgggcttcatgtagaagtccaccccaaccaagcattcaatgtgtatggtgacacaacaatactcatcacaactataaaaccgctcctttggatttaatctttcctcacaaatttcacaccaataagtcatggtacttgtcttgtccccataagaaagagtgagcacatgcttatcatgcttatacctcaccttttgagctaaagtagcacactcaaaacacaaagcaaagtcgcactcctcgatgcaattgaacgtttccttggtgggacaatgccctgacttcttgcaaaccgaacattttctttgctcttcgtctggtttggatgtgaggtataaaggatgtatatgacttggatgatctagtggctcggaagctatggcacactgcacgtgtagataaaaacattttctgcaccgatagaggaaaccgacagtacgcttcctaggacacaccgagcattcatactcattgatctccccatcaccgtatcctgcctctaaattaagctgatgtggatgtatcggatgatctattttacgaggaaaatttgcgcatgtttcgtggagattataatcacagctaggcgtacacgagtagaagttaccaaaatagattggcgtaatgcatatgttacacagcttatcctcgtcgtaatctcttcccgtgtccacatcaagtctcaaaagatgacgatgagtgaaatgtcgtatgactccacttcctttcgttgcaaacggtggatctacttcttcctcattttcttctggcactccctcaagttctacaccatcccacacatttttttgtgttgcacatcttgaatgtgccgcataccaacaaccatttttgatacaagaatagcctccgtataatttgttgatctttctgcgacaaacaccacaagacaaaccttctttctcaaacgaagaagtaaaatagatacgatggctatggcgagatatctttatgacacgtggtaagttgatacatcttagatgagtcacaaagtcacaaggcggacacatatagataggagagcttggatcggccaaggcgcaaaggttgcaagttaagaaagcttgtcttggaaacagagcaagaggatgaccatgccactccggacggtgatggtttatcaaaaagactggtggtttcctcgcacaaagtatacttatagcaaaatcgcaagccgagcaataataaagtatacggctaagagcttcatcacaacaatagcattccctggtactatcttcctgcaacacgacaagctggagagaatgatttggatgaagaggatggttgatctcaacaggaacattgttaaattctttatggttatcgccattgcaacctatgcagataaaatggagagtgtcttcttctcttgataacttgaatgtccgccagtttacagaaaggcaatgccacttgttattggtgcgccacgagacgtcttcaagaacacgaaatcttccgttttccagttttacttgtgcttgagggcacaaggaaatatactcccccgagtttgagttcatagagacgacgagggagagtatttgatgagtgagtgagataagttccggctccggtttgacttccaaagtttcatcaatgagagaaatcttttgagaaatgaatgatattagctccaccagccgctttggctgggaatctgaatccctagagttgactagagagagtatctcttggatgagtaacactagctcatcagactctggcttctcctctgtagtcaaatccattgagctgaccagagagattattttaccaaagagtgttgtggcttccgagtccaaagcagagttaaagagagataaattttgaaaaaccattgacatgagatccgacagcagtttggactgagactccaaatccatagagttgaagagagatattgcttgagtagtgagtgacatgaactctgactccggcttcggctgcgaatccaaatccattgagctgactagaaggattagttcggtaagcaatggagtggcatcccagtacaagttaaagtactcgacaaacattagttgagtaaggagtgataagagctccgactccgaatccggatccggatccatagtgtttgccgagagaggctctttgagtaaaagttttgttaatatgagagatttttgaggatgaatgtaaggtcggcttatgcaactttcatattttcttcataaacaaaacaatagctttgacttttgatgcctagtgggagagtgaaatttaaaaatactggcaagtaggcaacgaaaacaaacatatatataaacaagtaccaattttttgtatttgtataaaagaattaccagctattaacttttctatatattaacaactagattaggacctatctaaatacacctgtataagaaatacatgttaagttttattcaattgtaaatggtaacatgcacacaagtttttctttataaaccggttttgaactattcaatcttacaaaacaatttaactatctatctcatcataataaattatattttttagttttgtgcattttatctcaatggttaagagctgaaaaatttatattaaaatgtcacaatatatatatatatatatatatatatatatatatatatatatattgttagttttctattttgagtaaggataacaagtcaataagaaatttacatatacacatataaattagtatatgtaaaaatatttttatttaattttccatattttatgaagaaaataaaataaaactatttagacatataaatatatatatactacaagaaaaaatggtaaaatcttagcaatttttctacaaaacttttagtaaaaaaagtttttcattatatacttatgacttttctacgaaaaacagttcttagaagaaattggtaggaattttgtccaaccatatataccctacgacttttctatgaaaaacagttgatatagaaaataggaaaaaatatcctatatatttcttccaaatatatagttagttaaatttgtatatgagactggaaggagtttgatgggaaatgaagcagtagaaatttgataagtatatttgatagatacatgtatcaattttgataaataccacaatcatataaattattaactttaaagtgaaaagttttatagaataagatgcttacacaactaaaaattatctagttaaagaatgaccaacttgattatcgaaaaaagaaagaccaacatacggtttatttctgttagaaaatgaccaacttacactcttttgacgttggtttcggccaaatcgtattaaattactgtcatttttctccctcgaacctatctccagactgtcttactcgtaagtcgtaacatcaactttttctttttcttttgtaaatattcgttgctctatttaatattttttttgtgtcccactttaactcgtaaatatcaacgttctatatatacaaacaattaaacaatgaccagttgttgatgagtactattttaataaacaaagacagattaactgcaaaagaagcaatggtaagtatcatataacgtaactcaaacaagggttctttctcatagtctgctaaattgtgatggttttatgaattgatgacaagctcatccctatttagctcaagtcaaagcagcagaatgatgattcgatagagatgtctcggtcaattttgtttcggtgtctccagtgtgctcttttgttgtttactaatacattttcatatacatagttacatacatggatttcttttacaatgtcgaaattactttaaattatggatttctatatatgagaagttttattactctctccgtttcttaagaatgtatgttttcagatttttgacactctaagagaattatttgcaataacaaatatgacctcattttcttaactaaatccattattaatcttgtttaattatacgttatattgtattaaattgattttgggtgaagtagcccaataaccatataattttaaaaaataaaacacctttctaattcagtaataagtgaatttattagattggtcttttgtgttcttcagagtatctagattccataaccagaagcagcttgtgtttggaaacttcaaaaacagtaaaaatcacaagtaccttgtgatcgcagaggaaaaacagacttcaagtcttgacgattcaagtcttttggatgatgctcaagggttacatgaattctcaccatatttctctatctatcatgaattctctcgtttttgtttcattttactcagttacattacataactaaattttgttattagagtaagatggtaggatgattaagcaacaagcatgagccctttgcacatttcattatctttgagaacatattcaaacacaacaagcaacaagtggtgcattttccaaatttttcatctaagaatttttttgaaaaatatttcggcttaatttgttcaataagcatcatatttcgtttttgttttcttgatacacttcgaatagttgcataaaaaatgcaaatgttgttaacttagaagcaatttatcattcataatataaattacgatataatcaaacaagttttttaatctgagagaataaaaatacttatcggaaattattgaaacgaaagatataactgaaatagctaggtaaaagaacaacatagttttcttatccgacatgaggaatattatagttttctcatccgatgtgaggaaaattactgacaggaccattgggacagttgttgacgggaacacggacaatgacacggttacaacaattgacggctagtacagcaacatcatcgggaatgataacaaccaccacttttggattgtcatgttcgattattctcttagcttcaagtccctttactccatttaattctggccaatccaccttaattcctgcaaacaattattccatatgtttttatcttttttttctaaaaaaaagaagacaactctaaacatttgtataaagcaaacttttgtttattattttgttgattttcataaaagataatcgtatcagtttagtgtagataaattggtggtttacaccaaaatcatagtacgatatgacccataaaaagagaagaacacaaaaacttgaagataaaaattaaaaacaatgtacctggaaatagaggttggcacgtaatgccagcacagctgcagcgttgacacggaggactatagagcggacaattacgattcattttgattatgcgatgatactttcaagttacaatgatgtaatgttataacatatattttgcattagtttggtcaatatttagcagaatatatagggcttattaggaaacgtaatcaatgtaattattgttgactaaataaatcaatttttaaaaagaaagattaatgggtttcatccaaaaagataaagaaagatgtaatggtaaaatctaatgatactgtactttaagtgtatgttataatagcgaatcaaaatgtaatttgttatctttttgggattggtcaaaatatataggagatatttagggaaaggaaatcaatgtaatctatactattaattggcctttaacaagaaaaatatatccctttaattgggggtattttaaataactatgaaattgttatactttatttcaaatggttttaaatctactagtgtttaaaaataaaacttttaagattttattgtttcttgagattttgcttaattttatgtattatatgatgagtcagaatagttataaaaattaaacaattatgatagaagaatcataattttaaatttcaaccaaattttaaatatttattattaaatatggaatattatatggatcttttattttattttataattattatagatgcaaagaatataccatagatgtttccgaaattaatacaaatatttggttcataattttggttatgttttgactcgatcaaagtaaaatgtaaaaaaggcataaatttcacggctctgtaaccaaaattaattagtgttagattctttctgaaagggtttgaaccagaaatgagtccgatcaaccagtttaacgatgagtttagatcccatgtatagtctcgggcatggtactcacacttcatccatagtccctggatctgtagttaaaggagcatgctttctaagatacgccttaggcgttgctcgtggaatggctccacaagcacgaattgcaatggtatttttgtggttgcagctactagcaatgactgtctgaatcatgtttcatcttgttcttatttctttttgttctcttccagtaagctacgcaaaacgaatgacatttatcgttcatatggctcaggagatgccaatcagcttcaaagacaaatctgaatggtacaaagccaacgttcgatccctctcaaactcggcggagatcgtttacacatacaatcattcaactcatggttttaggctgaataaaaatacaaatctagaatagagttacttcattttagaataaaataaaggaaagagttggagatgcttttatatgtatcactcggacacatttttttatgagaatatgcactagatgactatggattgtaaaagaactaacaaaatagccatggtgtcagagcacactctctttcttcacttgcaattacctttttacccattttcgtattatatatatattacatgctatttttcaaaatcatataaaacacttagaatcatctcatctttctttcttccaccaccacaactaccacatcttccaccatcacaaccacctgatctctttttcgataaatctaggctgccaaacgttatttatattgatagatcatctctccttcaatttgcagaagatttgtcatttttttattcgattttgattatttcttggaatctccgtcgttatgttttttttttaaattgtatgttattttcttttataccacgctactttttcgaattacacgtgataactagaaatctctctctctcgacatgctactttttcatataacacattatttattaaaatcacatgtaatttcttctaaaaacatgatttaaatgttaaaactttctcaaatctattattttatcttcgtgtaagcttgctcatggttcaacttttcaaatgaaacgatatttgtttatataacatgctatttgtgtaaaatgtacgttataaaatatcatcgtttttataaatatcgtgctattttaacatgtttcatgcgatttgctaaaaaatatcaaatatatctacataagcttgcttttggttcaacttgcaaggatagttttgtattttcttatgccgtcatatagttatttatccatagaaaaactgacaatggttagttacttgattcttttcaattctatagttagtttctaatattaccctttttttatttactgaacgagttacctatatatgtagaatatctttttgaaacatcgtattaagttttcaaagaatttagtgatttttttttttttaataacaactccaacgatgttatagttatttgacttattgtaaatgctgaaataagaaaggagaaaaacaagttgagaaaaacaaagagaaacataagcaaaatataagcaaaacataaggaaattatttgcataaacatagaaataaatatttgaattgaaaaattgaaaaaaaaaaaatgaaatggtaaaattatgaaatgacatctggtaccaaacttcattacaaacccagtaatataaagtttgaaatcccgcttcaaaaattttttgtacatgcttaattatctcattatcaagaacattatctcaaaaacaaaatgtggaagaaatgtcaaatattttgtggtaatgttttcaagatgatttgaactttaaatactaaacagagttggtaaaccatgtgataaaagaagtttgttttgtttttgatttaaattttaatttgactagattttaaggatttttatttactttgatgaatttttttgagtttttatttatttttgttaagttagcttaagtttttattggtttttttgaagtatatcagtgtaggcgctgacatcgtagatcgtctttttccaactacaataaccttaggaaacggaaaaaagtttgatgtcgtctcatcattgttcaaacccagcagtggtttgtctaacacaccattacctctactcggtacacttttttaccatccgtgttcgtcgataaaaaatcgggtgacaatattaaaaattatatcttaatagaaattcaacagcgaaagttatattcaaatgaatcatcgtagatgtcaagccttcacccagagccgtgactataagctaacgaaaaaggcaattgcctcaaggccctgatatattacagaacctcagaccttaactacccttcgtttgcagtcacgatcaaccagtcactaggtggaggcgaaggcgcgtacacatagaggcgcattgtaacgagcccataaaataagatttaagtgttgttaatctaagaaataatattgttatggggcttaggcccagtttaaataagcagcccataaaataagattataacagaatctgatctgttgttgaatcgtaccaagtaaattattggcttatcaccatgaaataataagttattaacttttagtattcaaaaaagaaaaaaacggtacaaccaaattaacgaattaatatctaaaactttttaatcaaaagttcaaaacaaatgatataaccaactactaggaagtaccaatagtcgagtagttcgactccaaataatcgtattaccctcattgtaagaatttggttatggatcatgttttgtcgatccaaatgacgattaaaaagaagaaaaaataaaaacgatttcgccaaatcagtttttgattaaagaaaacaacacaatttcatcaatctatcgctaataaattaataattcatcactcaacttgaagacaattaacgaattgttaacaacaattaatgcctaacacatcaacaccttccttcgaactttgattttgaaccgtcagatcatcgactattcgacacaaccccagagaaaatacacgtggcgctcatctgttttcttatcatctgcgccgcatagtagggaatcctctgtgtatttgaatgcttgactcgatgatcaacgaacgctaaacaatccatcaagctctctctcgtcgatccttttaaatcgaacgcttgagatcttctccacaaactcttaccgtggggattattcacaccagataaacacaaagccctagtagcatcactaatagcagattcaactttcttcaacaacaagtaacactgtgctctgttgctaaacaacacaaccctatctcttaacatatccaacggacacaaatcaatcccaactgtgtaaatctccatcgcttctttaacaaaacccttcaaaaacttcttcttcccctgtttctttaacgacttcaccatctttcttctttcttcaagctctgtttcactcataagcttctctttcttcttcctctctactttaatctcccatagattctctatacttctatgagcttcctcggtcgtcatcttcaagccactatacttaatcttgtgataatcttgtaaaactatctgagctactctgtctccaacaactttatcttctgctaaatccactaacaatgacctaaaacatcgataactcgatacctaacatttgagtctttaagaagcaacaaaagtgtatctaaagcagtttctttccaatcatcagacgatctcgaaagatcgcaaagtctctcaatcacttctctaacctcactaactctctttctccccaactctgttttacaaagagactttatcaatccaagtcctcccggagacttccggtttactaaaccaccccacatttcgatcactttcttcaagaaccctccctcgcagattcggtcaatagacttacctcgagatgcgaaacaattcaatagaaataaagaccaacattgtagctgaatcccccattcctctgctttttgattctctgtctcaaacccaccaagccctctagtcaacaaatcgctctgatactttaacctacccctatcttcaaccccaagaaagcttttgtaaacattcttcaaacaattagtagctatctccattgcaagcttcacaatttcttcttcgaataaagaaaccgcttcaaaactcttctcatggctagctaaatgaccaagtgctcgagctgcggctcgctgctcaacccaactgatcttccctctcaaaagctccaacaaagcaggaacaagaaagacctttgaatcaaccgccatggcagctaaatcttccttgttcataacatacgatccaatgatatgagctgcgtaataaggaatgaatatgttctggtctttgagaagccaaacactgtttttgatcgatttatgtatgagttttgacatacactcgaacaaacctagtgacgggaactcaggatcgtcaggctcggacatggctatgttccacaaaccactcaagaccaagacatggtcttttgactccgtacgaggaatctctttgaagattgcagcgagttttgatcttcgacgaaacgggttggtatctttcatgctgcagaagaaacaggatgggtttgtgcattttggttcatcgaatttcagcatcttcttcttctcctttgttttggcttttggtttttcaaggagataactaataaagacattagtcaatcacttatgctttaaggccaaaaagaccacataaggttttttcttttggatgaattaattgttaattacaaacacagagaaatattaatcacataaatattcgccggcgtggaaagtttatggcggctcctctttttagcctttaactttccacttcaagttccaaagattgttacttaataataacctataacgtaatgaatcagaatactaatattcatcaaggtttcgtgttctttacccaaaattaggtagaacaagaaaccaaaagggttgtgttcacacaaattcaagatatatgaaacggaatcatggacaaaatccatggtagttttgacatcatggtgttgttagttatagtccaaatatataattaataatcttatgtgcaccaaaatggtgacagctaaagacttttccatgtagtgaaactccttaagcttttcaagatactaagagaaaggaaagcatttttatcaaatttaagcccgagtacgacatttacgcttatggaataaatgattcgagatttgaaaatgtaaagaggctatagagaaagtgagattgtatttgcggtcccctcaagtaaggccaatgaaagtgaagaaactgtctcataagatagctttgtcgtcgtttacaaatatcaaagtgtttgtttgggtctcaagaaaatgcggctacctaaaaagtttctctttaattatcactaatatttggtctttacaggtaaattaattatcactaacctgactcatcttccatgttaatcattttaaaagattcgaaaatcaagaaagagccttttgtaggaaaaacacttcagagttcagactaagttctcgacttgacatgtgtatgtgtcggataaagtttctcaagattattaaagaaaccaaaccagagtctagtgttagtttagtttaatcacagtttgttgttaatcaatcggcgtgcgtgactttttgactcttgtgcacaatcacatgaataaactctccataaggaagatcaaaaagatttgaatttagaatcaaataaggtctaatgactcatattgaacaagaaagataatagccgaagatatggtgctaagtcatttaactctgcacaaactctgaaacctattctggtttcataattcataaagagccaaatccaaagagttagtagagagatagagaagaagaataaacggaatataccaatattactatcttatgagagctttatggacatgaattttagctgatcaggcaggaagataaggctctgtacagagagagagcttcagtgagaagtattccgcttcttggtgaccggtgtaggatcttcttctgcatctgcttcttcccgtggcacgcctgtaatctgattgattatcttcatgaagtaatcaagctttttgtcatccccttccatttcatgatcattcatctctggctcatccattagcagctgcataaaaaccatttcaaagatttttctgaactctttttcaactccaaacaaacattttatcattaggaaattatcgaataaacaactcttacgtcttcaaggatagggtgaaatcttaagctagatgaaattggagagttgttagtcaaacattgcccaccaatatgtgtctgaggcaccattaggtgttcgatatgatcagcaggtatacattgttgaccattttgtacatgagtcaacggggcttcaacaagagcacatttcttgccagtttgtatcatagagtctctatgacagggagctaccatttgaggcattgatgatgtatgagcaggctgagaatcccacatcaactgatcaacacgcttcctcaatcttcttgcttttccctgtgcctcatcaatcttacacagaaactttgcaagtacatcatcagaacaatctaactcagaaattagactatcatcttcaatcgcatcttgcttccccgtagctttgcgacctgtaccaaaatcttaacataatattgatgattcagtactaaaactcccattttcaatcagacaatcaaaatcaaacaatctgtatatatcttacctgaatcaagatactgccctttaacatttaccggcacccgcttatctgataagaacaaaaagttatacaccattgttatccccaaaaagaagaaagttaaaagaagcaaagaaagctgcattgttgatataccagcataagagaaaaggttatggttagacatataagcagcaacatctgtagtctcttccactcgtttccttcttcctctcttaaaaacattcctcctttgattgttttcacgaaaaggaatcgatttgccatcaaagccttccaatttcgacttctccaaatcaaactgtttagtcaaatagtaatctttaacttctttctcataccctctagcttgagactgaatctccttaaccttaagctctatccacttacatctccacattataggcttagtcaatctcctccacctatcattcgtcttcttcttaggcaaacccaaaaactcagtcccatcatcacaagttccaggtaatggataatcattgcttaacatagattgtgcttcatcaccaaaaccaaaatcatcaccatcacgagcacacattgaatcaccaaaagaacttgaagaagaagctccacacaaaacctcttctctttcctcttcaaaatcatcatgccacttcaagatatcaactatatcctcttccacctcttgtgcatcctccactacattaacaccatctggttgttgatttgcagaacaatctgagatatccatttcagatcttggttttgctttaagcgccataaagtctcaaactttcttcagctataatcggaaaaaacaaagattagaccaaaaagctttcaactttaatgaaatctaaaacgattaagcagtgaaattgatcttactgatctcaaagcctataagagttgttcaaaatctataaccgagaaaaaaggaaagccagaaactttcggcgaaattgaagtgattcggtgaatcacagaaacaaaagatatttgatgatcaaaaacagttagcgtaaatccaaatttcttggagagtcttaaaccctaaacctcagaagaaagagaaagagagagaagaagatactcaccaactatttccgagagaccgccggttctcaaatccgatttactgaatccaaaagaatattttttttggaggtttttaatcccaaatttaatttggcaatattgtaaaatctgttaataaaattatattatttgtaataatgttttaaatatatatattttggtttttactcaaactaatttattcaatattctgtttaccatttttggtttctttagtttctttttctttttcttatttttaactttctgattttattttgggatatttttctcgattctcaaatgatatttctaacaatttttaccaacaggagcaattaatatatttctgcctaaaaagtagtaaatagttttttttctcttgttttggatttgaccaattcaaaaaattgtgtctatttatgatatttttactatttagtaatcgatactccttttgtcctaaattataggatattttagcttttgttttgttctacaatatactactcattttctgcttcaatacgacttaaatcttcatttgttgagtttttaacaccaccaatttagatatattaaataatcatgattaaaattaaattaaataaaacaaaaattatcatgtgatatacggttacttaataaaaattgtaaactatacccaatatataaatgttttataaaatcaataatttgtaaacttttacatataatatatagtcattaaatataaaaattacttatttaaaaaccaaaatcgtctcacgagttaaaatctggtttctattaaaagcacatagattaagatataataaatgttttctaatttgtaaaaatttttaccaatagaaaaaaatactacataattcaaaaagccatcaacaaactaaataaacataaattatacatataaatctgagtaaatcttatattatagaacaaaataaaaaccaaaatatcctataatttaggataaaggaagtaaaaataccataaatgaacacaattttttgaatatcatatgctttgggcagagagagtacaaaataacgatccacctaatttaacgccaaacattaaacagaaaaacaatatatttggagcatgtgtgattatcatatgtgattcagcaaatcacccaattatcatatgtgattttaatcccaaattaatttggcaatgttgttgtaaaacattattatgatttttgtttttattttatacatgtaaaaatctattaataaaattatcttatttgtaaaattgtttttaaatattttttctaaaatattttttttttgtttttactcaaacttatttattcaatattctgtttacctttttttggtttctttagtttctttttattcttcttcattttccccttatttttacctttttgattttagtttgggatattttctcgattctcaaatgatatttctaacaatttttggcaacaagagcaattgatatagttttgcctaaaaagtagtaaatagtttacgttttttctcttgttttaaatttgaccaaataaattatgttcatgtatggttcgacatatacgggttaactcttcattttattagtttttaacaccactagtttagatatatctaatgatcttgataagaaaaaattattaaaaaaaaattatcatgtgatataccgttacttaataactattgtaaactatacccaatatataaatatcttataaaatcaataatttataaccttttacatataatatatagccattaaatataaaaatcatttatttaaaaaccaaatcgtcccacaaatcgccggacgaattaaaatctagtttttattaaaagcacataaatgaaaaaataataaatgttttctaatttgtaaaaattcctaccaatagaatttgtttttgcagaattccaaaagtcatcaacaaactaaataaacataaattatgcatataaatctgagtaaatcttatattatggaacaaaagaaaagctaaaatatcctataatttaagactaaatagtaaaaatactataaatgaacacaatttttcaacgaaaagtcataaagaattaaaacaacttttcaaacataataaataaatcaaaatatatcttacaaaaattatgataaagatatctaactctcataattaaaatatttatgataaaaactcaatattttaaatggtgttatgttaaagaaagacaatgacatagacatagaaagaaaaaaagagagacaatgacacaatgctatataacgaactaatgcaactttatatgaaaaaagtatcacacaaaaataataataaatatacataattttctaagaaaagagaaaaataagtatagagttaaaaagacataaaagtttaaatagaaaaaattgtttgtaagagatacaattattggaacgaatattttgtgattaaaaaaaacacgaataaaacatggtgaagaataaaaactctatatgaacaaatataattttcatcagtgctcgtaaaaaaatttcataaacggcaaatgttgcaacggttagtaaaatataccaaagttgtaatagttcttgatatattctaaaggttgaagtggttcatcaaatataccaaatataatagtaataacaagcctaaacaaaaggattagtttcataaattaaaacgaaaagtaggcattatttactaaacaataaagatcattcagacagttgggattctgtttttttttttaataagaccaaacagctttgctttttcagttttgtgtatgaaaaaaaggagaaaataaaactaggtaccaaatcctttatataggttgaagttcttgctcagctactatagcttcatcaacaggcttgtatggaattgatgtttgtttccgtttccatatcaaccaagctccataagctgataacccgacgattacagcgatgattccaatcgcgatcacgacaatgttgttattcgtcctaaaaaacgaatggaaaagaattttctttttgagacaatggaatgataatcttttagctacggttgagaatgaatggcgattaccgttttcttggaggctcgagtttgtaattaaccagctgatagtttccgaagatttcaggaagctttatttgatgatttgtaaaccgagaaactatattctacaagaagcataatggaatatgtcatgtgagaagataaaatattgagcaatgtaaggagaagtcttttgtgtaatcattaccgttgctgtgacatttgaaaaccaagtagaaggttcaggtgggaggacaaccattctgacgagagactcgtttcctttggaggtgagattcgataaactgacctgtgacagacacattttcactcaatattggcgaaaatagtgcttaaggcttacaagttgttgtgtgtttatcagtttggctcacctgtgaagatttgacatcgagctccttggagaatatcttggagagatcttcaatccgaggtttcagataggacgagttgactgttagttgaatatcaaggtttatttgaccaacttgagtcacacctgaggaatcaagtaccacaaacatcaggagaaatagaaatagtttcttttttcagtttgtaatttccaagacgagagagtttgtcgtgctaacctgacagattgcttgatgaattgtgggagggatttgaatcatttgaaggcaaagtagcaggtggtggtgcaccatcaatatgaagcctatccgataactccgaacaattggttctccagaatccaaccttcgaattctcacgatcatacacaacaagtgtattacgaaccacaattcctgataatagtataagatcatttgttacaaatgaatctgttggcaagtaaaatgatatgcagtataataacaaatgaaggtagccataaaaagagaaaaatcaaacaaagtaatgatatctatttacctcctaaaagagttgtgtgatcttttccgtttgggaagacaccgagacagtaagcaccatgcaccttggaatgcttttattgatcaaaaagtaatcacatcagctactgatttgtggctaaaccaacaccagacacagagagacttataaatactgcatagagtgctagctatagagagaacatggaacttcataataggttaagggctacattacttactcgaaacatgtaattttcaggggacaacagccatgactgtccactcttaaataccatctcgaccgatgggaatatctttgaaagttccgagacataattacttcagcataaacaattataagagtcagttacttgccttgattataagttatgatatacaccacaagtttgcaagagataataaataccttgcagcgacttggaagcaagtatctttaaaatttggatcaggaccatcaatctgcttcaatgtggaaacttctctcattaccttcaatacaacaagataagagcctcatgtaagataagcaacagagaaacagggaacttaactaaacattaacaattctcagaacagttcttacagcttcctcaaatgccgcaaatgctgcgtctggaagataagcatatgttgtaccactgtctagtacggcgccatgttccccgtcaaagactctcgaatgaagagacaactgcttcccagcaacacgtatccccgtcaaatctatattgtaatatggactgtcgccatcccgaaactagagtaaatgtgtgaaaggtattaaacgtatttgttaggattatacaagatcccattcaccaatcagaaaaagccattcccttggaaacatacctacgatcagggtccgagtccgtaaacaccatatcagatggataatcaaaaccgccaagaatcatcgaaccaccaccaacatccatccctccataacacaaaccaaaagagttgcttatcaaacctttatccaccaattgatcaacaagactaagatctccttgacctaatccaataatcccatcagcacgttgactataaagatcaccggtttcaacagtttcacaaccgaaaacagctcgttgaggtgttagctggctttcattgccaaatgaaataagatcttctccaagaacacctttactactactatgttcagcatactctctctcgtaaacacattgttctctatcatcatcacaattacaatccatgttacacttaacaggttgataagtgctagacatttctggctgaaattttgggtcctgatcaataaccataagaaagtttcaaaatttgcaactttacacgagacaagacacaagatttggatatctagagccatcattacctggtgtttgccacattgttcacaatcagaacaaggaacataagtaacagtactaccagaatcaactataagagcaaacatttgtggtggtgtaccaatccaaagcctcgtagtgtaatacctacaaatacgatataatagtatataaaagagacatctttacatgacccagatcgggaaatatggaaaaggagattacccattaataagaagatcgtcgtagagtctcatgcgagagtgaggaagtgattttgagtcggatttgtggagttttcgatgtgggattgatatggatctcgaagaagaatttggttgagagaggaacaatgggaacaccatgggacgtcgtgatctagcggttggagattggtggaggaggttgttttcaccagctgtgattgaataaggaagagataaatagattaggagtgagaacgtcgcgccgattgatgagatcgacggcagtgccatttgatctccggttggatttttcgaccgtaccgtcggagaaaattggaggggaatcaaaagagctgagtgagtggagagaagaggggagactcgaacgtaactttagatctacgggaaccaaaagcagctttctttgagacaaaacccagttattgaaacgacgtagcttttgtgtttttaacgcatttttttaacctctactttttaacatcgctgtaccagtgtttatttatactgtagaatggttaaataacataaaaatcttcctacaatttatttgaaatctttggcatgttgtaagagattttactctatagtaattaaaaagtatgtattgttttgttgttgtcagtttttttatagatttaaaacgaaaaaaaaaaactgattttctagacaatgtatttattttttgtaagaatgtagaaagattgatctaatttttacgataatttctaaattgtcgaaaaataattatgttaacaaaaatccgatttgacagtaattaattttatataaaagtgaagtaatctaccaaacctatagaaaaggtttaattactatctatagactatagagtaaatctcttacaacaagcaaaagattttcaaataaaaggttcgaatgttttcaaatagatgttaaatctatacctttgttgattttgatactacatgttacaaggtctcactaatcatggttactgtatagctctatgaaaggattaacatgaaattcatctatacaatatgtaagaatgtagttatcctacattttgttgactaactcagtatgtctctttgtatgataatgtctcactaatcaaggttcaatttttagatttagacttgttatagattttggttatgaatcaccaaaacaagtaacaaatatttgagatttaagattattccatagaaattttaattcctctgtacattttgtttttgtttttaattttaccataaaccccaaaaatgaatgctcttgaaaatccccaatcgattcaagttttaaccctaaaccaaaactactcaaccttaggtgttattactccacaatccctaaaaccaccattgccgccggattcgtataaacctccgacgacgaatccaccacttgttttctgcatttccgccatgtaactcctcacttcagcttttatcatctcctgcaccaccgtcataaactcacctctacgtccttctcctctctcctctacattaatcttcatctgactctcaaatctcggaaacatcaacgcgttgttgttattgttatggctcgaactcgtgttctcagctccaggtagtgacaaactcaacgaagtaggtggatcctccgaagacgaagacatttcaaccggtaacggctgcggaaccaccgtaaaaccgccggaaatcggcattggtttaaacagctgagcaacaggagacgacggtgacggaatcgtgctagaatcactaacatcgattccgttaggactctcaggactcatgtacaatccagtatccaccggagcaaaagcagaatcaaagctaacagatctcctcttcttcggccgatcctgatcttcctccgtctccgtcaccgtcgtaaccgccacacctccgctgcatttcctcttaagcgtagagttccagtgatttttaacggcgttatccgtacgaccgttaagaagacgagcaatcgtcgcccacttgttaccaaactgagcacgggcggttacaatagtctcatcttcctccggcgagaaaggacgatgctcaacctccggagataactgattacaccaacgtaatctacacgatttaccagatcgacctggaatcgatttgctaatcgcagaccaattcctcggtccgtatttctcaaccatccttcgtagctgctcatcttcttcttgactccatggacctttaacacgatccgccattgaaacagatcttttgtttgtttgttgtagagaagaagaagaagaagaagaaggtggaggaaactgaagagaggagaaaaaaggtatttataacagagagagagatagagaggaggatggataataaccggtaaccggtagagacggtggagaaagtcatgcaccgcttcttccacgcaagcggttttgaaagttttgggatacagctgtaggtgtacacgtgtcgtgatctcggtgcgtctgtttattagtttatggagcgtgtgatacagtcgaaagagagaaaggggaagcacgcgcgcgtgagaagagagtgggaaaagaagggaagttaaagcgacaaaatcacggaaacctacaaggaaagagctctgatattattcgcacaatctgaggtgaaaaattagaaagctgttttgaatgtttatttgaaaaataataataatatctgagacgataacggttaggtttggcagtttgggtaaagacagttttttatgcagatttctgacttttttgactggacacgccagcctgtattccttgttatgcaaatttacccttttctctgaaacttttttccttttattttattttgtagaatacaaaacgactaatttgaatttttttttgaagttacataaggtttaaagtttatgggtcgggaaatattggaggataaaatttgatcacagtgttctaaaaatatttttgtttaatttaaatgttatttttgttattgtattgtattattttcaaattggatgatatatttaaacaataaaaataaaactgaaatttttgaaaatataaatgtgtagaaaatataaaacgacattagactgacacaaaaattaaaatgcaaaacgacatctaatttgaaacggaaaacgtattagatgtttttataaaatatgttttgattcgttgaacttgaaacgatattcgtaacgcttttgaccaataaagtttatacataaaatctgcatagaatataaaacgacgtttaatatgacacaaaaattaatatgcaaaacgacatttaatttgaaacgagaaaagtattagctacttttaaaaaagtattttgattcgttgaatttgaaactatacttgtaacggttatgctacgttttaattattcatagatttctttttttttttttctcgagaatacaatacacataatttaaaatttgtatatttttaaattttaaagtaattgcaagtatagagctggcactcttgaaagtaaaattttgattacacatttttaaaaaaaaacattaactaatttatgactggttaaacagtaattgtaacagttttgagcgatgaaattaatattttttacttccttttggtttatctttctaactgaaaaaggttcaaactgcctagtgctacaaatttgggataaaaatatttgtatcgtttatagaaatgtggttcagttttgtatggtttttttgtctgtgactatttgttaatggtacgtttttgaatgccccaaatcaaagtcatatagtatttacacaatacgggaaactacatttatatgattagatacgattaatattctgtttcataaacttgttacaaagaaacggccacacaagataaaagtaagtggtcggaaaaataaaaataaaatttgctgacatggacaacacgacaaaagagtgttaggccaattggaatgtgaatgaaatcatatttatttataatatatagtttttgattgacgaaaatccaggctgtaatcctcaacaaacaactaactgtcgtccattaagcaaactgccacgtgtcaaatttttggaactgtttttgaaattgtgtgtaactgtctcttacgttagtaacgcactaaacgtcatttgcaccttcttcccaaccttcatcgaacggtttcacaacttattttttaatttatctttttccgtattttatgtcgaattagttacatactaattagtcaaattataaacggattaccgaaactatttcagttttgatgttgttggttttcagtttactgaccaaactttcccttaattgttatttctttcatactaataatacattctagtgacgaaactaatattatatgctgtaattttgggtctgtagagattacgggtttcggcccaaaacctcctaatattttaaaaaaataaaaaaaaataataataataatacacttagtcttggttataaaagttaacaatatgtttacttttattatgtgttccacattctaacatgtcatatttaaatgatggttttcttggtgtatttctaatcgaaaacttatcctatttaggttatattatatgggttgaattagactataatatataccatgttaagttttattggtttgtaaactaaattgaggatttgtaaattgtttcgtgttactttttttttttgtcgtaaattgtttcgtgttacttaaacattgtttagatctatttcatttcggatccaacattttattttgggtcaatgtataattgacacgtacttttgctgtacacttagctagattttgaaagatgcacgtgaacatttggtgaacacatatacctgagagacggtgcacgatgtagaatataattccaacaatgtgtgtcttagaaacattgtaattaaaatattggtaataggttgttgtcaaaaggaacaagacggtgcacgatgtgtgaatatataaatcaaagtatatcatttgctgtttgttgttaattagggtccatgcttcgattgtcgggtttgttctcctaatttttaaattcatttttgtaaggtttgcctaacagaaaaactcgttcgatatatctaaacaacgataagctttaaataacataaagatcataatactaacacacggtggtagattagtcggtgtaagaggcggaaaaacaaatatatgttgactgagttcattgtatcattcgagactttcgagttatttaccatttagtggaattttatttacaggaatgaaaattgttatcttgtcccaaaaatattcgtatgaatatgttctctacacatatacaaataataagtaacatttaggataaactgtattcgtatttattaagatattcatgttgttgccgttagtcatattgagtgttagttgttccatttagccgagctctcttggtagcaagggttcgataccattctcttccaatgtggttaaatgtgtaattgtataaagttaattcatttttgttacttctatttagaaaatagatatagaattgttattcataactcaccgtagacaaactaaaaatttagaaagccaaattggaatattcaaattttagcattttaatattcatttggttgaggaggaagagccaccaaccaaaccattgagtctgatcatcttgatattattgtaatttatgtttgtttaatatgatctttttaatttcatttaaattaatattattgtttattataattaatgaaaatctaagaaacaaaaaaactttgtcttcttcgtttattcatcgttcgactatgaaaacaaaacatatccaaaaaatcaattgcgagattgattgaaaaaacaaaaatcaacaaaaatatatataaataaattatatcatatgaatttatattcaacaaaattaattacttcgtcattttttatagtggtgcaaacaaaaaaactagtttggaggtttaaagaattagtaaaattactttgatggtttataaatgttagtaaaagaaattcgaggtgtaccaatgacactttgaaggttaaaaatgtgatttcttctttttaaaatctcttaaagaactatgatcttaaaaaaaaaacttatggttgtatgaatgtatttcttattttacaatgatttttaacataatacatatatttatttgtggttactaaagtacaaattttgttttgttatgacatcatacatcataataatgtgcaagttaaatatgaaaaaaaaaaaagagttatacatgactaaatgtctcatctttttgttatttttcatagtttgttgattcttttgttaatatctaaactttacgtagcaaataaaaaaccacaaaattcttttgacaaagttcagtagattgaaaggcaaatacatagaagatacatgaaatgacaaaagtatccatcatcctttcacttttgaccgacgacctgcattaaacggcttcactttgaaaatttttagccgcttattcgccaactaaaagacttgtccgtactgtcaacaacacatgtaggaagtaggatctttcatgtgaaacacccacgtgtatactacttgcatgcacgtgtgcttctaaacccgtcagacatcagtaaaaatttatactaaatgggccgtatcaatcttcatttgttaactttggcccaaaacggctcaacaaatagtaaatacgtcatcatctagtgatgccatcttcaattctcaagaaaccaacgcttatagttacttattttcattgttgtttcttatgcattatggtgatgtatgttttcagaaattctagctacaaaactgcgaatagcgaattgttgtttttttggggtcagtttaagttgatccaacttaagcttatcatcattttgagattctgagtgctattttatttcaaacattatggaacttcatatgatacttagttaatgtttacatgcttgattgaagatttaggatctaatacgtcaacgatgatttgacttttcaaaaattttgagactttgagattttctactgtaagactctgtttgtttagtcgtctcatatgtgtctagtaatgaatattggaaaatatcaaatgttggattttcaatggactcatcacaatcagaaatgatgatgaaaactttggtgtgaaacctctgacttgttacatgaactaatgaacaaatttgtaaaattgttatattagagtatcctaaaaaatatcgttctgaagcgactaagagcatgattataggtgatactcataaagtatcactaaaaaatgtttagtattatttataatgtttgtttaatagatatatatatatattttttttgtttttggtaaatctgagcaatcagaagatggcacgtcagatgatactagtatcacaaatatcactggactgatactcatcaacctcattccaattgttttgtcaatataaaaataatttttgcacttgtgatacttaaaaaatatcacctatgtacatggtctaataatcttaattaggtcttaatgatacactggtaaactccatttgcatatgtttgccttaggggaacgattgactcttcaacatttatgatttatgtctttagaattcataatttctgttttctttttgttctatttttttcttgaaagtattaatgtgagtttcacacaagatctctgagatgacagaacaaaagtttatgagtggtttggttttggtacattcactcaagttcaaccaaaacaatctaattttattttctttatatcttttttctgttgaatctcttcaatgctatttggtcctgtgtgataacaagactcttcatggaaggtatatttatttaatgttatgacatgacatagcaatggcaagaagtagataaagtgatatgtgtacgtaatgttatgtgtatatcccaacctgttttgcttttcaccacaactgaattgaacacaagtacttggaccaacccaagtgttggtctctctgcatttcctctcaaatcaaacctcccaaaaatagaacaaaatttattagaacattttttaaaaataaaacttaaaactttggaggagtagctaacaaactctctagttgtccaacactattggtcatccaactaactcaatcgttgtctcttcaattcaaacttcaaaggacaaatttccacatacctgtactaagtactaaacaatcatgtatgtgatgttttagaccaatgccaatagtgtaatggtaatgtttgtgtataatctttgactgttatctttctacttgcaaaatgcagaggttgtgagacgaaattagatcatcatcaagccatgaaaaaggtaagatccagcggaaacttttaatgtaaaagaactttgtttttagaatatcaaataacgaaacgtacaccatttgcaaccgtccataaacacaagaaccgagaaccatatagccgataatatgtaaaacatggaaacagattttaggtaactaaaccgacacattttgatgggttgttgacattattagcgaggactactactaagcacatcgaaaaacattcggtttattgaagatagcctcatctgctgctcttgcactcttctcctcttgagcaaaggctctgaagatggtgaagacgacactgaagcagaagcagacacaacccacgactcattcgagctatcagaactgaatgacgcatcaaacacaccgatcggactagcgggttgttgcatccaattcatcatccttttcttgcttggactgtggtctaacactaactcatagcatttatttaccttctcctgtttcaagtataatgatgataaaatcagttctagatccttaaaccttacactaatcacattggcatttattgatcaaagacaccgtaaccacataccgaatcaactttgagtagagtcatgagctgagattggtatacagcttcgtcacacatcttcaaatctctaataacagagaccattattgcagtggctaacacagaaggactaaaactcagaaatctcgaatctgaaaagaaaccaagaacagaaaatttagcatccacaacaaaatcaagtagattcaagagatctaaacctaatggtaaacattaccaggaataatggagagtaataaagattcacatctactcaagaactccaattgatgatgagatttaaagctgtatcgtcgaataatgtgatcgaaaaacgagattggagtcacaggatgcatcctccagtcaagagtagacagaacaagaagctccattctctgtatagtcttagcttcaaagacatatcttgcttcttccaccttacaaaaagaccaaacacaagtctcaaaaatctgcaatttcacaaaattgaatctgagaaaaagtgagaaacttacttgaaaatctaagagaaaaggaacacggatctcttcaaccttagcagctaaagacagacaagccaaagcagtaagctgagacatccatggcttatctgtctgaaacttcctgcttgtaataaacctatcgaagtaattaacagctaaaagagccgtcaatgaattaaacccataatgagatttcactttaaaaatccaatcaagagccttttcacgacacaaaaccagaaactcatcatctaagatttcgtcataaagacacggttcttgtttcgaaatcaaagttgataactcatcatcatcccacaacatatcatgatcagacaaacccagatttaaaaaaggaaacttttcaacactctcgtcgcacaaatctacttgttcgtgaaactcactctcttcctcacagaaaagaccatcaagaacacaaaacggtgcgttttgactctcttcctcctcttctaaagccatgatttttctcttccgagaagaagatgattgctaattcctttgttcattctgccattagagactctctggattcttcactctgtgtgagatagaaagagagataaaagaagtgaagacaaatgccaaagaaagtgaagggttttatttcacgcttgtcctcttttttttttctttttttttattaaaagattttatgttttttttttaattttatttttattttctctctctgcttttattttgtcttttaatattcggatgtttggcgcgcgagaaaattaatgaaaccgtacttcttctttgttttattcacagaaatggaaaaatcttttcttttgtaattaatttcctatctccataaattaattataaattgaaatcataactatgaattaattaaaatctttagttttaaaaacatacgtactatttacaaaaaagcttatactcacgtgcttattgaatgtgtagttacacgcttttgatccctgttcgttggatgcgagtaaagatactctctgttagagcgtgtgattcacgcgcttatgaggtggtggtggaagtttcagtggtggataaatgcgttgaccattaattatatttgtcacctttcggtttcaagcatcgatgattacaagtgaaaagatttttttttttttttttttttcgtcattagtactttgattttggttaatacaacataattttacataaactctgaaaatatcgtaatgtgtagagtcactgtcattgtgtttttattcgatttaaagatttattaatcgtaatttattagtagcaaatttttcacttttttttttggtgaattaatttatgatatacggaaaaagaagattcaaattgatatatataatcatataaaatcacccgtggggtcatatatgtcagaggaaaatccacgtggacgaatgggaagctttatatggtcaacgagctgacataaacattagaaaaaacaaaaacataattaactaggaaaaaaggacctcgttctgttaaaacgcttgcgctttattagtaaactacgttacttaatttttctttatgtaacctataaagttaatttttaaatataatagcttgatcttgatgagcatttcaagtttaattctcactgctttatatgctaaaaaatctaaagactgaggacccaaaaaagccgattaaaatgtaaatgtattcgatgtactcgtaacaaaagttgtaccaaactttaacgttcaagatacataaatgcaacttatacatataactgagtctatttataatagttgtggaacaaacattatagttagtagtacaaaacataatgtataataaattaagcttctgtttaaatatttagtactcaatagtaaactgaaagataatttcatattttacatctatagtagtaaaagtgttattataagcagagtgaatgatcctgttgtcacgtttactgcgttcctatcgacctagacgcggttaacaaagcaacaattgttacttttttttaacacatagtatatatattgatgatctttatcgattgtgaaagaaagcaatgtgtggtaaaaaaaaattgaaaaaatgaaaaagcaaaagacaaataaataaggaatggggaaaagttaatcacgagaggaagaggccattggtaacaagcgggagagtctgagatttgtacaaagtttaatagcgacttctcatttcttacacatttcatactatcttttaaaaagataaaaaagaaaaacaaagaaattccttatcatatcgctttaaaatgttgtctgttcatagtctttttaaaaaatattccatttgttctattatgttttttttgttgatgtgtaatggccaaataggtctacaatatgttccattagattggtaattttgcgattttatacattgttacgataccatttttcagtttttaccattaatacaatagtaatataaaattatataaaaacttcttatattaaacatgtatatatatatatattatagaacttaaactttcaattgttttactcttaaattttggaacaagtttttatataacaaaaagagagtaaaaggaaaggagtataattagagataatgaaataaaggttgtaatctagaggagacaagagttatttataataatggtccaagaatccggacggtaaccttttatttaatgggtcaagaagctagaagataagaagtgagagggtattgttgtttaaatgacaaataataaaaaccaagatgaagttgattagattaataagaggatgtgtgtgtaagtgttgtgttgtgaattgattagatcgaagaaggtttttgggtcataattaataatggcgtcttgtctgccagagaccaacgccgtacgctaactttcgatctcctactctaacctcttgtttctttaattctaccactaatactataagatataagtgtacacataatatttcatttataataaacttatttgatgttaggtgtcacccatttgctgttaaatgtattgcctagctttgctcctattccccttatagtgttttgtgcattttcctttttttaaaatacataagaagtcccatgagtttttggtctacctgttcataacatgtaagactatatggagtggcacctaatatagtccatacagtgaataacttagttcatactgggtcaaaggacataacatggtaacttagtcttgttcatacggtcttacttcatactttcataggttcatatatagttgaaagttcatactcctgtacaataaaagtaaaactaagagcatctttattgggagtatctcaatgagatacccaacaaaaaaaaaaaattagaaaaaaaaaaagtaagagagaagaaagaaaaagtaaaagagaaggagaattgagttcctcgtaggaaaaactttgaaaaactattctcatctaaattggacagctgtcatcgtattattagttcaagtattaaataacaattaatatatctgttttgactaaaatttttttttttttttttttagaaacttttcttacttttatagatgctctaatacattcacttcttgttcattaagtgatttttgtttggtgcaagtcaatatagtatgttttcatgaaattgtgttagcatattgtttatttatatatatggtttagaaatcgaattagatcggttaaatatgatttgaaaaaaaaaaaatcggtttagtctaaatggaaaagttgatttatttggtgtagtgtctttttttttgtgtgtaaccaattggaatataataatagtaggtagtagtaaatagtaacttactatcttgtgaaatggtaaaattgcacatgaattccgtaatagattaaataccaatcatgtcaatttgcaattgtgttagaaaactgcttaccactcacatgttcacaatttctttacataaaataaaagatagagtaatgtttatacattccaaaatgtgtaagataatatttttgcattttacattttcagaacacaacataatttgcattatctaattaattttgcattttacatgtaaagataacaaacaataaaacaaatttgcgtttcgtaattttgttcactaaaatattatatttttgatcaaatgtatagtggcgagtatttttcagtctctttgatgaattcatatttctagaaaaatggtttagtgatgctggttcaatttggatagttagcaactaagcatgatgataaaatgttaggtaagaggtaacattatatacctttactccaatccaaataaatttgttagagatattcataattttccatcattttggtacgttctcattattacacaatctaacatcattaccaccaacctaattactggcaccagttcataataatgcatacagtattaagacaccaatatacaaatgactacgtgtgtcagaattcctttgaatctctacttagttttttgagtcaaccccaacaagttagccgtttatagcactcatcactgttcttgctataattttcggttggaaaagaagagacaagcaaaagaacatataaatataagtatatcccttatatttgtaatgattttaatttgttaacgaaattttgcagttctatagtcatttaactggagtatctacaaaaataagaatacaaaacacatttgtagagaattgaaacatgcgtttttttattttaccacaaattaaacatttatttacattttcagaaaatagaattaaatggtaaaagtgaaaacaggctgttgatggggccatggctttatttttaaatgttgatattctatacaaaattacatatgacaataaaagaattgatcaaattgtaactccacgacagaggcacagctgaagcctgaagcatgggtgaatttctaaagcaaccaaaaattaaattcaaattgaaactgtagttacttacagctgcctggcatttgttttctcaaaaaagtactaacattttacaacaaatagaaaatagagatttgttccaaaaaaaaaaaaagacttgttccaaaaaattaaaaatttaaaacattttctgttataattaaaattttaatggtcaatatttttttggtaaacttttttttcttccataacttgtttttatcgaatctttgaattctaaaattttgtatgcaaaagaaatatattttggtgacatgtgctggtttgctttcagagttttcgaaaggcgatatagttctaaacatcagggtgaccagtgtaaccaggcagagtatcgaacttccgatagagtgtaacttggtcactaactccaaccatttttcaaccgtatcgaaacagtttcttgacaaaatgaggccatgtgatttgtaaaagcgtaacctatgtctatccactccaaaatactcatccattttaacgtcaatgttctgtttttaacttaatgatagtggagtctttgttgtaaaaaaaggtcaatgttcataaatggatataaatgtaatcgttttcaaaacatggtcaattttttttttaaatacttttcaccgttagtctcaattttattaaaaaaaacacgtaaaaccagaaacaatcggattaaaaagttcttcaataactttaaagaacatcaaatatttgaaaaccaagtcgaaattttttaccctctttcaagtcaaatactctagcagaggaggagtcttgcaaaaaaaaaaacccatagctattcatatatccacatttgatttgatctccactaacattgtagagtagatctctctttctttcttctagattcgtatatcattttattttattttggtagttgaaatgtatattatgtgagatctagctatttgaaaaaaaaaaatctttcaaaaatcatgttactgtattatctaaagttatcaactatgctttttaatagtattaatagtattagttttactttggatggctcaagaatctaagcgagatgtggagagatggattcaactttcaagttcaaccatatagtgcagtgtattccagcaaaacccacccaatttcccaaaagtgttcacaaatgttcttaccacaaatactactccatatttttctctttgcttccccatttatgaaactcactttatagttatcccataataaattagtcatgtgttgctcttagtgttctcaataatgtagtacttgcatccgaaaccaaaactattggaagtttagaagtagaacatagaacttagaagaagccaaaaaaaccaatggttttgtcaattatcaaattaatatcattattgggcctttatggcccattagtgaatattccggtacattaatactgagcactacaatggaagaaaatgaccatggctatgttgaaggtcaaactcaaggaaagcaacgaattagtggaataaagcccattgggccaaacgtatgagaaaaaatggtggcctcgaaggtgagagttgttgactacagtccgcagaaaaaacattaaaaacgaaagatactgaaaaaaaaaaaaaaactcacgagtcgtgtgtgactcggtgactcgcgactcaaccgaaccttacccaatactcaaccacacaacaatgggccaagctccgtcgtctccggcggaaccaaacgtacgcgatacttctttatgtctatggtcaccggaatttctcgattgcgaatcgattggtttcgaagacggagattacgatttcacggcaaatctaccagacgattgcctcgctcatatctttcaatttctcagtgccggagatcggaaacgatgctctcttgtatccaaacggtggctattagtcgacggacagaatcgtcaccgtttatcacttgacgctaaatctgagattctccctttcttaccatgtatcttcaatcgattcgattccgtaacaaagctcgctcttcgttgtgatcggagatcttttagcttaagcgatgaagctttattcatagtctcgattcgttgctcgaatctgattcgagtcaagcttcgtggttgtcgagagataacagatctaggtatggaatcgttcgctagaaactgtaagagcttgaggaaattatcatgtggctcttgtactttcggtgcgaagggaataaacgcgatgcttgagcattgtaaggttcttgaggagttatctctgaagagaatcagaggacttcatgaattggctgagccaataaagctgagtttgtctgcttcacttagatctgtgtttttgaaggagcttgttaatggtcaggtgtttggatctttggttgctactagaactttgaagaaagttaaaatcattcgttgtttaggtaattgggatagagtttttgaaatgaatggaaatgggaatagttctttaactgagattcgtctagagaggcttcaagtgactgatattggactgtttggtatatctaaatgttcgaatttagagactttgcatatagtgaaaactcctgattgctcgaatttaggtttagctagtgttgttgagagatgtaagttactgagaaagcttcatattgatggttggagggttaagaggattggtgatcaaggtttgatgtctgtagctaagcactgtttgaatttgcaagagcttgtacttatcggtgttgatgcgacgtatatgagcttgtctgctattgcttcaaactgtaagaagcttgaacggttagctctttgtgggagtggtacgattggggatgcggagattggttgtatcgcggagaaatgtgtgacgttgaggaaattctgtatcaagggatgtttgatttcagatgtaggggtccaggcgttggctttaggctgtcctaagttggtgaaactgaaggtgaagaaatgtagtttggttacaggtgaagttagggaatggttgcgtgaacggaggatgacattggtggtgagtatggatgatgatgaaaccaatggtgtgggtttggtggatggtggtgatcagagagttcttgagacggttgttgaggaggaggctccgccagtgattgatggtgatggtggtttgggagttgcaggtggtggtaggctagggttagctatcttgaagacaaagttagggttacttgcaggaaggaacttggtggcttgcacgttgagaagatggtctcaaagtgaagctactagttccatttgattgcacttttttttttaaacaagggtctttgactcgttgtgcattcagaacaaaacccacttctgtattattatttcttgtttgtttattttatcttcacaattcattttcaaaatatttcatggcataagattattactattactaacttttattttattaatatttcatgtaatcataaaatagttgatctttaaatttgtatagtgaaatggaaaaacttagtaagtagtaataatagttgatctctaattctttttcttataacaataaattcttagaattaagctttaaaaaccaagaccttgatcattcaatttcaagttaaggaacgcacactactcaaaatattgaaaagtgttatttttatttttccacaatactgctaattatgtagtacattttgttatcgtgaaactaaaaagcaatatatatatataaatgtttaaattctgatatttattatgtctaggtaatacaaaccaaaatggttgaccgaccaaaatacaagttcgttttgtttttctaaaattttttttattttattttttggaaatcgcagcataattgacaattgatgttcatacttttagaaaaagaagacttgatatatttgtttactaaaagatctccaaaatattctctgataacaaaattatatatgctgataacttgttactttcttataaaatgtcacattactatcatttttacatagtataagaaaacatatgtgatttgttactgctgcgtctgtatcaaccttatttttagaaaacaaatagtatatgatttacgatatttatctcttctttttttggttaaaggatgtttcttatcaaaccgtgctgtttcccaattttcattgaaaatcaaaattcacacatttacattcttaaattaatttacatacacttcagtgaggtcaacaatgaacaattaagtggagtattcaaacagtttcgaagccaccaaactctatatatatcaacatcatcacgtaaagttcctatagaatcttaaaacacatacacttgaaaaagccaactcaaaaaaaaaaaaattgattggtcccatggattatttgcaagtaagtgaagatatgttacacaatgtcacttataactttattgtagtgattaatgagttttggttatttttatttttttgtttttttatgctaaggctatgcgtctccgcgaagccaatcgtctcatgattgcaaagttcaagaaagaatctccggctaatgactctcctgaacaggtgtgttggaaatctatcaaaacatgtttttgaggaatatgtttgtataatttgtaccgtaatatgtttgaaaatgttgttggttgtacagaggctagttcgattgaccaatgagaatccgcaatacaatgtcgactttttgtttcattcatactccaaggtttcttaaacaatagtcttttgatgtttaatagtatatccaagttttgtatatttcatgcgcttttttttaagacttcttaaattgctaaacaggactggtttgtatccgatgttggaatgaaaatgtcaaatgtgatgattccaaaccaaatgctagctcttgactgtgaaatggttctatgtgaagatgggacagagggtgtggttagagttggcgctgttgaccgcaatttaaaggtattgcgtatagatactttgagattttgaatcttgatttctttattggtgtcttttattggatccttgatgactcgggtgatcaaatttttatgtctttaggtgatccttgacgaatttgtgaaaccacacaaacctgtggtcgactataggacagctattactggagttactgctgaagatgtccaaaaagccactctctctctggtggatattcaggtaaatctatatatagaatcttcttctttattttattatttcaagagacaacacttcaagatgttatgtttattgtgcaggaaaaattgaggccgtttctttctgctggtgcaattttggtaggtcacagtttgaaccatgacttggataggtaaataaaacttttctagtagagtccttgttaattttaatttggaattttgtctaaaatcatgagtattttgttaccagtgttgaagatagatcatcccatagtgattgatacttcactagtatttaagtatcctaattcacgaaagctaagaagaccttctcttaataccctttgcatggtaagtctatatctactcttgaggtattcacataaaaatgttaacattcttaatatatactttctaaaaataaataaatttccagtctgtgttgggatacgaagtccaaaaggccggtgtttctcatcactgcgtacacgatgcagccgctgcgatgaaacttgcacttgctgttataaagaaaagagttgacacaacaatcacattaactaaagaggtgacaacaaatatttacctagctaacttgtttatgataaattacaattacaatgtttacaagttttttgaatagatggtggaggccgagaaatcaagactctttctacatcgaatccctcaccatctgtcatctgaagagctgaagaaagatcttgctctaaagttttttcccaaaaactttacaattgatgttaaggttgagtttaaaccatatatctatttcttttctctaaatcttaactttttttttttgatatacggtttttttttttttggcagccagcaaaaacacagggaggttattattgtgcagttgttatctttggaagctcagtagaagcaaatcaagcatttgagaacgttaatggatacaaagagacggtattatagaatcttttgatttgttttgaaatggtccaataataattaaaagtgatgaaataacttttttttttttttttttttttgtgtttggttttcaggattcatcggggctgccacagaaactcatttcttgttcaatatctacattttatgtccgttaaatggcttaagatgggtgggtttggttgaaggcttgaaatcttcttttaaatttgctttttaataatgttggcatttctgaatctgtttaaacattgattaataaatctaagctaagtttttttttttctatccttaatttttggtattttgtttgacatttgtttttgatacaaatcattggcaaaatatacacaattacagtattagaacacaaatcgaataaaaaaaatctttgtgaacatcatcatttaaatgtaattgaaacagagtcaataaaggttctctcaatagaggtagcaaacagagtcaactatgctataagaagttgttgcgttatgttttgcttttctgcaggattcatttgggctgtcacagaaacacattgtcttttggcgtctaagttatgaagtttatttttaagtccataaaatggtttacgatgatgatgtaacctcttttttttccatggatctatattttcaaattctatgtttgtaacctaaactgttttaattatctataaaatatttacaatttagcgaaagaaaaaaatgacgatggaacctcagatcaggtttaatacaacaatatgactaaaattaaatttctatttccactacatttttattcgctccaatccatctccctttctaacttagagatcttaatattttttcttcatatttggagatttcttttttcaaatttacactaaaatttgaaatctccagtttgttgggaaaaaactcaactccataactccatattgaaaataaaaaatgtttatgaagaaatgggagagatgttctaagcaaattttaaataattcctcttaaaataatggtaaagatgttactacattgaagtcaaagatgtcacaatttaagcatacaatatagttaaaattatatataaaaaaacccctaagaataaaatataatccagttaattatatattttgagaatataaccctaaactctgtttcttcttccccaaacagtttatgccaaattcactcccagctaataaaataaaatagaaaaactcgttgagccgccattgtttccgtactatggagcttaaactagccaccgccgagaaacaagttcgtctctttctttctttctttctttctttaatttctcagggcaaaattcccacttttgtggagtcgaattagcttctctgtaactaaccattccgttaaaataggtgcttgacgagttggtgaagctattgcagagtcgagatttgcgtggcgaaaatggaaactggaaggaatttttacatgtttacgacaaaaatgctgattcaccaagtgatccttcgaggcgttctcatgaagatttggttcagtttctgacaacttttaagaagaaagaagatttgcaagtaagtgaaactgaagaaatacacaatgtgattgtaatctttggccactaaagttttgttcttttttgctgctaagcttctgaaatgtcacgccaatcatcttctgattgaaaatttgaagcaagaatcccaagatgaagacactcctgagcaggtgggagatgcttttgttatatctcgttctttgataggaatatgtttgcagtgaggtttaagatgttgttgtttggcaatacagatgctagttagattgacagttgagcatccgagttactcgttagactattctttcaagccatactcagaggttttgtttccttctcctaaacaatgagttcttgttacgtgttttatgcggttgtttaagagttgttgaattgcttaagcaggactggtttgtatccgatgttggaatgaagatgaaaaaggtgatggaatcaactaacatggtagctgttgattgtgagatggttctttgtgaagatgggactgagggtttagttagagttggtgttgtagaccgtgatttaaaggtatagcttagagagaatctttatgctttagtgattcgtcttttcgcaatggacctgctttcttgacgagggttatcaaatgttgaatggctttaggtgattcttgacgagtttgtgaaaccgaacaaacctgttgttgactataggacagacattacagggattactgctgaagatatcgaaaatgctagtctctctgtggtagatatacaggtaccatgtagagtctttctattggttttatcttcacagcagaaacgtatagttgttatgttgttaactttgtgaaaaatgtgcaggaaactttgcagccctttctttctacgggtacgattttggttggtcacagtttaaacagagatttggaaggtaagcataaagtttccagtagaggattttgtaattgtaagtttttcgctaacaagtttatggttattttcatattttgatgccagtgttaaagatagatcatcctaaagtaatcgataccgcacttgtattcaagtatccgaatacacgaaagctcagaagaccttcacttaacaacctttgcaaggtaagtctattacgtgtttctctactcttgagatgaacatcacaaaaagataacattttcaatactttttttcatttgttgaaatggttttcccagtctattttgggttacgaagtccgaaagaccggtgttcctcatgattgtgtacatgacgcatcagctgcgatgaaacttgcacttgctgttgtagagaaaagagttgacacaacaatcaaaccatctaaagaggtttgaaattaccaaacatgcagttttatcataaattccaacaataacaaatgtctgcatttttaccatagatgttggaggttgagaaagcaaaactctttctacataaaatccctaacaatgtgccatctgaagagcttgagcaagttctttctggaaagtttacacttgatgtgaaggttgagaaatcaaaaccatgtactttctctaagtctctcgaacatagaacctttctctgacctcagctatttttcttttggcagcaagcaaaaacacagggacgttactattgtgcatttgctcttttccatagttcagaagacgcagatcaagcatttgaacacattgatggaatcgaaatgacggtataattttagtatctctgcttttggatccgcaactatcttgatcgatagtgaaataagtttgtgtgttatgtttttttttttaggattcattgggtttgccacaaaaagtggtcatcattaagctgagttcaggatcaagagctagtatatatgtccgtaaaatggttcaagatgaatgatgcaacctaggattagattaactattcaatgaattgttttttcagatatttgaacaatcaatggcaaaattcaatgactagtttttttttttataatttgcaattgtttcttttataatgggaaacagagacaatatacttgtgtgtgtatgataagtgtgataaaatctgagtcttcatgatcagtcgctttcatagtcttcttcctcatctccaaaggagaagaccgatgcatctgcagcaatagctttgatatcactaactgctaatgagttgtttggtattggattataatgacccgaggacgatgaacttgtgacacttctgtttgcggaagggtcatctctctttggtggctcattgatctgatgaggtttactagttgtgtgcattgagcttgcggttttctcgttagttgaataagactgagagtttccttcctcttccccatcactgtcagagaatacatcgtcgtctttctcattagacttaagtttgctggaatcagcactggagctgctttgagattgttgttgggtggaatcagatttggactttgttggttgtgaattgtcgggttctatcattacgatctcgacatggaaacccggtgcaggcagttttctctgcaaaaaccgccagggatgaagcaaccaggtttgtttcttagatcttataaggctatgaaaatttcttttaccttgtcaaagccatcaaagtcactgcctttcagcattgttctgttatcagtcagtgtagtatttagccaactgcgtgcagaaaacagtaaaagttagtgaatttgtcgatttggaagatgtctgtgaaggaagaagagagtttaccagtagaaatctccatcgctatcttgaaagtggattttgaagtcgccggctaattctgttagaccagcttcaccaggtattgcaaagacaaccactccctttttgggtgcctttatccaaaaatcttcaggctataacccacaaacacaagtttatacgtcaagacgagttgcggttataacaccagatgaaagagagagagagagagaagaaccaaggagaacaatgcctacccccaaatccttggttttctgatgtttctttgttgagaaaagtatatctgttcaatagaagaaaatgagcatttttcaaacgtatgcgaatattcaaaagatgagaagaaactagctttgtaccagtgtggttggagatcgtaatggcaggtctaatccagtaagggcagttgattaggcgaaatcctctgagcatgcatctacataaatgtttattctctggttagggatatatgaatatcaaccacaaatcgtactacctgattggtcagatatgtctaaagcataccttcgctcgggtggaactttcccgtcaaattggttttgaacacgttcgtagtacttgacatatcgctgaaggaaacaggaaagcttgtttaataggatgagggagaatcgaataagcacattaaaagattggtgtgagctcagaacttacaatctgacttgggagaacaagagctttcccatcaagacatctcttttggttatagtaatcaatagcctcttcagctgtaggaaagaactgcaatggagttaccagtaagatctgtcacaagagtcttacagaggaggaatgcgtgcatcagccaagactttgtttcatttaagaagtgtcaccttgagatatagaagaagacagcaaatcattaatccggttcttgccattccagctttacaatgaactaccactacattttggatatcttccttcagccatgtgtatgcactttgacaaaacgatggtatcaattggataggaggacaattatgatcatcaaatgggaaagatgcaacctgaagaaaaggaaatcagacaagcgatgaagcaaacactgtaagaggtctataaacactagctttaaaaacaatgacaaccacagaaactgcctgcaagatatatggtctgagatatcaagtgctagagtttgtatataccttcccctcaaatcttgaagcatcgtacaatctctctgaacaaaggttgtagaccttatatttatcctgcatatcgggggcaaggtttagagttctggtatgtaccaatatgatcaaacataaaccaagtaaccactacatgtctgggctgcagtgtcttatcaaatccaactggtgtgaatcttatgagaattagtgagttgtcaaaaactctttaagaggcttccagtcagtgccaatggttaccttatgatgagtttcaaaaaactttatcacctcttccatgtgattacgatatagtccctgaatatgacatttgtcaatgagaaactcaagactaagagaagaaaagaactggctggggaacttatatttcaaaccagaccaagctatttacctcgaaaaatccgaaaagaccagagcttatgtcaccagctgggaaccccattgcgattatattctcagttatatatgtcatgtccaaatcgaattccccctcctgaagattgcaccaggtgccatgtaaagcagagatgtaagtggtactgatcagggcatacatatatactataatctaatcgatgcattacactagacagcagggaaagctcataaaaataaacaactgctagttttggcccattcactacaatagggtagtgtgctgcaacaagctgttgtgactataaggtgcctcagtttcaaagaatctaacaaaagcagaaagacagcattaccatacctggtatcttcttttgttctgagagacaatgtggcgtgctttcacctgcattgctttaacggcaccacgagatgaatcaaccacagcttttgtgagggactcaaaagcaccaccaacttgtgtgtttgatgatctagaatcaccaacctcctcagaccctttcgttggcaaatgcagaccaagttcagaggtgaatcttgtgaaagctgacatcccagaatctgtacgatttggatcttgctgctggaatttaaaacttttggcccaagaagaaagaccagaagaagaaaatatagacggcggtgattcgcgtggggaggaacctggtgggcatggaactatatcatctgttttacttaaaggttcagagccggtagaactagcaggcatttgagtatcatcaacctttgcaacagaagcttctgtactaatagagtcttcatgagcttctctttcagcgctcacaggatcttgtacaacgcccacagtattttcagaaggttcaggaatcaatacatctttctcagatactacagctggagacttcgatgaagagttagcaggatcagtttccattttagcaatccaacgctagctcagacaacgatgagccttactttacgagaaaacgaaaacctaaaaaaaaaaaaagtcaatttcacgtttgagtattgagtccagtttctcatttaatcaaacacttagcagaatatacagaaacgactccaaattcccacattatacataagcaatatccagctaaaggttttggctaaattcgcttctataatcatctgaaaatagcactgaatacgcaaaattgcttcggaggataaggaatctaagaccgtactagtgcacattgctataatccaaaggtcgcattcatttccacatctctctcaacgccaaattcaatggaactagatctctcaaatcagaaaatcaagtgcatcatctagcagaggcagatcaaaaatgaaacaaggcttccaaattcgacaaagcatcggccgcgaaagaaaaagaaaaaaaacgagagagtagacattgattaccggagaatgcaggacgataagcttcgagtttttttccgtagcgaaaagagattcaatggaggaggaagaagattggagctgattctgattcagagcagcagcgtacgaaatttccgatgaacgtgcggagattaacgatcaattcccgttttatcatcccccgctcttgccggtcagaattttgtgtttcgttcattgggcctatatggtcacattatgttgaatcctagttggtctgggccttatagatatcgaaaaggcccagttttggtaatccagtgggcgtaagtgcgtgacgtgtcaatgtaatcacaaacgatctacatatcctactatataatttgggaaatacattttaaatgtaatcttaatttttgtaagtaattacatagggatgccattagaaataaaattttaaagagtaaattaatttatgtatttaaggattaaaaagtcaaatactaatttaattaattaaattaattaaaaaacgaaatacattattaattttcaaaaataatagccaatcaaaatcaacatataagatttgatatctaaattttaattaatttaatttaatttcaatatggattaaatctttaatttattattttaataaaatttacaagttttaatatatattacttttaaaaataaatcgtcccgcggtataccacaagttaaaatctagtacatatgtataatataacacacaaaaaaatgctttgaaaaacaagttataaggttaagaaggtggcttataataagcgtaaacagcgtaaaaactttgagagaaagtgaggactagtagaataaccgcagcacagaaagaaacaattgcccatggattattgaagtacttatgtttcaacgtagccctccaagcattccacttatgatcgtagtaacgattaacctcaatcgataacctagataaatagctatcttcggtgtcgaatacaacttcttgacataaacggttgaacaaatccgcgacttcagaatcgctccctagccaatgttcgatgataccacagtagtgtaagtagctaacatcttcgtgagaatctattagattgtccatgaagattatgtaggatgttatatcattgctcgaatcgatatgacactgctcaaaagctataagattcagaaaaagagatttggtacctacaaaaaaacatacgaggatggctttacttattataaacatttagttgttttgttgagaaaatgtatttgtttcattatctaaactttttgccaatctgaaaacacatactcttttccattgcttagatcattctgaattagtcaattgatgacatttcttatattccaaagtagcatttttatgcaacataccacatcaatacatcatgattcctactaatatattctttgtcaatccatataaaccaatacaaacgagaaaatatcaatttatatggatttgatgaattaaaaaggtgatggataagaaaaaaaaactgtaacattttactcaaacaaaagaaaaataaattgtaaacatatggggcatgtgttaaaaagaagaaaaatgtgaaaaacgtgaacgtaccgtcatggataagtagcctcggtatttctagataaccgtttttgaattgcatatcccaaaaccggtcggttttccttcttctgaattttataccagcctcttttagttccgtcacacaatgtatcaattgttgccggcgcttgtccgccacacgcgtgtttcgagaccatctctttcttgttaacctcggctccggtttaggactagaccgtaacaaactacgacggaaaacatctagacaatgcagttcacccatatcagcgaatgggtcaaaggatttatctcttgccagtgagttctcgagttttgactggccagatttagtcaacggctcgtccgttggcattagtggatcaaagaaccgaattgctaattgtgccaccaaaccggtttggttccgtgtaccaagctgtaactctaataaccggtttagaacaaataaaggaagttgattttcaagcattaccatgtcacgttgaatcgaatgcatcgatcctctcatcgcgaaaactggatcgttacgtgcatatctacacaaaacattattgtgaccggtttaacaattatttgagagaaccggaaataaccagatattgaaaaaatcaggcttacccgagttcagtgaatccttcaacggctcctctaaagagctcaagcacaaaacaaccatcaagaactagcatttcgataaattcgttactactcaaacttaagggaccttcgtaacaagctcgagccttttcctctagctctctcatggcgtcgatatacattttaatgccttggttcgtacgtttcaagactctattgacagcacgccatttgtgacggtccatagaccggagccgtttcttaccatgatggtacggaccaagcgagactgtctgagggaaatacgatttgttgtcgttttcttgaaggtaatatggaactctgtagatacagagcttaccccagagtgttgtgtcatcatctctatgtgcttgttcgagcttgtctgtgatcgagatcacccaatcgtctcgtgaatcttttggactctctttgattacgtagatagcgggatcggattgagtttgctggttgttatgaatgttttgatcttgatcggatctggtgatttcgggtaaaccggggaggttttgatcttgattaaccaatacggattcttggttttgtgtttcgagtttttcgcggatcttaagggtgagtaagtaccagctcaacatgtctttgtagaagacagccaccattttttttgttgcttgaagcttttttaagaaaatgagggagtgagagagaaggaagtatatgtgaatgatttgaagatataattggttacttattgtacttatggacccaactgatctgtaatgacaacaaccataattagatatttataaacacacacacacacatattaatatctttgaagaaaaaagtaacaactaaaagtttatatatcttacctaattattttaactactaaaatatacaaattaatttggaatcgtgcggcttaaaagggtaacatagaatagaaaatatgcatttgtgttctataatttaccatatatccgaccattatccatagataatagaattttgatataccctttcgttttggtttgagtacgaatccttaacgcatcaaagaagggtaaggtcattgcgcaaccatactagaaacgctcgtatggggaatatgagagtcgttggacaagataagattatttgtcttgtcgaatttgggcaattttaaacgataaaagcacaaaataaaatctcttctttagtggtttttttcttctcccttttttcctttttgctctttgtgtcacatcttgaaattcacatttcatcgttgttattgatattctatggggtatttggtgcattatggtatttttcttatatctcgagcaacaattattaataagaaaaatagaaaataaaaatatagtgagagcataacggaacatgtacactacacagctagtgtgtggaacatggcacgacctcaccatttctcgtatggatgatgattgctcaacaaactttgaatctatattggttgacgggtcacagttttttttgtgcttattttcattagccaaactctagggtgtggccgaagactaatctatgatgtaaaagagaatagtagaaaaggttttcacattaattttatcaactgtaagaaaaaggtaaaaaaatgtttccttcttattccatggaaaacccaaaacacaaaagtgaaatgagaagaaactttttctttaggttagaaatgtggaaaatatttcctctagtgatcacttcccattttttactgttttattcctcttgtttttctttctttgattgcacccaatcaaacctttatatgattttatttaaattactgtagtacattcgacaaaagtgaaattgactatctagactctttagtcttaatacatcgagtgttatggagatttttcgtcatcttggaaagtgagtcaaactttggaatatccgtcaatagacaatggtcattctcattaatgttttggaacattgttgtagtcttaatttccgataacatattcaaatctgaacataccacatcattggctggagacgtactggtgaatcaaaagaaattttaaagaggtgtacaacttaatataactatttggtaaccatatagtgctaaactagtgtagaaatgcaattacaagtttaagcatcgatggtaaactagtttggttgtgacgacggcaaaaatgtctcttgggacgatatcgttttatcgacgtaatctatatttgttctgacctgtctcagtgtctcacctcctatgaagctaactgttaatatatatatggcatcgtcccccctagacctaccgagtcacagcgatactttcatgctaccacagacaccttgtcatgatcagattcaagacatgtgaacaatcaaaaataagattaaataaaaatgctggaaaattttaattttagtttctgattttatttttgcaatacaatagaaaataaaataaacaaaaatgctcgaaaaaaagttacaaacattccaagtttaatgaaggaaactactgaataataatgaaaatcaagaaggtgggttaaaataaggataagcagtaaagaaactctgaaataacgtgagaactagcaggacaagagcagcaaaaaaagagaagtatgcccaaggattattgaagtacttgtgttttaagatcgccttcagaacattccactttcggctataattccgatcaactttattcgacaattgtgacaaataactattttgggggtcgaaagccacttcttgacataaccggttgaacaaatccgcaacttcataatcattccctaaccaatgttcgatgataccacaataatgcaaatacctaacatcttccgacgaatctattagattatccataaagattatgtacgatgttatatcgttgctcgagtcaatatgacattgttcgaaggctataagattcgagaagagagatttggtacctgcaagaaacacgagaaaccatggtatatgtgtaagctcaaggagttaaacgattgtataaaaaagtgtattttttgtagctattgcttaaatcattctgaagtagtcaataacgaataattgatgacaattcatttacgttggcaacttgcggagaaattttggttttatgattataaaattcgaagaaaaaaaaaaatcatgttggtgtgtaaaacgtgattttcttaaaaccatgtatatgaagatggatatccattatgattcatgttctttatcattgggaataaagtttgaaatgttaccgtcatggattagtagttttggtatctcgagataaccgtttttgaatcgaatatcccaaaaccggtcggttttcctcgtcctgaatttaataccggcttctcttagttcggtcacgcaatgtatcagttgttgttggcgcttatccgccacgcgagttctccatgaccatctcattcgtgataaccttggctccggattcgaacaaggccgaagtagatttcgacggaaaacatctagacagtgcaactcacccttgtccttatcagcaattgggttaaagaatttatcttgttccagcgagtcgtcggttttggtcaacggctcgtcggttggcattagtggatcaaagaaccgaactgctaatcgcgacactaaaccggtttggtgccgtttaccaagctgtatctctaataaccggttgagaacaaacaaagggagttgattttctagcattaccatgtcacgttgaatcgaatgcattgatcctcgcattgcgaaaactggatcgttacgatcatatctacataaacaagaacaaaatcataagaaagtcaacggtttagattaattagcggatctgaaatgatacactaaaattatattagataacaagaaatttaatcatatttaccctagttcggagaatccttcatcagctcctctaaagagttcaagaacgaaacaaccatcaagaaccagcatttcactaaacttgttgctgctcaaatctataggaccttcatagcaagcacgagccctgtcttcgagttctttcatggcgtcaatatacatttcaatgtcgtgtttggtacgtgccatgaccatattgactgcacgccacttgtgacggtccatgggtaggagatgtttgttgccatggtggaacggaccaagtgagacagtctgagggaaataggacttcttgttgttctcttgaaggtattgtggaactctatagatacatagtttgtcccaactagttgtggcgtcttctctaagtgcttgctccattttgtctctaattgagatcacccattcttctcgtgtctcttcgggtttttggttttgtttttggagtttttggcgcatcatgagggtgagaaagtaccatgtgaacatgtctttctggatcgtagacggttgtggtcgattagttctttttcttttgacagaataccgccaaggaagaatcggtccaaatggtcgtgctggcggtagcggtggtggtggtggtggtagacttttgcttttctttttgaagaaatgccgccgaggaggaattgatctaaaagatggtggtggtggtggacgaggaattgatctaaacgatggtggtggtggtggaggaggcggtggtgtaaaagaaagaatacgcaccatttttgttggttaaagctttgagagagaaaaaatgttgtaaaactaagatgtaacaaaatgatagatctgtgcacagcacacacattaataagtttgaatatctaatcatacaccaacatcaactataactttgtcaaacttttgagctgttaaataacaccttgacgggccacgttttgtttgttttgattttacaaatctttagaaaaagaactctaaaaacactcgtccgtcactagctcaatggtgtattatgagagccttaaagaaaaaaattccgttaaaaatcgccaaaatctgttgcaaattgggtgataaaaaggaattgtaaatgatgaaattctttgcagaacgatcttagtaaattgatttcttttgatttttttttgctattagcaacatattgcaaaagacttttgagacgagaatttgcaacaacctgttgaaaaaaaaaaatgttgattctttttttcgcagtagagtattgatgatgtggacatcagaattcagaagtattcagaaccaaataagacccagagttgaccagaccaaccggttcaagcatcaactaaactaaccaaatcaaaaagaagaattttggcgcaaaccaagttccgatcaagaaactggcatacgattggatatttacaaagaaatatatccttaaaagagtaattatccagctggaatcataaatcaccgtaccgaattgaagttggtccatgatggctcacccaaagcacacaaaacttaaatcctccaaccaaatgaagatttttcccgacctaaattgaagactcaccagatagttacatatttcaagacatatgggcgagacgaaaacaaaaactaccgaaccattcaactagagcgccaagaagacccacccggatcaagcctaagatcatcaacccaaagtcacatttactcgacatacctttggtagtcaccaatattatgcatatttgtgaataataggcgagccaaatcacccaaggttcgaattggtttaggagttactcatttggttacatcacacattttttggttaattaaattacaacaaaacttacgttgacaattataaaaacataagtaaatgaaaccaatatatgaactgaataatctcttccgtaggtctaacatatagcttcaaaataatacagtaaaatctttcttttctttaagactcaacagaaagaagaaaaaaaaaggtaaaaaaagaacaaacattcaaagttaatgagaattaagaaggtggcttaaaataaggataactagtaaaaaagctctgaaataatgtgagaagtagcagaataactgccgcaaagaaagagaaatatgcccaaggattactaaagtacttgtgtttcaaggttgccttcagaacattccactttcggttataataacggtccaccttatttgacaattcagataagtaagtattttcgaggtcgaaagccacttcttgacatagccggttgaagacatcagcaacttctgaatcatttcctaaccagtgctcgatgatatcatagtaatgcaaatacctaatatcttcagcagaatctattagattgtccatgaagataatgtaggatgttatgtcgttcgttgaatcgatatggcactgctcgtaagctataagatttgagaaaagagacttggtacctacaaaaaacacgaagagagaccatatagtgtttttgtgagtttaaggaattatgagggttctctaggcgggaaaaaatgtatatgcctaaatagcaaaatcattatgaattgatgaaataggcaacgattgatgtcagtctatgtactttagcaacttatgggaacaaaaagtgaacaaaacctatacatgtcacaaatttttttggtttggtacaaaatcatttatatgcagtagagtatcacattttgattcttaggcaacaatataagtgaggtgtaaacaatatgatttgaatgaaactcatacgaaggaacgtaaaaataaataaaaactaaaaagtgtgaacttaccatcatggataagtaattttggtatttctagacaaccgtttttgaattgaatatcccaaaaccggtcagattttcttcttttgaattttataccggcttctcttagttctgtcacgcaatgtagtagttgttgttggcgcttgtccgccaccagcggtttcctggaccatctactccgcgataacctcgggtccggttttagactaggctggagcagacttcgacggaaaacatccagacaatgcaactcttccttctccttgtcagcaattgggttaaagaatttattgttgttttcttgggagttctcgattttggttgatgacatataagttggcatcaacggattgaagaaccgaaccgctaattgtgccactaaaccggtttggtattgtgtaccgagttgtagctctaataaccggtttaagacaaacaaaggaagttgattttccagcattagcatgtcacgtcgaatcgaatgcatagatcctcgcatcgcgaaaacgggatcgtttcggtcgtacctacacaccaagataaaaagaaaaaagttaaaaaagaaataaacgaaagtcaacatttagtttagtcaaccggatctgaaatcagtccggtttagcataaagctaaatcatgcttacccaagtttcgagaatccttcataggctcctctgaagagatcgagaacaaaacagccatcaagaactagcatttgggtgaacttgttactgctcaaaccaataggaccttcgtagcaagcacgagccctctcttcgagctctttcatggcgtcaatatacatttcgatgccttgcttggtacgtttcatgaccatattgaccgcacgccatttgtgatagtccatgggtcggagatgttcgtccccatggtggtacggaccaagcgagactgcttgagggaagtaagaattcttgtcgctttttttaagggagagtggaactctgtagatacagatcttgtcccagctagttgtggcggcgtctctcattacttgctccatcttgtctttgatccaaatcacccattcttcccgtgtctcttcgggttgttggtttcgggtttggagtttttggcgcatcatgaaggtgaggaagtaccaggtcaacatcggtcgtagttgatagtttcttcttgcttttcttcttatgataatatgagggaaaggaagcttcggtccaaatggtagctggggcggcggcggtggtggtggcggtggaagtggtggcagcaccaatagacgaggaggcggcggcggtggaggtggtggtcgtcgtttactaggagttgccatttttgtttgttgaaggtttttaggagattgagagtgacatagaaaaagtctaaaagcaaatatgtaacaactgaactaaagctgtcattggtcgcaatattatttgatctgtaatgacaacaaccagtgattgacatctaatcatacttatacattaaaatgtcttaaacaatctttaaacgtaatggatatataatgctttggcgagcgatgttttcttggacttttcttccactactcttaatagaaagactttattacaagtctttaatgtaatatatatatttcgtagagtgagatatttatttgaaacattcactcttatttaaaaaaaatgaaaatgcgttgtactcttatagaaatactatatactatataatgcgttattcattattgacaatgattgatacttgaattatccatatgaaagaaaaaaaatctacgaattagaaaacagcaagtttataatttcaattaagatgtgttatcaaccgtagacatgggaaactcggcacatggcacgactgacgacttcaccattctcgaatggataatgaggtgctcttatagaaagactcgaagaaatagtgttcatgacatgccttaaaaactaattttataaagctattatatattaagacttggaatattcaaaatcttacgccttaaaaaaaaactcgaccacccaaaaatggtattcagacatgcaaattgcaaaccgaaaagactccaagaaagtcaagtcatctattatattttatgcttaagatatattcaaaatcttatgccttaaaaaattgacgtaccaaaaaatagtgttcagacgtgcaaccccatttccaagcaaatggaacctaatcagcctcgacccgacgaacatttctaatcgctgtcttgatcatctgttcttgtttttgtttattccactaagtttattcacattactcttttgaatgacaactatttgtaaatccatagttctcacaaccatgtctatcactatactgtttagtgttttttttttcattctttttttcaatgaatgaacaatatttactacttcttaatattcactacgtctaggatatgcagtccaaataaatatccgaaattaacctttttcaatccattaactatttaaaattccaaattttacaacgtctttttttttttaattatgaatagaaaatattgaaaaaacaagaaatacaaatattgtaaataaaatgaaaaaaaaaaatgaaaactaagagagtggcttataataagcatagacagcaaagaagctttgaaagaatgtgagaaatagcagaataactgcagctgaaaaggagaaatatgcccaagggttattgaagtacttttgtcttagagtagccttcaacgagttccacttacgactataataacggttaacttcacgagacagttgagatagatacccatcttttggatcaaagatcacttctttacataaccggttgaacaaatctgcaacttcagaatcactccctaaccaatgctcaataataccgtcgtggtgcaagtagctaacatcttgagaagagtttattagattatccatgaagattatgtaggatgttatgttgttgcttgattgtgtatggcactgctcgaaagcaataagatttgagaaaagagacttggtacctacaagaaacaagtgagaccacagtgttttggtaacaaatatattctttgtcaaactgtaagatcttaaagataatggatagtaaaaatttgtgaggaactaatagaaaagtagagaagaaaaaaccggttaactcaccatcatggattagtagtttcggtatctttagataaccgtttttgaattcaatgtcccaaagctggccggtttctttcctcatgaagttaacacctgcgcctcttagttctgtcacgcaatgtatcaattgttgttgcttttccaccatgctcatatcctcatatggagtcccttgattagttgtctcactagattggatgagacttcgatggaacacatccaaacagtgcaacccgccattgtcacccaattcatcggatttttcctgcgagtctaacgatctttctgatttggtcagcacctcgctagttggcattagtgttttgaagaaccgaacagctacttctgccactatacccgtttggttcggtgtaccggtttgtagccctaataaccggtcgagaacgaacagaggaagttggttttccaacattatcatgtcacgttgaatcgaatgcatcaatcctcgcttagcgaaaaccgggtcgttacgtgcatatctattcagcacacaacagagtcaacagtttaagcaatagaaaaaaatcactagataaaatttagccaggcttacccaattttctggaatccttgaattgttcccttgaagagctcgagaacgaaacaaccatcaagaacaagcatttctgtgaactcattactattcttcatgtcaatgggaccttggtagcaagcacgagcctcctcctcgagctctttcatggcgtcaatatacatttcaatgttgtgcttggtacgtgccatgatcatattgaccgctcgccatttgtgacgctccatgggtctgaggtgtacctttccatggtggtacggaccaatagagacagtttgaggtaagtaagacttcttgtcgttctcttgaagatagaaaggaactctgtagatacagagcttgtcccagctatttgttgcgtcgtaactaagtgctttctccatcttgtccttgatcgagatcacccattcttctcgtgtctctcttggcttttcttcttttacttcgatcttactgggctccacgtaagtctccacgtggttgtgcaagttttggcctagatcacgtctggtaatttcatggaaactgtggattggcacgaaccatgacaaccgtctgtaccttttgtgggtggaagttgagcgaccatcggaaaacaaaaccatgatttctgctcgtcaatgttgaagctcgggagatcgagagagagatagagacaataattgtcaaatgtcaaagctaacatgtaactgagttaaagttgtaatctggtcatataccaaactcttataataaataggctaacattttaaaaaggatagtagtacaaaactgcgtttccttgattattaactaagccaatgacatgaataatccacatggtcttgaattcttgatccttaataatataatttactcaattatgattaaaatgttcatttattacacaacatatttacttttaacttatgcgtagtctgaaaatgtgtcccctcttttattttaattttttatttcaacttctttatataattttcttatatctcgtaaacttagtaaaccaaatacatatagtgctatttatgtcctcatagtgtataccataatttgaattttaaaaaattaataaaaattatttgagaaataaagtgtcaataatatattagatggtgttgatatttattggatgttatattaatcgggtttgtatattggatggccaagcataacattatcttttgaaaagaaccgcataatcttctactagtaaaaccaaaatctggatatggcttccaaacaaatacagaccaaacacaaccttttaataatgtttttcaaaacacttaattaactcttgaaaaaaatccaaatgttacaatattcatatttatgttgaatagaaaaaatacaaaaaaaacattttaaaagaaaaaggaaatcacaaacattactatatttttgttggttgtgtaacaaatttatattacaaaaaaaaaatcacaaacattaattgaaagtaatttatcaaaaacattgtcaattactttcaaatgtttttttttaatcaaacaaacattataaagtaataaaataacaataaatgttaataatgtagcaattatttggtcacagaaaattcaaagaaaccaaacgtttaaaaagacaaaccagaaaacagacccagaggcataacaaagccatggtcaaaacagatcaaaacgaaaaagtcattacacgtcaatcatcaattttttatttgtcgaagagatcccttagctagcgagggttacctcgggtgacatatatactgaaggaccccatgttccgcatgcaataacaacacttctagctatttcaaaagctcttatgctgcactttggagagattcaaacaaaatataccaacttggaatgtctgagaaaacgtgagaattacgctcctatgtcttaggtggtggcttaaaataagcaaaaacagcaaaaaaactctgacaaaatgtaaaaattagcagagtaactgcagcaataaaagagaagtatgcccaagggttattgaagtacttgtgtcttaaagtagccttcaaataattccacttacgcctatagtaaatgttaacttcgccggtcaatgcagaaagataaccatcgtttgggtcaaaaatcacttctttacctagcccgttgaacaaatctgaaacttcagaatcactccctagccaattctcaatgataccatagtggtgcaagtagctaacatcttcagaagagtttattaggttatccataaagattatgtaggatgtaattttcttgctcgacttgatatgacactgttcgaaagctatgagatttaagaagagagacttggtacctacaagaaacacgagagaccatggtgcttttgtaagtttaaagagttatatggggttctattgatgtatttggattgtgtaaaaggaaaattaaacagggaaaaactcaagatactagactatgtgagtgcaagagataccgttttcaggagctagacatcaaattatgacttgtaactaacgtattttttgcctacccatataattaggaggtaggagtcaaattctaagatcttaatgataattgataagaaaggaaactagttaaacctttgtgaagaacgaatataaagttgagaagaaaaacttgttaactcaccgtcatggattagtagttttggtatctttagatatccatttttgaattcgatatcccaaaaatggccggtttcctttctcatgaactcaacacctgcgtttcttagttcagtcacgcaatgtatcagttgttgaggttgcttgttcaccatgctcatatcctcatccgatgtcccactagattggaggagacctcgacggagtacgtctaaacagtgcaacccgccttcttcagttagcacctccctcgttggcagtagtggttggaagaatggttggaagagttgaacatttactttgtccaatacatcgggccgttgtagctgtaataacccctttagaacagaccaaggaagctgattttctagcattaccatgtcacgtcgaatcgattgcatcaatcctcgcatcccgaaaaccgggtcattgggtgcatatctattcagcacacaagaacagtgtcaatagtttttttgtttcttttcttttcaacgttgattaatcacattaataactagtctatttagcaaaacataaatagtaaactgtctatcggtaaaacttataaatagtaaacggttccttgactcgatagtttggactttagataacaaagctgaaatcagaccggtttattaatatctaagataactggctaaaaccagaaaatatagtcaagtttacccgatttcctggaatccttcacttgttcccttgaagatctcgataataaaaacgccatcaagaacaagcatttctatgaactcattcctattcatattaatgggaccttggtagcaagcacgagctttctcctcgagctctttcatggcgtcaatatacatttcgatgtcgtgtttggcgcgtgccatgaccatattgaccgcacgccacttgtgacgctccatgggcatgagatgtttgtgtccatggtggtacggaccaatagagacgatttgaggcatgtaagactttgtatcgttttcttgtaggtaaggtggaactctgtagatacagagattgtcccaactagttgtagcgttgtctccaagtgttttcatcttgtcatttagagagatcacccatatttctcgaagtttttgctcgttcttgtcttcgatagagacaaccgattctacttgtgtctctcttggcttctcttctatcacttcgatattttcgagctccccgtaagtctccttgtcattccgcaacttttggcgttgacgggctcgcctgataattccataataagtacggactatccgcgaaaaccgtctattcttcttgttgctggaaactgaccgaccatccaaaaccgaaaccataatttctgtaggttgaacctcaggagatcgagagagagagaaatagcgcagttgtcaaatctcaaagcaacgatgtaactgagttgaagtaatctggccacgctatgtttatttctaactatacaaaactcttataaatacaaaatataaaagaagtcttgtcaatagggtattgtacataatacaagtagtttggatgttttaatccatgcatcgtcgagtgggattgaaacattcaaactagtatagaaaatatcataatagtatgtatatatataaacaagtgggacggaaacatactaactaccatcaaatagaacgtatagtacgtactcttataagaagactaatgagattgactaattctccataggaaaaagattaataagctctcgtgatatattcaacgaatgagattgactaattctccactccttaaaaaatactcctatggagaataagataactgcattttccaatattcttcttatgggtggtccaaaatgtgtcccctcatttaatttaatatcataagtctactatgaacatttgtttttgccatgtttagattttttaaaataaataacacttttgaaaaattagtatgtgtgtattaagtaaaaaaaatgcgttattccatatacattttggataaattatttttcgtgataaatttattgcaatccttttacatggattaatccatttcatgaccagcgaaaaaaaaacaaaagagaccattaatgggttaggttattaggttagctttttattgggttggttagtttacaaattttgcacccctaataaaatcaaacttcttaaaattgctttgcaacaacataattattccaaaacccaattattacaatgcaaaatcttggtcaagtacatagaaaatgttgaaaaacaagaaaatacaaacattccaaattgatgggaaaaacccccaactagagtttagaattgggcttataataagcataaacagcataaaaactctgacataatgtgagaagtagcaaaataactgcagcagaaaaagaaaaatatgcccaaggattattgaagtacttgtgtgtcaaggtagccttcaaaacattccacttacgattgtaataacggtttacatcaccagacagtcgagatagatgactatctttgggatcgaaaaccacttcttgacatagccggttgaacaaatccgcaacttccgaatcactcccaagccaatgctcgatgataccacaataatgcaagtagctaacatcttcgctagagtttattagattatccataaaaataatgtaggatgttatgtggttgctcgactcgatatgacactgctcaaatgctataagatttgagaagagagacttagtacctacagaaaaaacatgagaggatttgtaagtttatggaatttaaggattttataggtaaatatcgtttttatacaaacatatatatgtgtaaggaataaaaagtaggaaaggaattaaaagagaacctttgagcttaccatcatggattagtagtttgggtatttctagataaccatttttgaattcaatatcccaaaaccggtcggttttccttttcctgaacttcacaccagcttcccttagttctgtcacgcaatgtaccagttgttgttgtcgcttatccaccactcgcgtattcctagtcaatctctttaggagagatcttgtgttcggtgtaggactagactggagtagacttcgacggaaaacatccaaacagtgcaactcgcccttgtcaccaagtgtgtccaatgatttttccagccagttcatgagttttgactggtccggtttggtcaacgcctctcccgttggcattagcgggtcaaagaacttaacggctacgtgtgccactataccggtttggttttgtgtaccgagctgtaactctaataaccggtcaagaacaaacaggggaagttgattttccagcattatcatatcacgttgaattgaatgcatcaatcctcgcatcgcgaaaaccgggtcgttacgtgcatatctactcatcagtcatcacagtaaaaaaaaatcaacttttcagatacaggccaaaataagaccggtttagcaagtatagtagataaccggaaaaaaccagaaaatttattcacgcttaccctatctcggtaaatccttcaacggttcccctgaagagctcgagaacaaaacagccatcaagaacaagcatttctgtgaactcattcctgctcaaactaatgggaccttcatagcaagcacgagccttctcttcaagctctctcatggcattagtatacatttcaatgcgctgctttaaacgtttcaggaccttattgagcgcacgccacttgtggcgctccataggccgaagacgctttttaccatggtggtacggaccaagcgaaacagtctgagggaaataggacttcttgtcgttctcttgtaggtaatgtggaactctgtagatgcagagctttccccaaattgttgtgtcgtcgtctctatctgcttgctcgagcttgtctcttattgagatcacccaactgtctcctgtggtctcttctggcctctcttctaccacctccttacctgactcggaatgagactgcttgtggttctgcacgttttggtcttgattcggtctggtaacttccggtaaaccgtggagattcggatcttgaaccggttccgagtgttggtttttggtttgaaatttttgtctgagcttgaggctgagcaagtaccaagttaacatgtctttgttgatgataattggttgtccatcggaatgaacattaactaaaaccattggttttgctggttgaagcttttttcaggagattgagagcaaaagctgtaatttcgaaatgttaagtgcaaacgctgtaactaatttaaagctgtgatttggccatacatttatttattttccaatccacataactcttataaaaagacttcgtactcttataaattaaaagactctcataaatgcttgtagaattttctataaatgaaattcaaacacccaacctctcatagtaaagactcataagtgcttagtactagactactattagtagaatatttttattattcattcaatgagtggagactaaagcttccaaactttcataaaaaaaaaagactggagactcatataaaaagattctcatattcttcctgtaattgttctttaacgagattgaaaaatgtgctaatttttatatccaagctgtatttgtgtacactgaaaaaagtcatgagattttttttttactaaatctgatcaaaatacacaaatggtgaatcttttcggaggaatatgtaatcctcatttggtgacattccccctggtatattagcttaatactcccttccttctagcgttaatttgtgtagaaatttagttattgcttttcttgcacttgtttctttagaatcgcctaggatcgatcaagaccgaaaagacgatcagggtcattcaggttaccggtgttgtgcctttcaaagatcctcttacactctaattatataagactcagaacgagcttaagcatggaagcaaccacaagaggtgcgatgtggtcgttcttaagttttaagtgttttagttacttaaaggaaaatttagtattgtccctctctattttagatagggaaaaatctcgagaaaaacctcatctactttttatttgggtatttaatatccatggtttctcagttggaataaaaaaaactcgtttaaatatttttagtctaagtatgtccaaggatttttccagccagttcatgagttttgactgcaagaaaacagttaatctagagttagatatcatgtgatattatttcttcttcctaaataaaatagtaatccataataacgaggacataggtgttaaatcagagtccgaagcaaatagtttacaatagaaatttttgttttgatgaagaagaacaaaatgtcacaaaaaccaagcattacaaactgaaaggaaacaacaacagaatagttatgaagacggattaaaataagcataagcagcaaaataactttgagagaatgtaagaattagtagaataactgcagcaaagaaagacaaatatgcccaagggttatctaagtacttgagtatcaaggtcgttttcaaagaattcaacttcctggagtagttttgtttataacagcgatgaacctcaatcaacaattgagatagataaatatctttggtgtcgaaaaccacttcctgacataactggttgaacatatccgcaacttcagaattacttcctagcgagtgctcaataataccacagtgatgcaaataactaatatcttcaggagaatctattaaattgtccataaatattatgtaggatgttatatcattgctcgactcgatatgacactgctcgaaagcaatgagattcaagaatagagatttggtacctacaaaaaattggacagtgggtggacttgtaagtttgagaagtaactgaactcagttaaaaaataaaacattcattgcttcattgtctaaatatatttttgccgttgctttacttgatgaccacgagataatttgaagataagctatataaccaatatctatgacttataaaactttgtttgatcaccaagacatttatttaatctagtagtttgtgttactgcgttacttaatgagcacgcatttaaatttatataatgtatgttctcgacaaagaaaatgttagagcgcaataaaatctactagtattatttacaaaaggtgaagggagatttaccatcatggataagtagaccgggtatctccaggtaaccattgctgaatttaatatcccaaaaccgatcggttttatttagcttgaacttaaaaccggcatctcttagttcggtcacggtaggtatcactcgttgtaggtgtttgtcagccacgcgtgagtaatttgcctttccggatgatcttgggaagagcagacttcgatggaaaacatcaagacagtgcaactctccattggatacgcctcttggaggcgagttctcggtcaacgtctcggccgttggcattagaggaataaagaaccgaaccactaattccactaaaccagtttggttctgtgtaccgggttgtaactctaataaccggttgagtacgaacaaaggaagttgattttccagcattatcatgtcacgttgaatcgaatgcatcgatcctcgaaccgcgaaaactggatcgttatgatcatatctacgtaacagccaaaaatgaataatcaaaatcagtagttttagataacccgatttaaaatcataccggattagcaagataacttgacaaaaacaagaaattgaatcacgctaacccgagtttcaagaatccttcattgactccttggaggagctcgagaataaaacagccatcaagaagaagcatttctgtgaactcgttactgctcaaaacaatggaaccttcgtagcaagcacgagccttctcctccagctctatcatggcgtcaagaaacacttcaatgccttggttcgtacgttttaataccatattgacggcacgccatttatggcactccatggactgtgtttgctgtctcccatggtgatatggaccaagtgagacagtctgagggaaatacgacttcttgtcgtttccatgtaggtaatgtggaactttgtatatacagagcttgccccagctagttctgtcatcgtttctgtatgcttgctcgagcttgtcttttattgagatcacccactcaagtcgtttggtcccgctcccttcgaccacctcgtttattccaggtttagaacgagtgtcttgctggttctccaagttttggtcttcatagctgatacttttgggtaaaacgacacgttcggattcttcgttttgtctacggacattttcgacgtattctctcaacttgtcataagattttccttttttgacatcatgtccagtaagccaaggaatcgcccgtggtcgtaatggcaatggttcaggtagtactagtggctgttgctttcgtaatcgtagtagttgttgtcgtggtggtggtaggagtcgtagtcgtagtcgtggtcctaaccgtggtggtggaggtggtggtggtggtggtggtggaggtggtggttgtggtggtggtgctcgttgtcgtcgtaattctagacggggtggtagtggtggtggtggtggaatagtaccaaaagtttccattttgttggttgaagctataccaagaggaaatgagtaatgaattcgagtaaacgaagtaacaaataaagaaagctaaaatatatgtagatatatatagaaagcttcaatcttttaactcttttataaaaagactcaccataaatgttgtcatactttatatttaacgagtgagattgaaaaagtcaaacttcgttaaaaaaaatcctgataaattcttgttatacactagtaaaataatatccctcttatacttacaaaaacattatattttctcaaggtataaaaatattgcaagtgtatactaattgtctaaaaccaattttaattgcaattacgaagtcaacatttctttgttgatgaaaactgtatgagcataaattaaaaccaatgttttgggggttcccttgtttttgctggttaaaagctttttccagagattgagagcgagacgtaaattgggaaatgtcaaagcaacgctgtaactaatcttaaagctgtgaactggccatgtgtttgcttattttgaaatctacaaaactcttataaaaagactctaataaatgcttctagtttatactatatccaacgtgtgagatttgaatttgattaattaatttattctttttctgcatttcaactccaaaactctcattaaaaaaggaaaaactatgtactcttaataaatttgtcgactctcatatatagcttgtagtatatatatatatattcaataactacataaaataaaacaaagtcatgagaaaaaaaatgttaccaaagttcaactattaactgatttcatttttcatgtaaaactaacaattattaggagacgaaacaaaacaaaacaaactgtacatccagaatattaaatgcaaatcttttttttaaaagttattgtataacaattttattttataaattatagatgtgagttttatatatgatttctcagacattcgaagaatcaactatgaaactaatattacaaacaaacacaccctttttttctttaaacaaatcgatatgtatcgattaataatacagaagaggagaagcacattactaacgaattaaacttgaagctgaagttggtggattgtgtacagagaaggtgagagatatctgtcttccatcacataccaaagttggtctggactttactcacgagatgctctccatagacagctcttttgaaaacttggcatcctcttctccctccagggtacttctgtttacatatacccaatggctccactaccgcgtcgaaattagtctgttcattcaaattaaaacatgattccaaatccaacagtggaaaaacacaccagagtgttaaaagttttaaacctcatagaaggatgcaacacaaacacagtattgatgagagttattgatcattctatgaagtgtggatttgtatactccgtgtgaaagtatctgcattttatgattccaaaaggtttttcaaaagggtattcaagagcagggcttcccctggaattttgggtgccaaatgcacccaaaaatatttaaggttatttcaaaagattttaaaaattgaggccaactagaaaaaaataaacaaaattgagaccgttttgtaaacaaattttcagaagaatttcaaaaacaatttcaaaaacatgttttttgatgaggttcaggaccggccatgttcaagagaatgcgttaaaattctcactttctttcaaccaaaacaaagagatagagagatgtgagtgcttgaaacagagaatcaagagagattgagagacagagagtacatagggatatagtttgagttcgattaggttactctgtttgtgccccctaataaaaaaccatgtccattattgcttagccaccgaaattaaccttcttaaacttgtttttaacaacaaaatattattccaaaaccaattttggatagaagaaaataggaaatgttgaaaaacaagaaaatgcaaacattccaaattgaatgaaaaaggacaaaagttaagtgtttggctcaaaataagcataaacagtaaagaaactctcacaaaatgtgagaagtagcaaaataactgcaccaaaaaaggaaaaatatgcccaaggacttctaaggttgagctggtacttgtgtaatatgactgcactaaacagactccacttacgactgtaaaaacggtctacaccaagacaaagtggatatagataactatcaatgggatcgaaaaccacgtcttgacataatttgtggaacaaatccacaacttcagagtcactctcaagccaatgctcgatgataccacaatattgcaagtatctaacatcttcgttagaatttattagattctccacgaaaattatgtaggatgttatctgtttggttgagtcgatatggcattgctcaaaagctataagatttgacaagagagacttggtacctacaataaatatgaaagaggttcgtatgtttaattttaataatgtgatggttctgtagataaatttttggttttaaagagaacatatgtgggaaaggaaggaataaaagagtaggaaagaaaataaaataaaagttctaacttaccatcatggggttctctaggaaaaataatgtatacgcctaaatggctaatcattccgaattggtgaaataggcaacaattgatgtcagtctatttactttagcgacttgtgggaaaaatctgaacaaaaccaatacatgtcgctctatttggttttgtacaaaatcattaacatgcagataggtatcacgtttgattcttaggcgacaacaatataagcaaaatatgatttaaaactaataaaaacgaaaatgtgaacttaccgtcatggataagtagtttcggtatctctagacaaccgtttttgaattgaatatcccataaccggtcggattttcttcttttgaattttataccggcttctcttagttctgtcacgcaatgtagcaatttttgttggcgcttgtccgccacgacgggtttccaggaccatctacgcgataaccttggctccggtttcagactaggctggagcacacttcgacggaaaacatccagacagtgcaactcttccttgtccttgtcagcaattgggtgaaagaatttattgttgttttcttgcgaattctcgattttggttgatggcatataagttggcatcaaaggaagttgattttccagcattagcatgtcacgtcgaatcgaatgcatagatcctcgcatcgcgaaaacagggtcgtttcgatcatagctacacaccaagataaaaagaaaaaagttaaaaaagaaataaacgaaagtcaacatttagtttagtcaaccggatctgaaatcagtccggtttagcataaagctaaatcatgcttacccaagtttcgagaatccttcataggctcctctgaagagatcgagaacaaaacagccatcaagaactagcatttgggtgaacttgttactgctcaaaccaataggaccttcgtagcaagcacgagccctctcttcgagctctttcatggcgtcaatatacatttcgatgccttgcttggtacgtttcatgaccatattgaccgcacgccatttgtgatagtccatgggtcggagatgttcgtccccatggtggtacggaccaagagagacagtgtgagggaagtaggaattc

SEQ ID NO: 92 - DNA, 105644 bp, Arabidopsis thaliana
gaattcgatatcccaaaaatggccggtttcctttctcatgaactcaacacctgcgtttcttagttcagtcacgcaatgtatcagttgttgaggttgcttgttcaccatgctcatatcctcatccgatgtcccactagattggaggagacctcgacggagtacgtctaaacagtgcaacccgccttcttcagttagcacctccctcgttggcagtagtggttggaagaatggttggaagagttgaacatttactttgtccaatacatcgggccgttgtagctgtaataacccctttagaacagaccaaggaagctgattttctagcattaccatgtcacgtcgaatcgattgcatcaatcctcgcatcccgaaaaccgggtcattgggtgcatatctattcagcacacaagaacagtgtcaatagtttttttgtttcttttcttttcaacgttgattaatcacattaataactagtctatttagcaaaacataaatagtaaactgtctatcggtaaaacttataaatagtaaacggttccttgactcgatagtttggactttagataacaaagctgaaatcagaccggtttattaatatctaagataactggctaaaaccagaaaatatagtcaagtttacccgatttcctggaatccttcacttgttcccttgaagatctcgataataaaaacgccatcaagaacaagcatttctatgaactcattcctattcatattaatgggaccttggtagcaagcacgagctttctcctcgagctctttcatggcgtcaatatacatttcgatgtcgtgtttggcgcgtgccatgaccatattgaccgcacgccacttgtgacgctccatgggcatgagatgtttgtgtccatggtggtacggaccaatagagacgatttgaggcatgtaagactttgtatcgttttcttgtaggtaaggtggaactctgtagatacagagattgtcccaactagttgtagcgttgtctccaagtgttttcatcttgtcatttagagagatcacccatatttctcgaagtttttgctcgttcttgtcttcgatagagacaaccgattctacttgtgtctctcttggcttctcttctatcacttcgatattttcgagctccccgtaagtctccttgtcattccgcaacttttggcgttgacgggctcgcctgataattccataataagtacggactatccgcgaaaaccgtctattcttcttgttgctggaaactgaccgaccatccaaaaccgaaaccataatttctgtaggttgaacctcaggagatcgagagagagagaaatagcgcagttgtcaaatctcaaagcaacgatgtaactgagttgaagtaatctggccacgctatgtttatttctaactatacaaaactcttataaatacaaaatataaaagaagtcttgtcaatagggtattgtacataatacaagtagtttggatgttttaatccatgcatcgtcgagtgggattgaaacattcaaactagtatagaaaatatcataatagtatgtatatatataaacaagtgggacggaaacatactaactaccatcaaatagaacgtatagtacgtactcttataagaagactaatgagattgactaattctccataggaaaaagattaataagctctcgtgatatattcaacgaatgagattgactaattctccactccttaaaaaatactcctatggagaataagataactgcattttccaatattcttcttatgggtggtccaaaatgtgtcccctcatttaatttaatatcataagtctactatgaacatttgtttttgccatgtttagattttttaaaataaataacacttttgaaaaattagtatgtgtgtattaagtaaaaaaaatgcgttattccatatacattttggataaattatttttcgtgataaatttattgcaatccttttacatggattaatccatttcatgaccagcgaaaaaaaaacaaaagagaccattaatgggttaggttattaggttagctttttattgggttggttagtttacaaattttgcacccctaataaaatcaaacttcttaaaattgctttgcaacaacataattattccaaaacccaattattacaatgcaaaatcttggtcaagtacatagaaaatgttgaaaaacaagaaaatacaaacattccaaattgatgggaaaaacccccaactagagtttagaattgggcttataataagcataaacagcataaaaactctgacataatgtgagaagtagcaaaataactgcagcagaaaaagaaaaatatgcccaaggattattgaagtacttgtgtgtcaaggtagccttcaaaacattccacttacgattgtaataacggtttacatcaccagacagtcgagatagatgactatctttgggatcgaaaaccacttcttgacatagccggttgaacaaatccgcaacttccgaatcactcccaagccaatgctcgatgataccacaataatgcaagtagctaacatcttcgctagagtttattagattatccataaaaataatgtaggatgttatgtggttgctcgactcgatatgacactgctcaaatgctataagatttgagaagagagacttagtacctacagaaaaaacatgagaggatttgtaagtttatggaatttaaggattttataggtaaatatcgtttttatacaaacatatatatgtgtaaggaataaaaagtaggaaaggaattaaaagagaacctttgagcttaccatcatggattagtagtttgggtatttctagataaccatttttgaattcaatatcccaaaaccggtcggttttccttttcctgaacttcacaccagcttcccttagttctgtcacgcaatgtaccagttgttgttgtcgcttatccaccactcgcgtattcctagtcaatctctttaggagagatcttgtgttcggtgtaggactagactggagtagacttcgacggaaaacatccaaacagtgcaactcgcccttgtcaccaagtgtgtccaatgatttttccagccagttcatgagttttgactggtccggtttggtcaacgcctctcccgttggcattagcgggtcaaagaacttaacggctacgtgtgccactataccggtttggttttgtgtaccgagctgtaactctaataaccggtcaagaacaaacaggggaagttgattttccagcattatcatatcacgttgaattgaatgcatcaatcctcgcatcgcgaaaaccgggtcgttacgtgcatatctactcatcagtcatcacagtaaaaaaaaatcaacttttcagatacaggccaaaataagaccggtttagcaagtatagtagataaccggaaaaaaccagaaaatttattcacgcttaccctatctcggtaaatccttcaacggttcccctgaagagctcgagaacaaaacagccatcaagaacaagcatttctgtgaactcattcctgctcaaactaatgggaccttcatagcaagcacgagccttctcttcaagctctctcatggcattagtatacatttcaatgcgctgctttaaacgtttcaggaccttattgagcgcacgccacttgtggcgctccataggccgaagacgctttttaccatggtggtacggaccaagcgaaacagtctgagggaaataggacttcttgtcgttctcttgtaggtaatgtggaactctgtagatgcagagctttccccaaattgttgtgtcgtcgtctctatctgcttgctcgagcttgtctcttattgagatcacccaactgtctcctgtggtctcttctggcctctcttctaccacctccttacctgactcggaatgagactgcttgtggttctgcacgttttggtcttgattcggtctggtaacttccggtaaaccgtggagattcggatcttgaaccggttccgagtgttggtttttggtttgaaatttttgtctgagcttgaggctgagcaagtaccaagttaacatgtctttgttgatgataattggttgtccatcggaatgaacattaactaaaaccattggttttgctggttgaagcttttttcaggagattgagagcaaaagctgtaatttcgaaatgttaagtgcaaacgctgtaactaatttaaagctgtgatttggccatacatttatttattttccaatccacataactcttataaaaagacttcgtactcttataaattaaaagactctcataaatgcttgtagaattttctataaatgaaattcaaacacccaacctctcatagtaaagactcataagtgcttagtactagactactattagtagaatatttttattattcattcaatgagtggagactaaagcttccaaactttcataaaaaaaaaagactggagactcatataaaaagattctcatattcttcctgtaattgttctttaacgagattgaaaaatgtgctaatttttatatccaagctgtatttgtgtacactgaaaaaagtcatgagattttttttttactaaatctgatcaaaatacacaaatggtgaatcttttcggaggaatatgtaatcctcatttggtgacattccccctggtatattagcttaatactcccttccttctagcgttaatttgtgtagaaatttagttattgcttttcttgcacttgtttctttagaatcgcctaggatcgatcaagaccgaaaagacgatcagggtcattcaggttaccggtgttgtgcctttcaaagatcctcttacactctaattatataagactcagaacgagcttaagcatggaagcaaccacaagaggtgcgatgtggtcgttcttaagttttaagtgttttagttacttaaaggaaaatttagtattgtccctctctattttagatagggaaaaatctcgagaaaaacctcatctactttttatttgggtatttaatatccatggtttctcagttggaataaaaaaaactcgtttaaatatttttagtctaagtatgtccaaggatttttccagccagttcatgagttttgactgcaagaaaacagttaatctagagttagatatcatgtgatattatttcttcttcctaaataaaatagtaatccataataacgaggacataggtgttaaatcagagtccgaagcaaatagtttacaatagaaatttttgttttgatgaagaagaacaaaatgtcacaaaaaccaagcattacaaactgaaaggaaacaacaacagaatagttatgaagacggattaaaataagcataagcagcaaaataactttgagagaatgtaagaattagtagaataactgcagcaaagaaagacaaatatgcccaagggttatctaagtacttgagtatcaaggtcgttttcaaagaattcaacttcctggagtagttttgtttataacagcgatgaacctcaatcaacaattgagatagataaatatctttggtgtcgaaaaccacttcctgacataactggttgaacatatccgcaacttcagaattacttcctagcgagtgctcaataataccacagtgatgcaaataactaatatcttcaggagaatctattaaattgtccataaatattatgtaggatgttatatcattgctcgactcgatatgacactgctcgaaagcaatgagattcaagaatagagatttggtacctacaaaaaattggacagtgggtggacttgtaagtttgagaagtaactgaactcagttaaaaaataaaacattcattgcttcattgtctaaatatatttttgccgttgctttacttgatgaccacgagataatttgaagataagctatataaccaatatctatgacttataaaactttgtttgatcaccaagacatttatttaatctagtagtttgtgttactgcgttacttaatgagcacgcatttaaatttatataatgtatgttctcgacaaagaaaatgttagagcgcaataaaatctactagtattatttacaaaaggtgaagggagatttaccatcatggataagtagaccgggtatctccaggtaaccattgctgaatttaatatcccaaaaccgatcggttttatttagcttgaacttaaaaccggcatctcttagttcggtcacggtaggtatcactcgttgtaggtgtttgtcagccacgcgtgagtaatttgcctttccggatgatcttgggaagagcagacttcgatggaaaacatcaagacagtgcaactctccattggatacgcctcttggaggcgagttctcggtcaacgtctcggccgttggcattagaggaataaagaaccgaaccactaattccactaaaccagtttggttctgtgtaccgggttgtaactctaataaccggttgagtacgaacaaaggaagttgattttccagcattatcatgtcacgttgaatcgaatgcatcgatcctcgaaccgcgaaaactggatcgttatgatcatatctacgtaacagccaaaaatgaataatcaaaatcagtagttttagataacccgatttaaaatcataccggattagcaagataacttgacaaaaacaagaaattgaatcacgctaacccgagtttcaagaatccttcattgactccttggaggagctcgagaataaaacagccatcaagaagaagcatttctgtgaactcgttactgctcaaaacaatggaaccttcgtagcaagcacgagccttctcctccagctctatcatggcgtcaagaaacacttcaatgccttggttcgtacgttttaataccatattgacggcacgccatttatggcactccatggactgtgtttgctgtctcccatggtgatatggaccaagtgagacagtctgagggaaatacgacttcttgtcgtttccatgtaggtaatgtggaactttgtatatacagagcttgccccagctagttctgtcatcgtttctgtatgcttgctcgagcttgtcttttattgagatcacccactcaagtcgtttggtcccgctcccttcgaccacctcgtttattccaggtttagaacgagtgtcttgctggttctccaagttttggtcttcatagctgatacttttgggtaaaacgacacgttcggattcttcgttttgtctacggacattttcgacgtattctctcaacttgtcataagattttccttttttgacatcatgtccagtaagccaaggaatcgcccgtggtcgtaatggcaatggttcaggtagtactagtggctgttgctttcgtaatcgtagtagttgttgtcgtggtggtggtaggagtcgtagtcgtagtcgtggtcctaaccgtggtggtggaggtggtggtggtggtggtggtggaggtggtggttgtggtggtggtgctcgttgtcgtcgtaattctagacggggtggtagtggtggtggtggtggaatagtaccaaaagtttccattttgttggttgaagctataccaagaggaaatgagtaatgaattcgagtaaacgaagtaacaaataaagaaagctaaaatatatgtagatatatatagaaagcttcaatcttttaactcttttataaaaagactcaccataaatgttgtcatactttatatttaacgagtgagattgaaaaagtcaaacttcgttaaaaaaaatcctgataaattcttgttatacactagtaaaataatatccctcttatacttacaaaaacattatattttctcaaggtataaaaatattgcaagtgtatactaattgtctaaaaccaattttaattgcaattacgaagtcaacatttctttgttgatgaaaactgtatgagcataaattaaaaccaatgttttgggggttcccttgtttttgctggttaaaagctttttccagagattgagagcgagacgtaaattgggaaatgtcaaagcaacgctgtaactaatcttaaagctgtgaactggccatgtgtttgcttattttgaaatctacaaaactcttataaaaagactctaataaatgcttctagtttatactatatccaacgtgtgagatttgaatttgattaattaatttattctttttctgcatttcaactccaaaactctcattaaaaaaggaaaaactatgtactcttaataaatttgtcgactctcatatatagcttgtagtatatatatatatattcaataactacataaaataaaacaaagtcatgagaaaaaaaatgttaccaaagttcaactattaactgatttcatttttcatgtaaaactaacaattattaggagacgaaacaaaacaaaacaaactgtacatccagaatattaaatgcaaatcttttttttaaaagttattgtataacaattttattttataaattatagatgtgagttttatatatgatttctcagacattcgaagaatcaactatgaaactaatattacaaacaaacacaccctttttttctttaaacaaatcgatatgtatcgattaataatacagaagaggagaagcacattactaacgaattaaacttgaagctgaagttggtggattgtgtacagagaaggtgagagatatctgtcttccatcacataccaaagttggtctggactttactcacgagatgctctccatagacagctcttttgaaaacttggcatcctcttctccctccagggtacttctgtttacatatacccaatggctccactaccgcgtcgaaattagtctgttcattcaaattaaaacatgattccaaatccaacagtggaaaaacacaccagagtgttaaaagttttaaacctcatagaaggatgcaacacaaacacagtattgatgagagttattgatcattctatgaagtgtggatttgtatactccgtgtgaaagtatctgcattttatgattccaaaaggtttttcaaaagggtattcaagagcagggcttcccctggaattttgggtgccaaatgcacccaaaaatatttaaggttatttcaaaagattttaaaaattgaggccaactagaaaaaaataaacaaaattgagaccgttttgtaaacaaattttcagaagaatttcaaaaacaatttcaaaaacatgttttttgatgaggttcaggaccggccatgttcaagagaatgcgttaaaattctcactttctttcaaccaaaacaaagagatagagagatgtgagtgcttgaaacagagaatcaagagagattgagagacagagagtacatagggatatagtttgagttcgattaggttactctgtttgtgccccctaataaaaaaccatgtccattattgcttagccaccgaaattaaccttcttaaacttgtttttaacaacaaaatattattccaaaaccaattttggatagaagaaaataggaaatgttgaaaaacaagaaaatgcaaacattccaaattgaatgaaaaaggacaaaagttaagtgtttggctcaaaataagcataaacagtaaagaaactctcacaaaatgtgagaagtagcaaaataactgcaccaaaaaaggaaaaatatgcccaaggacttctaaggttgagctggtacttgtgtaatatgactgcactaaacagactccacttacgactgtaaaaacggtctacaccaagacaaagtggatatagataactatcaatgggatcgaaaaccacgtcttgacataatttgtggaacaaatccacaacttcagagtcactctcaagccaatgctcgatgataccacaatattgcaagtatctaacatcttcgttagaatttattagattctccacgaaaattatgtaggatgttatctgtttggttgagtcgatatggcattgctcaaaagctataagatttgacaagagagacttggtacctacaataaatatgaaagaggttcgtatgtttaattttaataatgtgatggttctgtagataaatttttggttttaaagagaacatatgtgggaaaggaaggaataaaagagtaggaaagaaaataaaataaaagttctaacttaccatcatggggttctctaggaaaaataatgtatacgcctaaatggctaatcattccgaattggtgaaataggcaacaattgatgtcagtctatttactttagcgacttgtgggaaaaatctgaacaaaaccaatacatgtcgctctatttggttttgtacaaaatcattaacatgcagataggtatcacgtttgattcttaggcgacaacaatataagcaaaatatgatttaaaactaataaaaacgaaaatgtgaacttaccgtcatggataagtagtttcggtatctctagacaaccgtttttgaattgaatatcccataaccggtcggattttcttcttttgaattttataccggcttctcttagttctgtcacgcaatgtagcaatttttgttggcgcttgtccgccacgacgggtttccaggaccatctacgcgataaccttggctccggtttcagactaggctggagcacacttcgacggaaaacatccagacagtgcaactcttccttgtccttgtcagcaattgggtgaaagaatttattgttgttttcttgcgaattctcgattttggttgatggcatataagttggcatcaaaggaagttgattttccagcattagcatgtcacgtcgaatcgaatgcatagatcctcgcatcgcgaaaacagggtcgtttcgatcatagctacacaccaagataaaaagaaaaaagttaaaaaagaaataaacgaaagtcaacatttagtttagtcaaccggatctgaaatcagtccggtttagcataaagctaaatcatgcttacccaagtttcgagaatccttcataggctcctctgaagagatcgagaacaaaacagccatcaagaactagcatttgggtgaacttgttactgctcaaaccaataggaccttcgtagcaagcacgagccctctcttcgagctctttcatggcgtcaatatacatttcgatgccttgcttggtacgtttcatgaccatattgaccgcacgccatttgtgatagtccatgggtcggagatgttcgtccccatggtggtacggaccaagagagacagtgtgagggaagtaggaattcttgtcgcttttttgaaaggagagtggaactctgtagatacagagcttgtcccagctagttgtggcggcgtctctcattacttgctccatcttgtctttgatccaaatcacccattcttcccgtgtctcttcaggttgttggtttcgggtttggagtttttggcgcatcatgaaggtgaggaagtaccaggtcaacatcggtcgtagttgataatttcttcttgcttttcttcttatgataatatgagggaaaggaagcttcggtccaaatggtagctggggcggcggcggtggtggaggtggtgatcgtcgtttactaggaactgccatttttgttttgttgaagtattttaggagattgagactttgagagtgactggacgcttatattattggacttgtttttctgtaatgacaactaccaatattgacatctaatcatacttatacttaaaatgtgttaaataatcgttaaacgtattggataatgaatgcctaggcgagcgatgtttctttgacttttcttcaactactcttgatagaaacaattactcttattaaaaaaaaaaaaatgttgaggtgctcttatagaaagactacaagaaagaaagtcttaaagaaagactacaagaaaatagtcttataagaaaaaatgttgaggtgtttctttcacttttgtagtttttctataaaagcatctcattgtgccgtgtgccgcgtttcctaaaaaataagaaacatttgtagttaagtattgttagaacatattactattttataaatttgttatcaagttattttgtgtactacactttgcaaaatgttgttgaatggtaatataattatcaaaccacttttaaactattaattctgaaaatcaaataataaatttatattaaaggattagataaattcacttctttctttcgctctaaagtaaccaaagattagatgaaaagaagaacatggttgcttaagaacgaaggtagggcttttgcttcagaacaatgtaagaaaaatagggtttctatattaagttgcagatgatttgaatagaggacaaatccctctatttatacaatatttagacagtttaaggatatgctaaacttttaattatctaaagattgaattttcattccttccatttttcgtgagatcctccttttttaaatggaagtcttctctttttcgatttattcacaatctctctggtttaagtcggtattgtcgaatgtgttaattcatgcaccaacataaaccaccggttccactggtctcattcatagtctaagacttgattattctgagatgttagttatgcttacccaccaaatcaacgtttttagtattgtttttcaacaacattccaaaacccaaaaattacaataccaattttgaaaagaagaaaatagaaaatgatgggaaaaaaaacagaaaaacttaacattccatattagtaaaaactatataacaaaacaaaaaacaaaattaagggtttggcttataataagcataaatagaaaagaaactctcacataatgtgagaagtagcagagcaactgcagcaaaaaatgaaaaatatgcccacggattattaaggttcacctggtacttgtatatcaagattctcttaaaaacattccacctacggttagaaaaacagtctacatcagtagacagtcgagatagatgactattttggagatcaaaaactacttcttgacatagctgcttgaacaaattagattttatacaaacatatgtgagtaatgaataaaaagtaggaaagaaatgaaaactttttagcttaccatcatggattagtagtttgggtatttctagataaccatttttgaattgaatatcccaaaaccggtcagtattccttctcctgaactttacaccagctcctcttagctctgtcacgcaatttaccagttgttgcaatcgcttgtccaccacatacgtattcttagtcaacctcattagtctagatctttgattcggtgtaggattagactggagcagactctgacgaaatacatccagacagtgcaatttgcccttatcgtcaagtatgtccaatgatttttcttgcccgttcatgagttttggttggtcaacttcggtcaacgtctccatgcagagctctccccagatcgttgtgtcgtcgtctctatgtgcttgatcgagcttgtctcttaacgatattaaccaactgtctcctgtggtctcttccgacctctctcctatcacctcgatctcacagaacacggagcaagtctgctcctgactcttatagtcttggtcttgacccggtctggtaatttcctctgtacctccacatctctgaagagtcaatatttcggctaaaccatggaggttttgatctttgactggttcggatagttgattgttggtgaacatgtctttgttgatgagaattggttggtcattggaatgaacattaactaaatccattgttggttgaagctttttcaggaaattgggagagattgtaattgtgagatgtttaatgcaacgctgtaactaatttaaagctgtaacttggccatgtgtttgcttattttttcaatcaacaaaattcttttaaaaagacttcctactcttagataaagactctcataaatgcttgtagtttctttatatatttaacgaatgagatttcagtcatccaaactggaattaattaaaaaaaaggactttgtactcttatacaacgactctaattatatattcttgtggatttgtagtatattcaaatttcaacaagttgcaaaaaaataaaaatactatacaaactcttataccgaggtgcatttatatacactaaaacaaaagtcttaagaaaaaatcttgatccacatttgttctgcttgcttcgttttagaccgtttgatccgctttctccttctgaatccaaagtaaccaactgttcatccaaagagataaatgcaaatcatttcttccaaaattttatttattttataatttttaaactatagatgcaaaattgcaaatcatattttcgtggtagtgtttcggttcaatggttcaggtttagtataccagttccttctctttgattttttttgttggtgtttatcagcttctccttcctagggcttagttttccctttttgggttttaggtagctgtctttgtcactttgtatgagttttgtgtatcctttctgatgtttactgtaaattccagatgacaaaagaagaagaagatgcaaatcatctttttcgaagtttcattattatttttcctagcttttcaaataatcaaacatgaaactaatattatcaacaaactaaattacctttttcattttgttttttgaagcaaatacatgtatatccaatgataacacagaagtaaagaagtaccttactattattacaaatcaaactttaagataagttggtgtattgtgtacaaagaaggagagagagatctgccttccattacatagcaaagttggtctggactttacttacgagatgctctccatacacagctcttttgaaaacttggcatcctcctctccctcccgggtacttctgtttacatatatccaatggctccaccaccgcgtcgaagttagtctgttcattcaagataaaacattattccaaatccaaatgtggaaaacacacaagagtgttgaaagtttatataacctcatagaagaatgcgacacaaacacggtattgaggagagttattgatcactctatgaagtgtggattcgtatactccgtttgaaagtatctgcattttatgattccaaaaggtttctcaaaatggtattcaagagaaaggaagtgagatgggaagaacaaacctttaacatgtcaccgatgttgcaaacaaacgatccagggattggaatggctgatatccactcaccgcccaagtttctcaccttttcaaagttaaaatctgttaaagaggcaagaccacttcttcacataaacattaaatcaaatgaggatcatcataataatattgacctgaagagcagttttgtcatcatcttgattcacaagagttaacaagcctgcagagaaaagtgttaccccattgagacataagcaaaagtttaacttgatttcacttcagggttaaacttaattaccatagtcagtgtgagctccacttgaaacatatcgttgtaagcagaagatcggaaaaggttagttacttgagctgataagtgaaaaaggaggagaagtagcagaaagttaccatccaatatcattttcaggttggccatttgtgaactcagcacctggataaccaataagacgcatcacccaaaaaggatcaccagccatctttccctcgaactcataaggtgatccagcaagagctaaggagattcctctcaaaatctttctagaaagatctgaaaccatatgaaatgaaattacaaactaagaactcttggaaacataacacataagaaacagagaaatggaaaaacacaccacctgtacatagcttaatatactcctccatcaactctttaaactcctgaggattctctggccttcaatgaaaacaccacaaaatatgatagaaatggtcataagactaaacaacataaccggataagacatcgaatataaattaccactggtttggcccttccataactttgcctatatccccatacttcccctgcttaatctctctgtaacactatccataagagaataaaatacatcaagagaattacatggttacattactaatgcctaaaggacacaaaacacttacatcaatggcttcatgaatatctggtattcctttggtcacattttctccaattctctgatatcctctgttcacaataacagaacagtctcaaaactattcgaatttagggggaaaacaattatacacacaaacctgtatccagcagctggagtcattttgattttaagtttctcttcataaggaagcttaaagaactcacgagtgatctctctaaccttgttaataacatcctctgatattccatggcctatctgctcaaaaatcaaatctttttcaaacccacaaaaaaggaacacaacttcgattacaaagctaataaactacactcaaatttgtgtaccacgtagaagaatccggcgtcccgacaagctttatccagttgctggacaacctcggccacaccgacatcctctgccatgtcgggatcatcacacttgaggagtaaacgagagatgtctgcaacatcgtcatgatcgaatttgagtgaagcttgatcagagagtataaggagatttagaagaatttagggtttcgttagtaccgatgactggtaaagacttgaagtccgtcgccatttctctctctatccttgagaatattcttcagatctgtaggtgacggctttcaagattcttcttgttaaactctaaaatatcaaacgatgaacttgctatttttagattcttttgtttttgaccgaaaaaagaaaacttactcaagattctttctttcaagagatttgaatctttcgattgctacagaaaggaggagaagtcaacgataagaaaagtgaaagaggatgaggaagattgttattttgttgttttgggctaagaatactaatgggctgttaagcttagttaggcccaagagagaaaatgtgtaatatgggtttaaatcttagccaagtacttaagatggaatagttaagtgttgttggggttgttaaggtaaggttgtgtaaggttagtggctaaggtaaggttgtgtaagtttgcttgcttgcttgtaacactaaggctaatgtctagaggtaaggtaaaatagttgctaagtttagagtctaataagagaatgggtgtagtgagtagaagaaatctaagtatgcaatgtgtgtgaagttgttttgtacgcaagtatgaatgattaagagggttaaaacatttgaagttgttatatagtcaagatcattgaatctttcgattgctctttttgtatttaatggaaaaataatttagggatcgagatttgaagttttgggttttgaaaaacaattatcaaaatggactaaaaaaaaacgctcgatttttctcttaagtttttcagtttaattttgcttaaaaaggaaacttattaatattaatgtttcaaaattttgtaatgaactttaatttctattgtaacagtgtaactagataaaacccgtgtaaacagaaggtgcaagaaataaatgctattttaatctatgatatgttagttctaaatcgtattcaacacactttttctagttaatttaatattattattttttaattcaatcttacacattctatttcgttaattttaactaaaaaaaagatttattttagaataggtgtatcatgaataacaaaaaatcgtatcttaactatagccaaggaaaacaaaatatatatgaaaaacgaaaatgcttccgatcatcattttatataaaaaactaaataataaataattattcacacacataaaagcattttagttttgagatattttgttttagtgttcagcttgaatgaataaaatattgattttggttcaaaagttcagtttacatttggttatatatatccctagatgtttcatcaaattgattgctttggcctttgagaaaaaaaaaaaaaaaaaaaagagattaaattaaagtcttcaataaatccaagatcgaaaatttacaccagcacaaaaagcaaaacttcaaggaaaaaactttatttcttacaataagcaaatgtacgtatgaagtcttctggcatcacttttaagacaaagacgaaaccgaacgtttcttacgaccattgcaaaactttgtgctgtttttatccatcttatccaacacgtagtgtgcaagcaaatcattagactcaacaagattctctcggcacaagaactcatcaccacaaagcctctcaacgtctctataatagtcatgcacaaacacatgcgtcttcggagtcccgccctttttgctccgagcaagaaccgccgccgtgaaaatcgacgacatcctccccggtccttcgtgagcatcgccacgtggcccgtccacaaagattacatcccaatcaacatcgtagacatgattaggcaaatcattgagacctaatttacaatctgagaagagaagattttgcacaggacgacactcgtttcccgcggcttctttagccgcggtgacgagctctccagcttcgtgagcttttgtcgtgtattgaacgtcgaaaacgtcgatctccgggtggatttcttcgaagtaagccgcgtagtaacgattctcctcgatgaacactgttctaccgttgtggtttaacgacttccaaaggagagtctcgtgtgtgagtccgaaaacgagaagattacacggtggagcgcagcggcggaggacgtcagagattgatttcatctctccgtaagacatgtggaaactatcgttggatcttgacgcgtagtgaagcaaagcgttgattgcactagttggtaagttggagttggagatgggagatgatgctgaaggtgtggatcctccggtgacgactgcagctacggctgcggcgacggaggtgtttttggaagggattgtgtctctagtgtagagaagagtgaggagaaaaactatggtgaagaaagagacgaaagcgagaagccataaacgagtcgtgctcgtttgtttttggatgtaaggatgaagaaggattagttttgtgttcgtgttccctgatccgttcttcattgttcactcttcttcttcttctcgttcctctgttttcttctttagaagagttttagaggaagaaggagattgaaggatggttataagatttctcaaagggataaaaatgagggttgatttaaaaggaagtaagtagtgagctgttttacgaaatgtgagctataagcaaaattttgtgttaacctaatagagcaatgaataaaacattgtgatgtactattttttactaacgttctagaagttaaaatcttggaagttaatttcttttatttttttaaagaagtgtttatttgggaatccattttttcttgaattatttgttatatttatataaacgcaacgtatcaaaatggaatggtggaaactttaaaattcaattttctttaggttcttaattactcgattatgattaagttagtaagctggaaacaacttggtttgacgtccatcgctaattcgctatttatggatttaattgtaattcattatacactagtttttccccaaagagtgtatagctttgtgaaacaaaccaaaagtatagcttgatattttgaaaacagaaattagctgcaatagtttatgtaaaaaagatattaaaatatataaacgatgatgtgtgaggaggttgttgtatgtctaagtaggagagttttggtcattgcgagagacacaagatctaattacagaccaaaagtctctatcccttattgctttggtttagttcttaaggaaacagaccaaaacaacgagatacacacacgcacagattaaacatgaaaacaatttattattttatataaaataacaattaaaaatcatttcgctgtctttgactacccattggattgggacattgataagtatacattatataacttatgttcgtaaattttgaggaaaaacaaactccgaagaatacgtattacaagttgcaggggaattaaaaaaaggagttagttcataatcccttattactttaagacaaaataaaacatatattagtttgtataataattatcaaggggaaaattatactttctaccacaattctaatcaagtgaatccaaatttatttgaataaatactattattggtcatcttttagttacaacttacaacaaatgaaaatctaacaattgcgatgataatcaatctaatttttttttttctttctcttttgttcctaatcactttattgataagctccattttgattctcctcaccatgtttgcctttgggctaaagtgcttaccctactggagtattggtggtcctcatgaaagacgttaataagaacccaattattaaatgtcgcttattctgttgagaaaaaaaaaacaaggtttggcccattcaaaattttgaggtcaaaacccaaaacaccttgccacttgccaagcccaatgctacccctccgataaatgtaatcgcataaatattattttgtatgccgatggttaagagatgatattaatgcgttgagaaagaacaaatgtgatattaatgcgtggagaagaacaaatgtgaacgtacgatgtcattttctttgtaccaatacaaaatttatacaactacgatccaattttgttaggtataatttgcaaaacaagctatgcttctatctcgtgttcgtgtttattttcatcttgtcattgtctacttatagtcttatatgttatattgtctaccacaacaaatcatatcatatgaacacgttacacatggacggtttcgaaatacacattaagggccgatcgtttcttaatcttttgagttcttttatgtatataattcactaaaatcgagttcatttcataatatcataaaaaaatcatccaacacataatatacatacacacgcgtgccacaagattaaacatatttcaaaacttttcagaataataactgacacagctagatgctctgctccgtaacacaaaaacacacacacaaaatgacactcttcttcttctactctcttctcttccttctcctcctcctccgtatctccaccgcctctctcccggcgacgaactacttcgactccttcttaccatccgacgccgtcgcacttctctccttcaaatccaccgctgatctcgacaacaagcttctatactctctcaccgagccttacgactactgtcaatggcgcggcgtcgattgctctcaagatcgcgtcgttcgtcttatcctcgacggtgttggtctccggggaagtttctcaccggagactcttagtcgtcttgatcagcttcgtgttcttagccttgagaataactcaatctcgggttcgattcctgatctatctcctctcgtcaatctcaaaaccctaaccctaagcaagaatggtttctccggtactctttcttcttcaattctctctcttcgtcggttaacagaacttgatctatcgtttaacaacttctccggtgagattccgtcggggatcaatgctctgagtcgactcagttctttaaatctcgagtttaatcgacttaacggaactctcccgccgttaaatctttcttctctgatttcatttaacgtttccagtaacaacctcaccggtttagttccgttaacaaagactctgttacgattcaacgcgtcttcgttttcgtcaaaccctggactctgcggtgagatcattaaccgatcttgcggtttacattcttcttctccgttctttggttcacctaaaccaaacaccacgtcatcaacatcttctgcttcttcgtctgaagcaccggttattcaaagtgaacagaacggtgaagcagcgatgattgttccaccggtggttaaaaaggttaaaaacggttggttagttcttggtttcaccattggtctcgcttctttgatagttctaggtctctgcctcgtcgtgttctcgttgtttataaaaaaccggagagaagactacgatgacgtgataattacgcaacctaagcgagaagaagaaaacaaagaaatcaagatccaatttcaaaccactgcgccgtcgtcgaaaaagcgaatcccaagaaacggagatttgatattctgcggcgaaggaggaggaggaggagaagcaatgtacacagttgaccagttgatgagagcttcagcagagcttttaggaagaggatcagtaggtacaacgtataaagcggtgatggttaatcaaatgatcgtgacggtgaagagatttgctccgtcgaaaacagcgattactagtgatttagagtttgagaatcagatggagatagttggtggacttaagcatccgaatcttgttccggttaaagcttatttccagtcaaatggagagagacttgtcatctatgagtaccaacctaatggaagtctcttcaatcttattcatggtaatgttcttcatcttcttctcctctgtttctttttctcttgggaacgttagggttttagttgaagtcactgagtcacgtaagagttgttgcttttttaggtctagttaattaagtaattattatgttggtctcgatcatattgaggtgatactatgatagagaccattgtctccattataaagctgaaacctttgtctcgttgatgggttttggtgcagcttttattattttgaaggaactctagacttgaccacatagagacaatgacggagtttatgattaaaatatgttttgtctttttctttgttgaacaactgtagatataagacagagaatctgttaggaatctgtgctattttcacgtgaaactctagtcatttgtcaggaatttggtgtgttttgtcttaggacttgagctagagtggcttcttggttgcatattactcgtttatgattggaagtgtatataaacaaacatccattactaaacttatcatctgaatcatcatagtaaaagagtcttttcttttttatcttgtggttattgatatgaatagactaactaatgactctgttttatcccttgatctctcaattacgttttcataaaatccaggttcgagaacatcaaaggcaaagccattacattggacatcatgtttgaagatagcagaagatgtagctcaagcattacattacattcaccaatcatcagccaaattccatggaaaccttaagtccactaacatcctccttggtcacgactttgaagcttgtgtcacagattattgtttaagtgtcttaacagactcatctgttcctcccaatgacccggacatctcttcctataaagcaccagagataaggaaatcaacagatagtcgtcccacgtcgaaatgcgatgtttactcgttcggggtcttcctcttagagctattgaccggtaaaaccgcttcgaggcaaccgattatggagccaaacgatatgttggattgggtaagagcaatgaggcaagaagaagaaaggtcaaaggaagagaatgggctagagatgatgactcaaacggcttgtctttgccgtgtaacatcgccagagcaaaggcccactatgaaagaagtgatcaaaatgattcaagagattaaggggagtgttgtgatgactgaagagaacgaaaaattcctctgatcaagtatgtgtttatgagggttaactggttaagttgggagaaagaaaaagagtattaaaagtgtaaattttcttagcattggaattttcttaatatcgacggattttcgtaataaaagtataacaatattgaatctgttgacagagaaaaaaaaaggctcttgtatatacatacagctttaagcaccttgaaacattgagtgtcggttccacgagtgatcatcctcatcatcatgatgactcttagacatgacgtgcatagtggtctcatcgttctgctttatccactcagagagtttccatggtttctgccatttccatttaaactgaagcagccattgatggtgacttcttttccacttccatagcttgccactctgtcccattttcttcattgctttcatcttcctcgtctcttctaataaagcttctgattctctcaccgagatattgactatacccggcccagtgtatttgagatgctttgttgctcgatgataagtagaagatggagatgatgggtcgtcactagcgttattatctccatagtgctttgatgagcttcttgaacttccctgcaacaagtgaaattttgcatacgtttttaaggagaaattcccaataaagaattttggatcttagtgtggaaatatggattaaatttaaaaaccgagtatgatgatgatgttgaagccagcgcaatggacactgtttgctcccttgtctttttctctttaaggatttctcggttctggacttcggttagttgtaataagcagaggaggtcattgagctgttccttcttctctttgatgtctctgtctttctcccagattttggacctgtttgatgtttaaagcaagaccaaatcaatcttccatttcatcccaaagtttgtatttttactgagtttattcgggtgtaatagttgttaccttgcttcagcagtggaatcaaacacatattgaagcaaatacttggcatcagtcatggactgaatgtggttccaccgaggcttagcatgtaggctatgctctctttcctctgcttctgagagctgagagcccatggctgtgagagcatttgaggaaacatccaacatactctcaagagaagctattctctccaatcttgtgtttggtgataaaaatctgacgcatacacaaaaataaacaggtcataaagtgaaatagtccactcccaaacaacttcatagtttacactactgagtcgtttaaagtatattgttgtacctgaactgtccatttttctcttgatgggaatttgaaggaaactccatctcttgtctcaacgatgttaactctacagccagtgcagctcgtctatatgcaatcagagtggcttattgattagaaagaaatttgcagataacaaacatgactgaaacagatttttgaagacgcacacttgaatttgcttttcatattgaaaacgaacttgatgtacttttgccataacctctagctcgttatccagccatttccgaagagatttttcattcgtctgcaaagagtaagaatttgttacagttgatacttgttgcaaattcataactgaattaggaattcttatcacctgtcgacttggtggttggccattggcaatcactggaaaagaaagcaaaggattatgatcgaaacaagaacaaaataaagtgtgtttcggaaaactagttacctgatatatcatgaggtgaagacttgcgggcttctagcagctctttaagtcttttggtagccattgctgcttcttctgtttttctctgaagaacctgcaagacattaagatgcattttctcttgagactcttatgtttctctcaagcgggaaaaaagacaattatatcataagaatctttaccattttctgacgtcgattgagagcttcgagtttgagtctttcatgctcagtttttcttccttctttcttaagctacccaaaaaacaattaaaaagtgtaacatgagatcagttcaactaaaaaaattcaacggacaataaagaggtgatgaagatagagataaagtacctgcaacaactccttctcttgagaagctttccactgccggaattgttcagcttcttgtttcatcttctgttgtagttgaacctggataaaagaaaaaaaaacagaacaaaagtcaaaatgtagatctagattatgtgatatagtaatatagaaaaatttcgatagcacacgcaaccttttgagccttgatgcattgtatttcagttttcaaacgctttgctgcatcttcacttttttgcttttgttttaagacctcaacttgattttcttgtttcttcttaagatttaaaatctgtgtctcaagtgcttttaatttgtgtgcatggttatctcttgcaacttgtgcttgtctatcagagctagctgcaagttcctcaacttcagccaacaacatatctctctcatcctgtagatgttactcatgactcgggtattagaaacatacataaaatatcaacaagaaaaattagaatgttagtttcacctgtacagttcttttctctttctcaagttccatcatttttttttcgaaatgttgtctgatagtttcagttccaatcccacatactctcatctcggactgcatatattaaatcataagattttcaaaataatccaatcttagtcattaggcacagaaattttcaattgagtattgactatacctctttctcctcaagacgtttacttagttcatttagttccttgcccatgctattctgcctaagtgcatgttcccactcttctgctgcaccaatatcttcagaaattccaccttgaatcaggatatttcaggctaaaagtaagggagaatgcagaatgcatttcatagaataagtttcttgagaagacagtgaccaaaacctgatgttgcttcactcatttcataatctgaatccatgctttcgaaaccccttttaaggccatcatcttttgaaaaaattacaccatcttcctgaggtagaacaactcttgttttcagcagtgaagaaatgtgccaaataaatctattgtggttgcctaatgtatacagaaattacctgtgcatcaatattgcaataatcaagagtcactctcttgctgcgatagatgtgaagttctcgagaaagctcttcattggcagactctagtttcatgattttctctcgcattacctttaaaattgaaatctatactattattgatgagaagtttataaaccttttgaagaatatcagcagaagttatatacctgcacttcctctgatgaggttgccccacgagcacaaagtgtagcttgtagatattgtagctcttgacgcatcttttgcatctcagaacatattaagtctttattggcctgtgcacccaaataaagaagcctttcctgttagtgctccgaagtgaacaatcttagtcctgttttaatctattttttggcctcatgtactttttgtgttagctgatagcctgatagtggagttctgtatgcagaaaaattgaaagctcatctaagatagttccttggtacttacaacaggtttgttctggatattccgagcacgatttgcatacttgagcgtgttaagagtttcctcagcattgatgtcagcaggactgatgcaagctacaagaataacacaaacacagagagaagttgaatctgtgaactgataagagatttccaggggattacctcatacaactaagaagtttacctatcatgactgttttactatttccaccaagagaatcctgcagtaatgtaaaggacatctttaatggaaaatttgtcacatgaatcatatgtatgtatagttaaatgccagtaaagatactacagtgttacaaatcatatgtatagttataatatgtacagtgttacacatatcaggatgtagaagtgcaaagatagaaatgaacctgcaataaccgagtaagtttactatcacggtatggaacatgtgcaccttcttttcgccttttctcatccccaagcgcactgataacattaccaagtgcaagaagtcccctattgatgtgaattcctgtttcagagaagaaagaagaatgtcagttaacgttctcaagaggattaaaaataggatgcttagtttttccaaccttcttttaatcgaacaccgcctgaacctgttcgtttagctctttcagatccagcaagatctaccaagtgaagcttggcacaacaatattcctcacccatatcttcatctacggtgtctttaaccactgagattgaagatatcttgcgcatttgttctaaggtaatcgtgaagatggcatgtgaccgactgtataagaagaatataactacattttactactggctaagcatcattaatggtaactttaaagctatgtcttgcttcttatggagcatgggtatagagatacacacctcgactcattattcatattggtgctcccagttgccctggttagagatccttgctctaggcaggaagccatttcttctttagtagctatgggaacttcagttgcaccggatagtgttataaccccgtttggtgattcacgaatctgcaccggtgacttactaagaacaaccttcccaggggttccattggctagtctgttaaacggcacactactatccagcaaatccagaacttcttcttttaaaatctacagattaagatttcagttaatatccatacaactataaatctagacaaattaatctagcaaccaacctcgatgaaagagacatgtaactggaaccccatttggtgctttactgaatcaattttgttgaacaaagcactcataacttgaggaatcagcccattttttgtaccatctttaataccagtccccatagtgtatgtctttccagatcctgtctgcatcatttatgtaactcaaatagaagaaaacacaagcagctaaaaccaaacttttttttatgtacctgaccataagccaagacagtagcattgtatccatgaaacaaaccatcaacaagaggagcaacacattcttcaaacatcaaagaagatggagaaccattacttccatatacatgatcaaatgtaaatggatgtgttcccatttgcacctatgcaccatcaacaacaaaacaaacaagaaccttctattatcaacccataataatacagacaattgcattatttatttatttatatatgatgtaaaaaataaaaacaattgacactgttttataagaagaaataaaattaaatgagtgtgtcagagttagaacagagatttgatccggatccaggaatagcgtgaacaacgacgaacgcatttaaacaccatcggagaagaaacgtaaacgacggagaggagacgaaactgactccattcagaatgggaaaactgacctgaggagttaccggagaaacagaaacgcattccctacaaccttgagttacttcatctccgatcaaaggacgaacgttaaccgctactttaacacaacaactctccgacgacaacgacgacggaggagaagaagaagaagaggacgataaggaagaatgtgattccatcgaggaatctccttttcttcgacgagtatgagaagaaaagttgaatcagagtctcaatttcgtcttgttcctcgggagaagaaaaagtgaagaagaagctttactctcttcactgatatctctctggtttgggtatacgaggtatctttatatttccttttgtgccctccacgagactctaaatttactttttttgccagccacgtcagcttcttcttcttcttctattgacttattcttatttaatccactggtccgtgtgtattgaaacaagatcggatttattattatacagatctgtctaccacacttttattattcatataaaatacagtaatgttgttggttttatagacgagttaaattaattatggtgcgtgtaaatgagacaactgggtgtgtaaaggtcgataattccaaagttttggtagtttccatcgtctctttaagttaacgacaaaaattattaaattacgaagagtcaagacattcgtttctggtccttcttctgcgcgggaaaatcccaacagtaaaatacagatacagaaattatattaaaaacaaaaatcccaaagtgtagggaccgcagtacgctctatttgggcctttattgagccctacctcacatgtctatctgcattgcagaattcatcacttggtttgtatccgtttcctttatccatttttcgatctttttagaagatatactaagtattttcagtggttttggaccttttggcttttgatcactggacggaaagagagaagtcatgaacataagaaaatagtgaaatcatcaaactattgtaattggtaaaatgagctgcatattattgaatgttagtttttctaataatggtcattgtacgataaagttaactaactctacacatttctgcttaaaaccatgattaatcatgatagctttgaaaaacgtggctatcttttcacgttttatttagtaagatttgtttagattgactcaactcttaacataaataacttaaatgacacacgtttagtttcaaaaactgtagtaacccatatctttggtaaaaagacgaaataaccttaatgattaattgtaatcaaattaaaataaaaaataaaaaataaaacaaatcttttatattttaaagcacaagtcactccaccaataaaattttgacaaatcagcaaaaccaaattatttttcaacagaattataaaaggaaaatttgcagatataacttaaaagcatttataaattaacaaactaaccaataaaaacaacctaacaatataacatatgtaatatatattattacaattttatccccaccactaacaccactaaccaccactacaaccaccgctgccggataaccaccgccgccggccaaccacctccgccgccggccaaccacctccaccgccggacaaccacctccgccgccggacaaccacaaccaccgtcgccggaaaaccgacgccgccggaatcaccaccataacgaccatcgccggcaaccaccgccgttgccggaaaaccgccgccgccaccgccggacaaccaccgtcaccatcgccggacaaccaccgccgccgtcgccggacaaccaccgtcgccggacaaccactgtcaccatcgctggacaaccaccgtcgccgtcgccggataaccgccgccgccggaactaccaccataaccaccatcgccggacaaccacctctaccggaatcaccaccgccggaatcactaccgccgccgtcgtcggaatcaccatcgccgccgtcgccggaaccaccaccgccatcttcgctggaaccaccaccaccaccaccttagatcattttacctaccccttaagttacttacttaataattacatatatagtgctatattcttaatttttctctcaaaaagtattattcatgcaaatcacccattataaaatcaaaaaagaaatcgtggataaaaaagaaaaccaaaacctatattacataattaaaacaaaaacgaaaatccagttaacttgagaacaaactttttttaaaataataattttgaacaaaatttagataaagaagaatcttcttcacatatttcgtttttgattttaaaaatattaaagaaaaacaatttaattttgatattgcatattataaattgacttgttttagcttaccaataatattttgacatgtatcaattcacaaataattgatttgatggtaggaatagaagaagaaaaaaaacggttatgaaaacccttggagaatttatcatgactaataaaattcattaaaattcaaatatgacaatattatgtaaaaatctgccgacattaataaaagtctgtcgtgacgttatgaaaatttctttttcaaaaaaaaaaaaaaatctagtcaaaccggatttaacatacaatcagaccggaaataatttaattgagggctagctaataaatctcatataacaaaaaatttcgaaattttaaaaataaatctgtcaaaaaaagtctgttattactaaaaaagttattctagtcataaacaaatcggccataacattgacatgagtaaatctgttatgctttgacactgaaaaacaaaactgtcatcactaaaaacaaatctgttatcactatgtgactgtgtagtaattttattttttaacaaaaatctgttgtaaaacaccaaatttgttaacaagttaattaaatctgtgattacacaaaacaactttgtcatgcctatataacatttttcgaggttaacaaatctgttataacacaacagatttttgggtgcaaatagaaaatctgttgccaccataaagaaaaatctgtggtccggaaaacaaatcagtgacagatttggtttcaacattcttacttttgaaatttaaataaaatctgtggagactatatgaaacaaatcagtcacggttaaaaaatctgcgaaaaaaaaaaatctggcgtaacataacacagtaaagtctgtggtacaaaacaagtctgttgtaaaaaatctgtggttgaccaacaaatctgtgatcgataacaaatccgtcgcaacaagagccacagatttaccaaaaacgacgatggcattttcgtaaataaatgtggttttattgccttgctggaattaaatagtaatggcatttctgtaatattgtttttctctgtaaaggaaaacaaggataatttaggtataattattactcaaataactcatatttttagcattccttttgggtcattatgtataaaatatgggttactctagtaaatttcccttttatttatcccctcgctaaaaccatttccaatggttgtttttatttattcttgtaaatatagaagaaaaaatagagatctgatctctattttagaaataaaaatagagatgggttagagtgaaatagatgaaaaatagattataaagattaaaaaaaagatgagttggagatgccctaagttaaacttttaactaccaaggctaccataggtgaattttagccgaagaatatccatttaaaaaaaagtagaattgaaattttattttaattggaagttccttgaggttaaagaaataaaattcctccgttaaattaaatagaaaatatagaaaatcaaatttctctgattttaaaaaaattaaaaaaaaacaaaaaaaatcaaaaacaaccctgaaattttgaaaagcccagcataaaggcccagtataaacaaacgaagacccaaatctttaacaaagggcaaacgagacggcctcccatatcggaaaaaaaaatcatattgtatatagaataaagcaaatcaacagagttagatataaacaatttttaatctttctccagcctctacttttcaatttgtctccctctaaatctatgcaatttacggtcaaaatttgagagtgcaacaaaacaaaaagagtaattttttcttgtacacaaataacgttaaattgttcggttaggtttctggtttttgagtttttctattcatctagtcatccaccgtcaaaataaaaaacggcgacaaaacagagcatgagcatcttttcctgtaaacgttaaccaaacaagtagtactactactattgttaacacgacaaaaacacaaccattggtcaatcctttgtaattattataacataatggaaatgagccgccctcgtgtataataatccgaacgtaacacacaagtcccggaatggaatccacaacaataaaaggcaataccgaaactacccttgatattatctttgtagagaagcttccaaagatggacaaaaggtttacgtgaatagtagagagggacaagttgggcaatatgggaatacgtatcatcatttacgtaaacacgtaaaagtcaattagtaacggtatccagccaccgactacataccgaccatgagtcccattatatgtcctcaatcctcatcaatctccttgtttatatatatagacgcgtatacgtaggcatatatgtcatgtaatacgttatacacatctatcgaataaacatattatacgtaaaaatcgaccattccatgttttttggttatagtttaaataaaaacataacttttatgatgttatcgtttactcacaaacaaacaaaatcaaactctcaataatacgatgattattccatcattatacaaagtcatatacgttatcttgttatattttgatttgctcttcattggtaaatatctgaaaaaaatatcgggtgaataaactatattatttttattatcattttattattcaaataaatttaaattaactaattagattatgtcaaaatatgtttgtcagaatatctcagaggttttaggcagagaaacgttctctttttccttccttttctattttttattattattttaattataaaaaacaatgagagataccattaatgaatccaaaaaaaaatctatctatatatgtatttataaatacttgaaaatattggatcctatattcaattatattgttctaaaaaaggacgagtatggtatctccactccgcgacttttctctagcttatcacaaacgtaattttctcatcctctatatctttaacccaattttagttttatactatagtctatatagtttcatgttttttttatatatagtttcacgtttttaataataactaaattttaatccgcggtacaccgcgagaacaatttatttttaaaagttagtatacataaaagtttgcaaattgtatctatctataaatatttttattttatagtttacaattgttattaagtaacgtcctgccaaacccgtcccgccaacccgtcccataaaaaaatcatttattttattaatgttaatcttatttatgatatgtttatgaattattgtttaaatattttgtaattttgtaataattaaatgttatcaaatatctctgcggtttgatgattataattgaattgttatagtcatggagaaaaatatatcaaaaatgataattttgtagtaaataaatgatattaaatattttggaagttttattttagtaactaatcgtgtagttaatgtggagagatttaaggaagattgttaaatgtcaaatatttaattcgaagattttttttctaattatcaaaaacaaacattaaaatccagtgatagttattgtaaataagtcctaactatatgatttatttcacaaaatggctgcaaaaatttcaagtttccaactataattcgaagtcggcatggacttttggaattttctcctctacctacaactgcaacctcggtctctttctctcttcacatatataagagagtcccttgatcaagaaaccagataatttccccaaacacaattctaaagtcctcctctcggaaagtaagagactcaacttccgagccgccatggacgccggagtagcagtaaaagctgacgtggcagtcaaaatgaagagagaaagaccattcaaagggatcagaatgagaaaatgggggaaatgggttgcggagattcgagaacccaacaagcgttcaagactttggctcggctcttactctactcccgaagcggcggcgcgtgcatacgacacggctgtcttttacctcagaggaccaactgctacgctcaacttcccggagcttctgccgtgtacctccgccgaggatatgtcagcggcaacgatcaggaaaaaggcgacggaggtgggagctcaagtagatgcgataggggcgacggtggtgcagaacaacaaacgccgccgcgtttttagtcaaaagcgtgactttggcggcgggttattagagcttgttgacttgaacaagttacctgacccggaaaatctcgatgatgatttggtgggaaaatagactgaaaaataataataaaatatcttacaatggtggctgtagctatcgtacgcggaatgcttgggcttgtgttatatgactacgtggttacggaaagattcctctgtttcgtcattgtattaaaatttaatcccacaagtcaaacatactgtacattattcttaatttagtattttcttattaatatctatcatttgtttggtgaacaccagaatattagactattaatgtaacgagtttttaatatttcgatcataataacaccaagctagttaaaggttaatatcttgttacgaagtcttgagtaagttcaattgtcatatatatgtaacggaagaggttcgttcgggtcccaagtgaagtggatcaaaggtgacttcacatgagaacaccaaaaatggcaggaggagaggtagttttagtttgatatttttttctttaaagatttttgaaatcttgttccttagtcctagttattttaacgagaagcctctccgatgaattcatagtaattttgatcgtgagtttttgtacatatatattcatagtaaattttaatgtatttagaagctaagtttttttttatcattacgatattacgaaatatatgtcgtaaagtgatagattgacaatgaaagaatgaagacaaaatatttaaatccttacggacataattggataggattttccttctgctttttggcatgtggtgggcagtgggcactactattttagattggtcgtttttccttcacaacttcacttggaacaccaaaaatggcaggaggaggggtagttttagtctcctcgagcattgttcggccagtaaacagcagccaatctggtcgaactaagatccatcttactccatttgatctaagtcttcttcaattcgattatcctcaaagaggtcttctcttctccaaacccgactcagatttccatctcatcatctctcgactaaaagactctctctcactcgccttggagatctacttccctttcgcgggtcgtctcgtcaaaacagagaatcttgaagacgatacggtgtcatttttcatagactgtgatggctctggcgctagatttctccacaccgaagcaaaatctgtctccgtgagtgatattcttcagcctgatggttctgttcctgatttcttgaagtacttctttcccgccgacgatttcaagagctgtgatggtgtctcgttgcccttgcttgttatacaagttaccgagatgaaggacggagttttcatcagtttctgttacaaccacatggtggcagacggtgtttccatgtggagttttttcgatacttggtccaagatttgctcaacaggttcatgtttcaattacaagcctcttgttctcaaagggtggttccttgaggggatcgattacccaatccatgttccagtttcagaggcagagaggtcaccaccaagccgtgaaccttcttccgtgcccattacgaaagaatggatttttcacttcacaaagaagaatatttcagatctcaaagctaaagccaacagcgagattgcctccagtagtgacctagaagtttcatctcttcaagcggtttcggcacatatgtggcgatcaatcatcagacacagtggtgtgagccgagaacaaaagacacattgcagactagtggtggacttgaggcaaagagtaaatccaccgcttgagaaagattgttttgggaatatggtctatctttcatcagccataaccaccgtggaagagctcttggatcgtggtttgggtgaggctgctttgcaaataagaaaattagttagctcgcaaacgaatgaaacttgtaaaagttttgcagaagattgggttagaaatattaagaacctaaattcaggcattggcagtaaagtaggtaatactatagttatcgcaagctctccgcggttcgaggtgtacaacaaagatttcggttggggcaaacctattgcaattcgagctggaccatccaatagtatcaatggcaagctttcagtttttcagggaatcagtgaaggaagtattgatgttcaagcaatcctatggggtgatgtaatagtgaaactactagctgatttggaatttttagagcatgtaactattgcatgattgtttcagttgggaaataaaaatgataacaaggacattgtctttggcttcgagtgactgtctattttctctttgaaatgtattctattgatccccaagcacaaataaagtgtatagagctgaaacaaaacaaaactgtgataagtaagctttaggagagacacatctttgagttcagcgaccaaaagaaaatacctcattcactcattgggcacttcaaatcagaaacataaaatgggccattatcatgtcatgtctggtcagagcacttatttgctgcctttcaataattgccatttttaaacacgttttttatgttacaatacgcaaaaaggacaacgacaacaaacaatttttgaacggtctttaagtcgtcgtacacaattctttaaaataaatagaatcttgtaagttgttggctgtagaaaaatttccttatcttataatgatggtaaatatatggtctatgttaaatgatggtacacagagatggtgtcacattacattaatattgttttcaacttccttatcttatataacagtcttgagctttggctttaaaatacagaacaaaaatggccgacgtaacttttatttcctcaagcattgttcgacctcaaatcataaaccaagaaggtcgtgaaaagatccatctaactccatttgatcttaatcttctctatgttgattatactcaaagaggtcttctcttccccaaacccgacccggaaacccatttcatctctcgattaagaacctctctttcttctgctctagatatttacttccccttcgctggtcgtcttaacaaagttgaaaatcatgaagacgaaacggtgtcgttttacatcaattgtgacggctctggtgctaaattcatccatgccgtatccgattctgtttcggtaagcgatcttcttcgacctgatggctctgttcctgactttttcaggattttctatcccatgaacggtgtcaaaagcatcgacggcctctcggagcccttgcttgctttacaagttaccgagatgagagatggagttttcatcggttttggttacaatcacatggtcgcagacggtgcttccatctggaatttcttcaggacttggtcaaagatttgctctaatggtcaacgggagaatcttcaacctcttgctctcaaaggattgttcgtggacgggatggatttcccgatacatattccggtttcagacacagagacgtcaccaccaagccgtgagctttctccgacattcaaagagagagtttttcacttcacaaagaggaatatctcagatctcaaagctaaagtcaacggagaaattggcttgcgtgaccataaagtctcgtccttacaagcggtctcggctcacatgtggcgatcaatcattagacacagtggtctaaaccaagaagaaaagacgcgttgctttgtagcagtggatctaaggcagagactaaaccctccgcttgacaaagagtgttttggtcatgtgatctataactcggtagttacaaccacagtgggggagttgcatgatcagggtctagggtgggcttttttgcaaataaataatatgttgagatctttgacgaatgaagactatagaatttatgctgagaattgggttagaaatatgaagattcaaaaatcaggtcttggaagtaaaatgactagggactctgtaattgtgtcaagctctcctcggtttgaagtgtacgataacgatttcggttggggcaaaccgatagcggttcgagctggaccgagtaacagtattagtggcaaactcgtgttttttcgtgggattgaagaaggctgtattgatgttcatgcgtttctattgcccgacgtacttgtgaaactactggctgacgtggaatttctggagaagtgtggctagtgtatgatttgattggttgagttattaaattagtgtttttgttgagttattgaattagtgcttttgttattgtctgctaggttatgatatccttcaattattgaatttattaatgttgctaacagttctgtgtttacaaacgacggaccatacacatgcttgtttagtggaaaaaagaagacaaagacaattattgaattttatgtttgttatttactttgttgtcacttgtcagctagtagtttttttacgtaaactagtgcttaattttaaagtttgttatggggcggtgcgtaagattatctttgtcttaatttacctaattttaaattacgtaagattggtttatccacatttatgtagatacaatttataaatgtaacacgcacatgttaaaagagaaaaagaaaaggaaaatcatcactcattggtgagtatacaaaggccaaagcacattagaatatgtgagtaaggtgcctcgattagaaaaattggaatcttcattgtaaggaaaatagaaaagagaaaatgactattgtttttgtctggctcacataggttttatatatggcagatgtgattcagaattcccactagagagaagaaaaaatggcagatgtgaccgtaatttcttcaagcattgttcaaccccgaagcacaaaccaatcgggtcggacaaagatccatctcactccatttgatcttaaccttctctatgttgattatcctcaaagaggtcttctcttccgcaaacccgagcctgaaacccgtttcatctctcggttaaagacatctctttcgactgctctagagatctacttcccctttgctggtcgtcttgtgaaagtggagaatcttgaaaacgacacggtgtcgttttacattgattgcgaggacgacaattaggtgccaagtttgtctacgcagaatccaaatctttatcggtgagtgatatccttcaacctcacggctctgttcctgatttcatgagtcatttcttcccatctatagacgttaaaagtatctacggtctctcggagcccttgcttgctttgcaagtcaccgagttgaaggatggtgtcttcatcagttttggttacaatcacatggttgccgatggagcttcgatttggaatttcttcaatacttggtccaagatttgctcaaatgaatacgatcatcagaagaatctcaagcctcttgttctcagaggatggttcctcgacaagatcgattaccggatccatattccggcttctgaggcggatgccccgacaagtgatgagatttctcagatgcccacttcgaaagagagagtttttcacttcacaaagaagaatatttcagagctcaaaactaaagccaacggtgaaaccggctcaagtgacctaatcatctcgtctttacaagcgctttccgcacatttatggaggtcaattatcagacacagtggtatgaaacgagaagaagaaacgcattgcaaagtggctgtggatttgaggcagaggctaaaccctccgcttgacaaagagtgttttgggaacgtgaacaatctcggggtagctactgtcacggttggggaacttttggatcatgagattggttgggctgctttgcaaataagtaaaatggtgaggtctcaaactgatgagaagtataaaacttttgctgagaattgggttaacaatgtaaagatctcaaaaacaggtgatggaagtagaatggtttgtgattctgtggttgtctcaagctctccttggtttgatgtgtatgggaatgattttggttggggaaccgattgcagctagaggtggaccggggaacagtataagtggtaagcttgtgcttttccaagggattgaagaaggaagtattgatgttcatgcaaccttatggtgtgatgtacttgtgaagttattggctgatgttgaatttatggagaatatgtaactgttacatgattgtttggctgagaaataaaacatgtacagtatttggctaaaaccaagcttagatgctactgcttgtaagttgtgatttattaggcctagaaaaataatattgattttggagctttgcataatcttatggattctgaaatttttatcttaattctattttccttaactttctttttttctttccatttttggttaccctaatcgacaatatttcagagtgggttgaggaaaattaattttatttcccaaatccaacgaaagttttccaatttttttttgtttcttaacaaaaaaaagagtctcctctaatttatgtgttataaaaggtaaaacttcttattctttatatttacgtttccatttcttttcaaacatttcaatattgacggctaaaacatcaccctcgttttatattagcctactgtaatatcattgagttttgatggattatggatgtatttgcaaggttgtttgagaaaaaactgatgtgttaattaggaaatcatataaggtttgtttatgtgattgtcttttgagttgagcatgaatcatcttcttcgacgatcacaagtcggtagcttgttgaggatttttccttgtaggttttccatattgcgcttccccaaaactgtttctttgccgtttggagagcaagagtgaggaagatttgctccgggagcaggagcgcaaaagaaggatagaaaaactacggaaatttatgcggccccggacagaactaagaagcatttatcagcgcgagaaggacggtgaaaagatggaatccgaaggagtaccgattcacaagatgttagcttcttacatatatgtatttgacctaaatggaattgaaaagtatttgaacaagttagaggagaaaagaccaaagggatttgctttagatatgctgcgtaagtcagagccgttactggttactaatgagtattacaatatcctcggaccatttagagtctttcggattctcagggaaatgtataagcgtttcggagaaaaggaagaccttacgccgtttgtggaacttagctaaggacatgaaagtgtctaaggacatcaatgaatatagttgcatgattctggcgttgtggttgaaagatgatatcgaaggggctcacgaacttcttgaagagtgggataccggagagcatcatctttccaaagtcaagctaaacgatattctgggttttgtttactgcagaaaacttgtaatacaaggcaccgagttgatggtgaattatatgttcgaagaacataaggaagaggaggagaagaagaagacggcaatggaggtgaggcgtaacggatgggaccccaagaaaaatcttgcattgtctgcgtacgcatgtgttcaatatgtggagggccagagagacattgagagtacagttgatgttttgagattgttggggaagcgtgagccacaagatgctattatggatgaagaccgattgagtaagaaaatggtagaggcaatgagaggaggaggatacgttggtgatgtttgaacaagatgatgataattatagtgaagatcaggtatataaacaaataccaaaacgaatatcaattgattagagatatacattttttaattttgggcgattatgttttcgtttgctacaactacacacgtttgcgctaattgttagaccagcctaactcaacttcgccacataaatgaattttaaaatatataaggcgaaatgtttttagtagaaaatgtttgtatacgagtttgaaaattcatatgattgtttaatgcttaacttatggttgaatatgtcataggactcatatctatggataattgctataattacagttgggtagtggatgatgttgattgtaaaggcttctcttcttcaaaaacatgggaagcttttgaggccgagagaggaggaaaaagactagtctgcttctataggatttacaggagtagtccctaccacctaaacagattgtatcatcatcagaatttgccttatgctctgcacaaattgaaacaaagggatcacttgctgatttgttgtgattacttctctctaaatggtgattggtattctcaagattaagcctcaaccagcaactgctctgctgttggcctgaacttctgtcctggattcgatgaagctctccaattgctccatcaatcattaggaaaattgctgttcaagcttcagtttttcacatttgaaaacaaagaaacaacgtggtccacaaccactcaatctggctcatcgattatcttcaagaacatctacagcgaagtggataataccattacatcgacagcgaagtggataataccattacatctcgaagacacattggagaaatttaatgatcctttgaatacaatagcctcgctaaacctaatatccaaactcactcccatagaataaggtgaataattacatactatagaagtctaggacataattgggatagaaatgtaaattcccaaactttggtgttttgaaattaaaaatggttagtatactgtatacgtagtgattttgtctgtcatgagatctccttgaccctattgtctgatatacttgttgtaaatcactagttgatgttgaatatgtggatgcaaaatcactagttaatataatattttgataccgtatcaaactaagcgacaagagtatcatcaattcgtcaaatgcacactaacctatacatataatatccaaacctactcccacaacataattggtttttaaacaatccccattaactacttcaagacgtcttaactaacccgaaagctttgtaaccaatgatcaatccccattggttataaatttgtaaccaatgatctattttggcattacaaagcttttcagtattcttgtgatcttgtcttgacgaaaaaatggacgatgtgaccgtgatttcttcgagcattgttcaacccggaaacgccaggcattcgggtcgggaaaagatccatctcactccatccgatcttagccttctctatcttaattaccctcaaagaagtctcctcttccccaaaccctacccggaaacccggttcatctctcggttaaagtcctctctctctacgtctctagagatctacttccccttagctggtcgtcttgtcaaagtcaacaaccatgaagacaatacggtgtcgttttacatcgactgtgacgacggccgtggtgtcaaatttgtccatgctatagccgaatctgtctcggtaagcgatatccttcaacctcatggctctgttcctgactttttcaggcttttctttcccatgaacggtgttagaagcatcgacgggctctcagagcccttacttgctttacaagtcaccgagataaaagatggaatcgtcattagtttcggttacaaccacttggtggctgatggttcttctatgtggaactttatccacgtttggtcaaagctttgcttgaatggtcagtgggagattcatcagcctctagtcctcagaggatggttcctcgacaacattgatttccctattcatattccggcttcagagatagagacagagagggcaagaaatcgtgaagtttcaactaaggagagagtttttcacttcacaaaagagaaactttcagatctcaaagctaaagctaacgacgaaataggctcaagcgacataaaaatatcatctcttcaagcagttttggctcatctatggcgatcaatagttagacacagtggtctaaaccaagaagaagagagtcgctgcggagtagcagcagattttaggcagaggctaaaccctccgcttgataaagactgttttggtaatgtagccaatcttgggttaactacagccacagtgggggatttgctcgatcgtggactgggatgggctgctttgcaaataaataaaactgtgaggttgcacacgaatgaaaactttagaactttttctgagaattgggttagaaatggtaagatcccaagaattgatgttagaagtagaatgggtgatcatggttttatggtcagtaactctccttggttccaagtgtacgataatgatttcggtttaggtaaaccgatggctgttcgagctggaccggctaatggcattggtggcaagcttgtagtttttcgagggatcgaagaaggaagtatcgatgtccatgcgatattgaccttatcgttatggtctgatgtgttactgaacttatttgatgatgttgaatctttggagaatgtaattacatgaatgtgtagtaaacttcttggatgatgttaaatatcatagttaagattttctatcttaattaagtgtctattctgtgcactaagagcaccaccatcgatgacacatgcacttcagagtctagccaataaaaatattagtttttaatacagtttcatcatttaattaatcgtttagttattgaaaaaacatcaaccaatcaaggagtgccaaatgtagacatgtgtttctggaaatgtctttagagcatccacatttattggtttttaagaaggaatcctttaaattgtttattagttaattttgatagttttgtagtttagagtttttgtagagtttttgtaatttttattgcccaatgatgaaatccttaagtgggtttcttaaaaaagtatttttagaaaagaaaattgttaatattcacactagtcatgatatattctgaatagcttttaagaaattggattttgagaaagaaaagaacaatatttttgcattgtgaatgtgaagtagaaacaattaatagtaaaagttgtgaatggagatttttactcaagaagactactacttcatgcaacttatcaacgacctaccacggcatcaccgccatttgcacatactcatgaaacatcacactcctacacaagtcatatgagtttgatacaaatgttgtcatggtccaattagtcctcttatgtgcactagttagctaacttggactgcattccatcataagatgtgcaataaggtactccaatttcttattatcagaagctagtgagctctcagtccgcttggccaacaaagggtcaaacaaaaagctttgaagagtttccaaacagtaagctacactgcataactgaagctacatggcctagatacagagtgtgtcatatgtctttcggagtttgtatccggagagcgagtcaagcttcttccaagttgcaccatggattccatgtccggtgtatagaaaaatggctcagttcacactcatcttgtcccacctgcaggcactgcctcattcagacttgcaagaagatagttggctgcagtgagacagtatcatcacctaatcaaccacaacaaaacatgcatatagcaccgctaggaccggaatcattataacatgttgaatagacaacaacaatatgaagcaaagtcatatgcaaacgaatcacagccaaaacaaattcgggaccatatatgaatttcaacaatatgcaagtacacaaaacgaattttgattctacataaagcaagagactttgagacctagccctagaacccaaaaccagctcactactttagattttgtatcaaatttcaaaactcactccacagtacttgacttcaacgactccccttcaacacagatacaaagaaatcatgataaagacacaaaagatctaacctttttaagggcaagagcgagagaaatcatgatagaaaattctctgtttggaatttagagagaagccaagacactcttatatgagtatggttcgaagaatggaattggtgaaccaagtcgtcgatgatttggctcttctctcccgatttcatgctcgatacgtcggagatcaaatcgattcgaatcgccggccgtcggacaaaacaaagaagtgaaaaacgagaggaaaaaggaaaacatgagtgttgtaattttttttgtttttcgacgacttacagtcagtcgaccacgtcggcgtctctaaacccatccaaaaaaactaatattgggatcgatcctaactatttagttgggttttcatttagttttggacttttaattagctagaaactcattaaaaactgccgatggacttgctcttagtgtatgtggagagacatcatctttctccgataaactttatttttattctttttttattcttattataattaaagacatcctcattatttgtccaatgaaaatgctctaaccgaattagaataactatgaatttgataaatttttatctcttgattagattcctttatgttatgtctttccctatctgactcacaatactcaacaactatctgactcacaatactcaacaactgcgcatatgaaaagcttattagaatagaaactcttaactgcgagagaatatatagagcttcaaaatgtacatagacttgcaccgacctaagtcaaatacacaatcacttttgaattgaaatgggacaaacacaagatgacgcaaacacaaaatcatatatatcagtttgaagccattttgtgacacaagtccatactcagagatgaagattttctaatgacaactacttgtattggttcttaacttttaaaccaaaaagtacttttttcattgggtcacattccataagatattgttgttacaaggtttgatggctaataaataacatattaacaatcatcgagtgggctgtgtcaataaataaagctatcgaaacataacgggcctcttaaaaccaaatgggcctaaattcaattaacagcgacgagggatccaaaatgctatcgtgttgagcagagtatatggtgcaagagaagcttgttttacttgaagcaaagtattcaagtaagctgtcgtgtggtggccacgaactatcctctgtcaataacattctttaatcttactctcaacacaccaattttgctcttctctttccttttctaaaccacttttttgatggattgattatgatcatatctcttgtattaacgagctactaaatcctcaaaatttaataacacaacaaaagcaagtcaaggaacactagaatgaattgtattaacaaatcaattacacctaaagaatacgaacaagaatcgtagaatgggtctaactaggtgctaaaaaaaagccctagccttccaaacacactgtttttcctctgttttcatataactttcatcaccggactgtaagccaactcccaccgacagaccaatcagggatcgaaccactaaccaaactcccaagtctctccaccggagaatcaaacgaggggtttgaatccaatgtaaaagaatcccaatcatcaaactcaaaaggacactttggagacatcaatactttatcctcatccttaaccttcacaacgaagttttctcggtgatcatcttcaagatcaatggttacaaacgaatggttcaaaagcatctcagccgtccatcttttcgctggatctttaacaaaacacttcgacaaaaaatccttgccttcttcggacaacatctctggaatcttcggtaactcatcaccaacacctatacgtatcaaaagcgacatgaagtgtgatccttctttaacactccatgccgttttgccactaaacatctcaactacagcacatcctaaagcccacacgtcagccgctgatccatactcgttatcattaacacattccggtgccatgtataacggcgtccctctaatctccacactttttcttaacgccgttaaatctccgtcaactctcatcgccaaaccgaaatcggcaattttaacagagccgtcgttaaataacagaatattcgcgagttttatatcgcagtgtgcaaaccctttagcgtggatgtgacgtaaccctcgaagcactgatcctgtgtggcgacgcacggtggactccggtaaaccctcaccgccaagtttcttcatgtaactcgctaagcttcctctcgaagcgtactctaataacaagttatgcatctcttctccgttctccaccgttgaatcctcgccgtaacaccgtatgatctcaggacaatcaccgagtgaatccaacaccgatttctcgttggagagtgaagcggcgccataagcatccgtcgacttcacagcgataagtgcaggaaagtcgccggagtttctagactttgtcgctgtactgacagtagagaaggttccgaacccaattgtttctcctcgaacccactccattgaaattgaaacaaaagcttttaagagagattacgaagaacaaagatttgtgaagaagggtttcgtttttatagatttagggtaaaagaaagtttcctttttttttgttttggattaaccaaatcagaattggaatgggaattgtaagtatttaggaaatctgaagatacagagcatgtagctcgtgacggttaattgtgccttatggtggaacttcttcattatatactatcaagtttttattatttttaattgtgatatttgttttccttagtcttgaatttttggggtaattaatgcacgtgatgaaagcggatatttgatatttttctcgttgggctgctaaaaacgaaatttagtaacaaaatatttattaacttgggaaaatcaatattatcgcatgactttggttttggttactacgagattttacagaatctttaggttaattactcccatatcagtgtatcatttaccaatatttaaattttaaggagtactacttattgacaaaaagaaaaacacatttactttttctttctttctttctaaatggtgttaggatttgaaatcaagaaatttgatggtcaatctttaacggaagcttgaccttaagtttattaaccaatctacgacgattagtattagttaaccaaattatgcttaagacatccattagactattagagtattaccaatgaggttggtcttctttcaaggacgttgatacttgataagataaaattataaaaattgcaagttgaggtttgtggtgttgtttggtgattccaagaatcaattccttctcaatttagtaacgttattgcattttctcccagtgttttcttaaacgaatatataaagactaaataaaacacacacaattttgttaaatacatcattttttaactttatataactattttttaactagcattaataattatttttctcaacaactactagcatatgattagttatagatcaatgatgtaaaacgataatataatattgattatatgtaattgtttcttgtatatataatttatgtaaaatcagttcaaagttaatgtcttttcgggatatccactaaaacaataactaagaagattattactaaaaaagcagtataattttttttttgtataaactaataaataaaaatagatagttaaatagcagctgcaatttgcatgtttattttcaaatactaatattgatagacgaaaaaatgctgaatacaatgaagttgtcacatgtgaattgtactatagtttgtattttattgtttgcttacaaattccaatagcaattcaacagattttgatgcttcaacatatgactttatccgacaattcttccaatcattattcttcttgctaatattttattagtcacgactttacgatacattttacttttatcgttaaaaaaatgcttgatttagaagttttcacaacaacaacaacttgcttggccgtccgttaatttgtaggtcgtaatggcatgattgcatgagaatcatataaaaataatactctatcatgattttacatatactttcaatctttcatatatccctttgctttatggtttctacatttttagtatctacagagcaatatatgtactgttagaaatatcttatcccaactatagttttgttacaatgactcacatatgggtgtaagtgacgtttttgatattgctctatagataaacgtttacacacaattttgttttgttgattaattagtttctactttcttctatagaattggcaatataacaataaaatttaaccaagaaattaaaacaaagttcttttcttgttattgatcagaaggttgcaagattgtcatgaaataaattgcggcgcacctcaactatataaaagttagggtgaatagtaaatgaataaatgagtggtcaagaacggcaaagaagtgcttcagagtgaagtttagtttcttttctttctttattgtcggaatcagacctgaagtcttcgataccaaacagagagagtaataacaaactttcgcaagttgcggctcttaaattttcataaaatctatactaataataatatttaaaacaaatatcatgattttttgctgattataataattttaaaaagaagatatataacggacattaacggaatctgacggtgacgaacgcacaaaactcgaaacgtagagtaacgcgagctttgaggtcagagaagttagtattatccttaaattccttagccgtcactccgtcaccgtcacatgttcgcatgttctttccaccaatttagttatttatttgttcctagattttcttgcatatttattagtatttttattcttctaacaaatatcttcctcgataatatatatatatagagttttatatttctctgtataaatggataaagaaagatcttgcgacttgcggagctcttttattctttttttggtttgggtaccatgaaccaatcacatactccgaattttcttttctttttgttctttcggctgcttttatcgtagttgatacttttttcctatctgcttagaattatctctgttgtaacaaagaagaattctatgattcttctgtatcctacacattatagtcttcaaccgtcgcttgctattaacgcatgattattgttatgtcagttttcacttaacatattatatattcagttctgatattcaaatggtatcatcctacttgcgtttcggaaaatatatacagtctaaggccctgttcgtttcatcagtaagatggatcatttggatggagatgagttttgatgttcgtttggtgccaaaaacggttcattcagatgatccatccaaatgaatcatctggatgagtttgaaaatttaggctaaattttgaaactcatttggctgaactaaattggatcatttggatggagatgattcaatctaaaataacaaatgacaaaaataccctaattatttcaattgattatttatatgtatttttagataaaataaataaatagatttaaatcttattttacaattattttttaaaaaataaaaaattaaattttctgctaaaaccgtaaaattcgtttttcagccaaacccgtacaattacgttttcccgccaaaaccgcaaaatcattttttctccgcaaaaatcgtaaaattctattttcccgccaaaaccgcaaaatcacggtttcccggcaaacccgtaaaaccgtgatttcctgccaaaacaaaaaaatcacgtttttccgccaaaaccgtaaaatcgtgttttccgccaaaaccgcaaaaatcacgttttcccgccaaaaccgtaaaatcacgttttcccgccaaaaccgtaaaatcacgttttcccgccaaaaccataaaatcatgttttcccgccaaaaccgcaaaaatcacgttttcccgccaaaaacgtaaaattttgttttccgccaaaactgtaaaatcgagttttcccgtcaaatcataaaatcacgtttcccgccaaaaccgtaaaataaatttataaatgtaaaaaactattatttgaaatttatttacttttaaatatattttagattaagaattagatgaaagcatggatattttaggtatttgtattattgcaaatcatttggatggagatagagataagtaaacgaacaacatctcattcggatggtccagtcaaatgaaccgactaaaaataaaacgaacaagagtcgaatgaatcatctagatggacatgttgaatggatcagttggatggatctctcaaatggagaaacgaaccggacctaaaaaggttgaaactctatggtatacatagttttaaaataacctagttgaacataatggaaattgtctagcaaatgggacaaagtggtgatcctccttccttggtatgggatatctactcctactacacaacttgattgttctattaattaataagacacatatatatatatatatatatatatatatatatatatatatatatatctctgacaaaatacatacaaatagtaaatcaagaaatgcgaaattttaagataacaccggaaaaaaagaagaagtttcaatcgttatatatgaagcatgtcttttgctttggctcagccatcgaccctataagtgtatttaagtttttcctctgctattttgaattttttcattttgttgtcataagttaaagcaaaactcaaactagatctcttgtaaatgttctttttgggttggttgataaaatttaacttaaaaaatgtttctatcttattcccttagctaattctattcttgttttaatcttaaattattctctaattagctacttaataagcagtgtaagtcactccaaaacgtgtaaagctttctctttcagacgtgataatcgagacttgtatttcgcatttcttttccgacgccgataaagttgtggctcgccggcgtcggacttttggttctgctatttgcttccttacctttctcttatgttttctgctaccggttaccgtcgctttgcgcttttccggcctcctcacggatcctcttttgacagagtttgatgtcgtaagtctcgcctttgggtggttccgaagagctgattccaatgactcttctcttgctgtctctctggtcgtggttggtttgaagtttgttccggttcttcactgaagatctattcacatctcttccgcccctatcctcaaatatttaccagatcctcccgccttttctctctccatcctcgtttcatccgaatttccgatgtttcagagtttgctgttagcgttttcggactcctctgctcctctctcctccgccagccgccgtgaagttgctcgtgtgtatgagctaggtcaaattctgggttacaggatgcaaaggttgttcttggttttggcttggcccaacaacaaccttttctgttggggcagttctagcctaattttctttatgggctcaattgacaattaggcctctgtgagtttttatttggtttgccctaatttttctaatttctctttgtcgcttctttcacctcatctcctgcatcaagacatcgtgcttcctcagtctccttttccatcctaccaagacaaggagatgtacattcctcctactcgaagtgagagccctccttcatcgttatcccttcccaagttgttgagaagatgttcacctttatcccttcccattttgttgagaggatgttcttcggagagatctttctcttgtgtcttagttggcttagcattagccaaatctttgattggaattgttgtcctagttggagcgtcaatcccgtacaatagatcacgcttagtgttctttgtttccaatgacatcgtttcactcgatatcttttatggttttgagtgttaggattgttcttttattctcttgttcttatgtttattgtttgaccttaagagcaacttcattgcacaatagaaagaggatatctttaataatattaaaacattaaatttacaaaatattaatattcaaatatgaaggatctttaaattggagatatcatatcctctcaaaaatgtctattcttagacatttaagatattgtgtctttattttaaagacatccaaaaattaaaataatattttttggaatatattatattttaagtgtaagaagacactctccttatttgttcaatgtagatgctctaatggcagtaatttctgcaatttctttcttttggctgatgtttattccagctcttgtaatcaagttatcttttgatggatagttttataaaagattggtcacaaaaaaaaaatagtgtaagtctataaatacatattagtggaatatgtttttattgattagagatttagagtattaacatatacttcttgttatgccaaagaatcctaaagttatattagaattagattcaactacaacatgattgcgttttctgttttttttttttttcgtcaacaacattgcgttaaactttaaagagaatttatttgaatatttagatacgtatataggtgacagcacccgccgttggttctgacaaaacggtaaatcaaatgctcataagcttgacatctaaagaaaaaagggagctaaaaaaattgatccaacttgacgtataagtggaatcgattttttgaaagcatacatggggttggggtccctgtccctctaaagataagcataattcaacattttcgaatattccttagaatacgaattgtgacttataatctttaaacgtcattatactagtgctaattatcctctgcatgcatgacgtccccaaatcagacaaacattaattcgaaccttattttgattgaataacattcaatttcattagtatattttgggaaacaatgcatgcacacccacttccttgaccgagctgataaattcagaattaggtaagccaaacccaaaatgggctgccgaaacaaagtgcatgaacatcaatttaaacatgtttttctttgttaaagttgagtcaaaggctattctaaaaatattacatttttttttttggaagttccaaataaaaaggaagccgtcactatactattcacgacaagaagatttacatcattcctgaaattatcaatcaaacgaatagctaaaaatgtaaaaattgtattgggtttttggagtggactattcaggaatttcatctcataatgggtttttatataagataaatagttacaacccatttttaagaggcccaagggacgtttattttaaaaagctactgatccctttacaaatttacgaacaaataaagcatatcttcgaaattaccaatctgtatcacacaaaaaaacaacaacactgagatatggaaattttcgagattaatctaacggtgaagtccttatgtgaaattacgaaactgccttattcatgttcatcttcatctttctgaagtaccccttttgctcccagaacaatgtccgccgtcgtgctccgaccaaaacatgtagtctaagtctaatactagtttgtatcattatctgttacaacaaacatatctgtgtacggtaaagggcttatctttgtgaaatggatctttatttgggctttaccttgtgacacaataatatgtagccttggtttgtgatataaattattttttaaagttgggatgtcagctgggtttctccatcttctgtaatgaatgtagttgattcaagttccgagaaatttatgaagaagcaaaaaaaagaaagcaaaaaaaaaacatttaagtacgagatagattgatatacactcattcaaaagagaaaaagttatttatacagcaagatagtagtagtaatacaatctgcctttctagtttgttaactaaaaagaagaacaatagaaaacatataattttacatatataactcaccaatattaaaatcaatatatatggtaatttattttctaaacaatttttgttttatttcataagagtctgttttcgtttaatttaataagaggcttagacttttgtatttatatattaattattacatgcattgaaattttgcagaatcttacactctaaaagtatgatatatatttttatttttcaataagtgttaaaatgctaaacaacaccacagatgttcgtgttatcgatttgtctccaaaacttcctgttatctataaagttggctcacaaaatcatacacctatgcatcaagaacgtaccacaggtacgaaatgccataaattataaacttttgacgcttacattggaaacaagacagaaaacaatactattattcaactcacaaaaccttaactagatgtctgaaagctaaaacatgttgcattgatcagtgacaagagactatttcatttagtaatgataaattgataaactatgcttattctttagtctttacaaccaagttgtctgacttttaaattgttaattaaccatcccaaacattatcgaaacccggaaagataaaaacatttaaaaaaaatgctctcatagtttcatgatactaaattcaactccctcgataatattttttcccgtcatattaataaacatatgatatatatttaaaaatcaacatcatcatcatctaagaatctgtgcatttccaagcatctggtgatgatcagaccgcataatgccacacccttttcctccatatcctccaccaacagtacccgcaagtgctcctccggccaccgccgtcattcctccgccgttaaccaccgcatgttcctccagcgactgcacttgcttcttgagaaacttaacgtaatggatagcctcatcgagcatcgacgccgtatccatcttagtcccaccgggaacaagccgctgaagaatccgaatccgctcgcttatcctctcccttcgatgccgagctgccacgctctgtggatccttagagatcctcacgttctttctctttggtggctttacggattccggatcaatatgtataggctgcatcacggctattcgaaagatcatctctctcatcgccgccatgttggcgttgtcgctgcagcctcctctcttctccgggagagatgatgacggggagggggcgtaccggaaatttaaaccgggttggtggtgaggcatggtttggtcaaatgggagatgagaatgagtggggttgaagaagaacgggtgggtgttggattcagaaagcatcataatgttatggggattagggttagggtttgagttagagaagtgttcaggaagcttctccatctgctgcatcatcatgttcattagaatgtcggagttatccatcctccttttttgtggaatttatagggtttgttttttctttgagagatatggagaagctggtgagataaggtatggaggaagaagaagatggactgacaaagcttgaaatttagggctttgtgtgtctgaatcacagaagagatgatggtggaagacagagggagagttatgtgcgaaatgtaaactgttactaccaatcagagattcagcaatataaaaggaagtgatggatttatatagcactttgtgacccattcttattattttactcctttttattacatatataatttataacaattaggattgttttccttcttctatttttcacactcctaaaactttgtaacacacacgtatatgtatttagtaaatatatgtatgtatacattaacgtacactagctagcagttgaaaatttgttcattgctttgacatggatgtttcaaccttccatatgcattggacagttatatttatgttgcacgtattttttttaactataaataaaattatactatttattttatgacaaaaaatataaatttatttactttaaactttcaataccagttttgcataaattagttggtgtacttatatatacttttgtctggaatcattgcaactcgcaagagattggaatcactagtcacttggtgtcactaaaattagctgatgaatggaaaattcgttttgagtcatatttcatgaaggatattatcctttgtctggatcaaccgttcacgtgtcacaatcggtgggattttggacccacgagttgtgaactaaggcgcttctggacaaatgaaggtgcatgaaccgctctcaccatttgaggcagcaaccatgaattttcctatttctacaattttaatttgttttcaaaatataaaaataaatcttttatataagttcgaatgagtgtaatgggaaagactgaaagagagagtagttgtgtagttttttttttttggtatctaaattttatactactgtttttttttgtttataattgttaattaccccacatccacatgaaatatgtcagaatccagggaacccatctgtttcgccgggatctgttcaggcgacggcgaaacaatattaccttgaattcaagttttcttattttaacttttaacctggatggatccaatatgttatgcatgagaatattaatgagatgcactgtcttcgttagtaagtagtaaataagattgatgttataacttctttgaacatgcttgaagaaaacgtactacgttattatttttttgcatgatttttttgtttttgtttaaatgagtaatatagtgaatttctcgagtttcacaaatacaaaccatcatgttaacgtatttagtttatatgaatttgttttgcaatgtatatactaagggagtgtatattatggaagaatattatcttatatataatggactcaatataatcgaacctcacttggcgtcgagcgttggtatatggcacgcttatcaaagccgatcggaaaggacttattgcgatcttcattaaattatttttctctttattttaagaactttacgtgaacatagagtagtactgtttattgacaaaaaacaaataaagaacaaaagaaagaaattcttataacattagttaacaaaggaattgcacttcaacaaccaaattaataataaatgactctttccttaaaaatgcatacgtcaaacgtcaaaaacctcacaatcttcaatcaagatcaatgcttggcttcatttgtgcaaaatcatcgggttttttcttttcattcatagaaatcatctcttttgacgtcacaaaagtaattgcttacttgttaattaaaattattatgagttcgtcttctaccctataattagcctaaaatagacagacacagtaagttgctttggacttggttttaccctcttatgttgacactgaaacatgtaagaaagctaacgaaacgatgacgtttcgctgctctctctttttcaatcagcttcgtaagtaacaaaaatagatgctattttccccttttcacctttttacttacacaaagtcactgtaagaattaaacactcctccttcccaccgaatctaaatttcttaaccaagattccaagtcttgttcgtacaatttttttttttgtctctcgagaacttcctttttcgattttttttctttaattattgaactgtttaatcaaagtcgcccatgtcattcactacgttattgattgaacaaatgccgttaaaatcgacagcaaatttaaaaatgtactaataaagaataagaactcagaatggaaaacattagctaagattgtttactgaaatttgcgatgcaactctaaaacgccaatgacgatttgtttagttggaagaatctttttgtaaaaaagtttgaaaaatctttatgtatttaacatatcttgatcagatagtactctcatcaattcaccgaataaaaaatgcaaagatcatatatgatgtaattttatatgaaactcaccacaaacaaacttataaattaaatagacttccataaaatctagagtttagtagtgattggactactgacttttttcgtcggatgtatttattaaaaaaaaaaaagttgtcatcgtagtatttggttgaggatgggcagtgtattaaaataacaaacactgggatattggaagcatatatcaaaaaattctaaaaggaattatattttaataattaaataaacaaaaattggggtaggttgcctcccaaggcaaggtagtgatacagctgtgttcatgtcccaagcatcatctatgccctttgctccatattaacaccacaatttctatcccctaatgattaatcacgttttccgacaaatttttaaactactccttaattaaaatattcataattgaaaaaatgaaaaatatatatcgatttatactcgattaatatcctgttttttactcgatcatgagttgatgacaatatccttaatgttaggtttatactttatagataacattcttataatttcttgaacaagtgctctgtattcttctgacacatttttatcttcttttttcgtttctttagttattatattgttcatatcatatatgaaaaaaaaaaaaaagataaatctgaattcatttgctttctttattgctcttttttttcaattatgtatttccaatctctctttttattcggataaattctcatgttctctgtgacaggataaagttcatgcacccctctttaattattgctactatcgtagtatattatatttcactttctggagcaattttcttacagaaatggcactttctttaactttctagacaaacactcaccagatttatcaatagattcaatacagaagttcatacaaaacgagtaccaaactaaattgtaatcaagaacaaactaaaaaaattaaaataaaaataaggaaagcgtatataatatgcatggagaggcaaacaaaagtcaaaacctagaagataggagcctttggattgggagaaaaccaattataacaattttaatgtatggacgaattaagtagaaaaagaggattgtgataaagatttgtttctaaataaagtataaaaacatttttaccaaataaggaagaaaagaaagaaagaaagctcatgtaaaatgcatggagattggagaggcaaacaaaagtcaaaagtgaatcaaaacctagaatataaaatgtaacatatggaagtgcttcaataaaaaaataaaaaaaaaaaagtgcctcaatcgggagaaattaaaattttaacatatggaagaattaagacaaacaaaatggataattttaaaaataaaatttcctaataaggaaatgttttggaatgaagaagattagatcttagatccatttaattggatctcctctcttttctttgtttgtttcttgttttttagtagaattttggtatttggtacattctttgactcttgtttttaaacacccatccatgtcccttgtgctatattaaatgtactcaatttacatattttccggtgcacctcacaagacatatgtaaaatgtaagataatatatttgttttcattattgaacgaaatcatgaaaacaaatatataaaatgtaccgcacaagtcacaagacgagacatatgtaaaaatgtactcagtttatataaattatatctatgaaccgacgtgcaacatcgtaacaaatcagctaaagtgttaatacactaaatgggcctgaaaacttatatgacccattcataacacgggcctctatacctttgaagttcataagcaaatggttcttcgagtcgaaattgcattcctgtacatcgttttgcgttcatcaaataactgaaaacctcagtatataaatccttgaaaggtgatgtcgaggtgaggagtctgactaatactcatcttcatatttcattaaaattagtaacacaaaaatttgtcagtaataaaagggtctgaaatttttatttatttttggggggaaacaaagagattccaagttttttcattttactacgtaaattttacggcgtagaagtcaatggtatatgtgtataagtataacaatatagaaagtacttgcacgacttttggtttttgaattcttcattaaaaaaaccatcatggatccaaatgtcctggttaggttttggaccaaacttgtggttgccctacagaggaaggtagtagtcaaaagtttgtactttgtacagtatttaattttccccaatctcaaagaagagtgaaaaaatctgcgtagctatagattgcgatgtatatacgagccgaaagaaaaaagaactataccaactatcttttatctttttccaacttggtttgagaatctatgaaaactatcagactactaattcaaaattaatatatcttcaaataaaatttataaacaaagttaaaagtcaaacccccaactaataaattgttcacacttaacaaacgcacacgtaacataataagcggaccgaaccaactccttttgacacggacactcaccgctcgtctgcttcacggtccaccacatgtatctaatcgacggtccagatttgatattactagtcatgttagaattaagaagagacggatgaggtggaacgtgacatatggtgggatttgcacgtgatcgcaggagcaacggtctgatcagatggtttcttttagtggtgctagtgaccgttttgaagaaattattgtggaccgacattataatatttaagtgtatgatactatacagtatagtctatactatagtatcatataacctctcatgttgtcacccaaaagaaaaaatctctcttatctagctcttcgtatgtaaatacatcacaaccacagttatacgttaatgcattccggttctacaatattgcttgggataggtcttgtttatttatttatttaattttgaatttggtttaggttgctcaaatgtaaaaagtacattaattataccgaatatggaaactagattcagttcttcataatttttgggcgtggtttagatgaagattatatcagatcagatactggattgaagtctttatcttgacgtattctatgtttttttctgatcgaatatgtgttttttatcctctttacggtcatgtttggagttgtacaaaaaggtttggtatacaataatagtaccagaaatcttaggaatattatattatttggatataatgattgcaacaacagtccatttactggtaaaggttggttatgatgatcactgatcacaacgtaagcaaacattttatttcagagtgtacctagctgtagactgtctgatacatctcatctaacttcattattttctggattattaagtgtttggtatatagctagtaagtacacatctttaaatttagctgaatatcttaataattttaccaataattgtcctaattaattccaaaacagtattttgtttacatgtttttggtttaaacataacatttgttcaaaaacatgttaaaccatatgcaacaactaacaaacaaaatagcgatttcttttccatttctcttttcttttaatccagctgaaaatcacataaataccattcgctctataattcatatacatgattaaactaacattagatagtgagattttgagccgaggacttcactaataaaaagttaacatctccaactttattttcaatatttttatttagaaactctattttgttaaagtctgtgcacactctaaatcttaagagcagctctatcgatatatttttggaagtttttcttgattaaaatagaaaaaaacttaattatatatatatatatatatatatatatatattttaaagaattttttatcatatttcaccgatagaaatggcttaaagactagaccacaattgatgtagtagtatttacatattgtttagtatgaaaaccatcattaccatcttattctcatattttcaaaattactctatgaatattgtgttataacatctatatctaagttgctcattttgtgcaaatattcaagtccttaacattgttttctcatcaataattttcttcttgttaggaaaaaaaacgaagatgaaagcaaaaaaatacgaaaactgactgttgttgtttatatcgtggtttaaagtaatcatttcatagtattattaacaaaaagtaatcatttcacaagtgttttttacgtcgttcgatatggtgcaaactacaatggtaataaaagacagcagcgttacgttaagaaaacgacgtcggtttggcatcattcgcggaccccaataacgttgctattccgcgttttgtttgggaaaagttgtcacacgtgcgtttgtgcttctttttgaagattttagagatattccacaatcgaaccttatcccaaaagtaaatactctaaaaacaccccaagaaatgaaattgttcaaattaacccaacctaaatcacactgtacataattggatttatttattactatttagtgttcttttttctaacagtacaacgctctccaatttttaaaatttcttgtttcttctaataacgaatgcaagattacacatatttagactttttgaaaacgttaaaatctaatggtgtgttgtttttaataaacgtattgtttgaggtctaattaaaagtgaaaagaatctcgatcggggaataataatcatgaccgagaaaccgactcagcaagtttcccgattcgttggacaagttcaggagatagcttcttcaccggtttcttctccttctccggtcgaaaatcaaaaccaagtgcatccgatacttcttcggagctccatccagcttttcggagcgactccgagaaccgacccgctttcaaaagcaatgcatcaagaacggcttgattatccaaaattaccatttcaccctcaaaaaaaccagatgctgacacgtgtacaatatcatcaacgtcggattcgctccacccgcctcctcttaaaaccgacccgatccggttcacgtaatcgtcgacccatttcggtgtctcggatcttggtaaatctaaatatctctccggcgatgaagagtgtgacgacgacatagaagaagcagagtttctcctccgacgatcaaccgccgcgtcactccaaaactcaacccatctcggtgtactcgacccgtgaacccgacccgaatctaaactcattctcgaaaaatttgatgaagaagacgacgacgacccggctgatttctcactcaccgaacgctgcttcgttaaaacaaccggacacgtgtcagaccctctaaacacagactcacgctcgaagaaatcagaaagatccgacccgcaacagaaaatccgggtctcgtcaatataaaaaaccgggttacccgctaaagacgggttacaaggaatatagcaatgatcaaagattggtatcatcaaaggagctcttttgagagcatttctcgcgacccgtaaagctttttccgggtcggatggtcttaaaccccaagatttgctccagagagtgtttctcgcgatctgaaacgacacggcggcgataggaagatcgatcatagctctgagatgaagacgagctccgggagaacgccagtctggaaatccggcgccgactggtaaaccggcggtgagaacagcacggaggtccggtggaaaagcgaatgcaaactctgcttctgctctagcgaattcggagtcggttagacccggttggacttggatccttgaagtgtgtaagtgtgagattacttgatcggcgagagaagagaaagagacgagactgtttctaaccgttggtgttgttggtgcggcggcgcgagcagagagacgacggagaccagcggcgtgagctggtctgagaccggtcattctccgatcaacgtcgaccattataattttttggggggaaagaagaaaactttggagtaagagattgtggaaaagagtgaagctttatgagttatggggtttcaaatatgtctgatagcgaactggaaaaagatgataggcgagagagagagagaagctttgtttgatgaaaatatggagctttgttttatttatagcaagttttattggtgggtcctactttttgtcttttttttttatttggtttttatgggtttttattttgtgagatattgaaatggtggtggtgagaatctgtagtgacttcatcgactagactaatttgatgattaaagtgtttactatattttttcttcttcatttgagattctttaattttgttttgttacatttaatcagcatcagatacctttctgatcggtttagacttttgttttagttttctttcacgtacggctctgattttcgtggaataacgtaggacccatccttaatgaaatcagattatcactaatcaaacattagagagagtcggttcataacattttcctcttatattgaataatcaacgtttttgctacaaaataaggaatagttgttggtagtaaagaattctggtagcataatcctttaccaagaaaaaaaaaatggtagtagcatacgtattatattatttttaatatattttatacaactacaaggtctgatgtttcaaaatacaaattgaatcgagagggaattagatatagtagtagtgctgaacttttttaaaaattttagtcggttacgttgtaagagactaataatcaggtttatagtcgacttcatcggattagaggtttgttcgggattaagaagcattgtagataataaacagttgacacaagtgattagacgtaagccacaatatcattacccactccgccacgctgcatcaaatcatgctcctcattttattagagacaaaataaatattaacaactgtttgattttgatttggaatgatccacttaaatcataattttgcagtggaattactagtataaatctagcatatatgaatcatataccataaaaatccctatttgaaagttttaagcaaaaggaaaaacagtagcttacgcgtgaaatgtagttgtaaagttgaaaattccaccgcttgtagtttttacttatctatctatgtagttgtgatttaatttaatgtgatagtgaatctatgaccgttgaagcataatctttgggggtaagcaataaaaacgatcacgcgactctatgccacactactcgggaatctcacatgtcaataccaatatcgcatggtttctttctttagagaaaaatgtttcgagtgttaaatcgaaaaagcaccatttttaaatactataacttgattcgattacattttcaatggcttctttgttggaataatttaatattacatttatatgaacacactaacgtcgtcgaaactacctattattaaaagctttaatttcaaactaaacggtctttatgtcagcttaaccacatggtatcgatcggattaattttaatcacatgttaggtatattgttagtttttttcatagtacattatactttttccaatcctagcgcgcgatatttttagtatacgattttacgaataaattagtcaaaatgtatatggtagtgggtcaacggcatagactatgcatatcgtacgtgaatctggcgtaattaatggagtatcaaaggagtttattatgctttttaagagattaacttgtaacttacagttatatttgatgttctcacgctcgcagatcgaataatacaaaatctatttgacataattaagcaacttcaagcccgtttcaagaaaggaacttcaatatgtattacgctaattatttgtattttaatttgaacaaataaaatatctagcatccacaccatcacaaccttgttctaataattaccagtatagtctatgcaaatttcattatgatttgtttacaacttttgttttcaattctatcactttattgcggtttcgttaacaattttaataaataatcaagctaaactagctaagaaacttctataccactccacttgctctgtctagttataattgtgtccgacccatttccaatgtttatctatttatatacttctcaagtctcaaccgttggtggtgtcataccattcacatacatgatccaaccatgcatatactaacaatttccctaaagcattgttaatctactactgaatcgacccctttttcctatttatttatttaatggaatccttcaacgtacagtagtttttaggaatatggatttaaaccttagatctcgtaatcgtttaaaaaaatggagcagaaaagaagctggatcagatctgtaggtactcattatatttattaaaattgaccaaattttcgtcgatacatgaactatatactatatacgatgtgaaaggttggacttaggtatgggtaagagttaatgaaatgttcacataaggtgaagagtatttgttgtctgggtgtgaagctttaggaacatttacaagttagatgtttaattgttagctgagttttgtgacatttgtagggtccattttgtcccaaccacatatgatttttgtaagagatatatggaaggtgccattttttgcaagtagttcattaaatatttaggaatttgtatgttgtgtgatcgattgattgacatactgtgcagattctccgtttcatccaaaattttgttgcctatgcagattaatatgtagtttactgtttgatactatgatgtttgatcggtccgatttggtctacaatttcttactccaccatatataacatttctatttagaaggcttatattttagtattttacattaatcaacttctatatctataattgctttggactatgaaccatgttaaatagtctcttcttcatcgccagtattcgaacatgaaaacttcccaaccctcacattttgagtggtcgagtgatatactatatgaagaaagtttgtaaatgttaaattgttaacttcaaagctaagatcatttacatccatttcgtaaatcatattttagatttactttttacttttgtactttataggcatcttacaatttacaaatatatactcatttacttataagacattgaaataagacgtgatatatttatttaaatcccttgttgactatcccaaaccaagtttaaaagatttatcaaacgtattatttgcacgacaaatgataaggtcaaacaccttggactacacgtgatgttccttatatatttgacatatatgtcgacaaaatttatggcaatagccttgaatttgaagtgtcgttacaaaaagtcattatcgtagacaattttggtccgtttgtgtggctttcgactctatcgaccgttgctatgtccccactcaatcacaacaatcgatcggtcaatttggtccaacagctttggtttggttcaatgtcttcgtaacaaaaatgtcaaaatctcttgttgtcatgggttggttttcgtaattggtcgttttacttgttgggtgatgatgttaagaaaaattaggacgcttacgcttgttttataatatttgtacgttcaataattgaaaagaaaccatcaaataataaatataatattcttatttcaataataccactaacgaaatcaaaaccaaaataataactttactagctagcagtatctaggattttttctcaataattttaagtttaaaccaattcacatttatctttgtaacaattaacaaatatagtaaagtttttataacatgctaataaaaatgggtgaaccaaaaaatagttatataaaattatgtgtaaacatgttaattaatatatattttaaaacatcaattttgataattaagtattttttttggttaaaacaatgatgattttatcgcatttgaaggtgatccactggaatataatatatcaaactacacaaagatggcctttattatctcgatgataaactagttatgaattttataatatatcataactaatacaattattatagtttttagtgaaacaaattcaaagtgggtaaaaagctcccccatgtgcttaataccttattagttattaccttctacaataacctattttacgaataattaagagaacatgtagaccatatcaaatatgcataatgcacatatatcaagttgccattaaatcttttttgaccgatattcacaacaaacacactagtactataccactcctgttcttataaaatagaaaaacaatctagcactgatagtagcccaaattcaattataagtctagtgagaatagataaaaaaaaaacgcataaaatatacgtccatttactaatcgaatgaatgtaaacactttactaacaaccgagataatgtatatctgaccaaaaatcagttgtttgtatggttgctaagtaagaattcataacaaccgagataaacaactctatcaaatgtacttcgtttcatcaaattactaatcgaaacttcgaaacctattataataaaaaagacgattctagttaaagtatgagaaaccttttttaagacataaagtatgataaccttttttccttaattcgcgacctccttttcataaaccattcgccttttgataaatatattatccataaaagtaagcactcgtgtggtcgatatctcatgtctgttctttacaaatggattcttgttaggttttagggtggctataaagctataccatcgtagaagcgtgcgtgcgatggcgaaggataaagtgagtttcgatcattgtattcttcattattttgaatttgattaattttgttttttgtatgttccataagattcaccaaattaaagtgattttgcaggtctgcgtatttctttcactgtttttattaagcagattaaatatttagtccatatttctaaaattctgtttatgtatagaaattgtaaacttttgggacatgccatgatacgtttaatagatcaagtttaattatattgtggaatacgtcaagagcttacataaaggattgttttagtagtataccatatatgtggtaatatcgcaggtccgatccgaatggtaacagtaacgtaaatagtgtaaaatgggaaagagaacataacaaggtcttgctagtgaattagaatatacaatttacgttgaacaaacggtacacataaatgaaacaaaagttgaatagtgatcatatcagaatatcagatcaataatgtataaacaatatcaaattttaactattttaatgatcgaaacaattcttataacaaacttaattcgtatgactgttttcgatcttttgatgatatatattttcaaaggaagttgtcattgtcaacttgcaattcaacagtttctaattttgggtgctgttgaaacccaactaccacattttgatgtatttaaaacattatactatgcatctttctgatacaaaaatgtatatcattaatatgtattagaattcttagaacatgcctatatatccaatatagctcatcaaacactaacgagtataaagaccatccactccaccaccacattaagtttttgacttaatgatcatcggctatgttgttgtggtccaacataaagagtctgccgagtttggtttcactgtctaaattggaaccgtttttggttcaacaactagttcacgcagtaaagtatcacttaaatacagttagttcaaccggccataaaaaagtttgttctcgtacatatggatattattgatttacacattgagaatatctacccatctattattaacaattaagcttgacctagagaaattctgatgtagatttttctgattatcttctcatggttaggaaccaaaccttaccttgtttctctactcgaatcaatctctttattagcttatgtatggtttagtgttctctaaccaaaccaagaaaaggattggtttagtgttaacatactgtattactaagtacatagttattgggctataagaagctaactgggccacaaatccagaatcccaatataagtcaatgtacatcgtttgctaaaatctaaaaacggtatctttaatctcagaaaggacattatacaaagatgatgatgttacacataaggtcgtttatctacatcaacttcaacccactagttcttcatattacataaagtctcataaaagcgatttcgtatcgaacttttactcataaaattcccttattctatgattaaaaaggaagaaattccaaagttttatagtatttttatgcaatgccaacttgtgttgcttcgtaattccaggtacattacataatttaataaaattaaaatgaaccaatcaaaaacaaatccaggtcatcatcatgacttgggccggcccaatatccctgagtcggcaacactctctctctctcttccattcctttataactaatcttcaactaacttttctcttccccctaacttttttcacccaaatatttcgacttaattaccaaaaaaccagccattgatcgtaaaacctttccaccaccgcacaccccctcgccgggggtagtgcgtcgcatacacgcgccaccgttaccttctacttctctcttgaagcaacactcgtggtctcctgatctaatccgcgaggaagcttggtcaaaacgtcaagatatctcccgccaccgtcatctccgccgtggtaagagcttgaccgacgaagatctcgacgagcttaaagcaagtttcgaactcggattcggtttcggatctcccgaaaacgctgatccaagactttccaacacgcttcccgcgttagaactttacttcgccgttcaaaaaagctacaacgacgccgtttctaacaaatcaacaacgtcgtcgtcttcactctccgacggcgataccagtcctcaccacaccgtataccaaaccagtatgtataaacatacacacacacacatatatacacatacacgattataaatttataatgatcaaatttcatttgaataggtgatgatccgcaaacggtgaagacgaagctgaagcaatgggcgagagtggtggcgtgcaccgtgaaccaatcgccgccgagatgataattttaacgactgttaaacgttgtggggataaaggttaatccggaacagggtatgtaaattgagacgccaaacagtcggtggagtccagtcagcgttgtaatattacacacacaatagtaaaatactaatatatgttggacccaacttgtttataagttatattgtttattgtataatgcatgatttgatttgatttatcttcttttagtatgtgatatataattttatatatgcaacagaacacaatttgcaaaagtatattctcagattctattgtctgacttttgtccatgggagagtggtgttggcttctcttatattcgttgctaagcttgataaaggattatgcaaattcacgtgaatttgcatatagtgattaattcagattaactgatctctttcagatcaaaatctttgtagcgtaacttatatatattataacttttgaaaagaagaaaaaaattatggccgaagaaacgatcgaaatagtgagaaaatagagaaagtgtagggaacgatgagggagtaagtaacacatctgtgttttgtctgattgtctgattaagaactacacatagcagatctgtgttttgttatgggccttcactattaggcccatctgacccatatcgttaccgctttttagtatggaaaagcaacaacaatgtaaaggaaagcagaaacgttagatttctttagacgcgcaaactgaaagagctttgatcgatcgatttggaggattcgtagaagatatggttcgttcttacctttgattctgtctttattttttttatgtttagagattagcaatttctaaggatctctagataacaattttgcatgatggatttttttttttaagatctgatttgtatttagcgaatgttagaatgaagaaattagggttccatgattgaagaagattttagacgaaaccctttagtgttagagctgagattttgaattttggatgttattattgcagtcgagtatatacagaactgtttcgagaaaagagaaaccgagacgtcatcatggattgacgacacagaagaagcaagagattaaggaagcttttgagctatttgacactgatggttctggtaccattgatgctaaagagcttaatgttgctatgaggtaatatcgagagctttatatctttctgtctttgttttatggttttggaattgattcttgatattatcatttgtgatagggcgcttggttttgaaatgacggaagaggtattattatttctttcgttttttcggttttttccgctaagattcgttgtttatatctatggttctgataccttgatgtatttggtattgaagcaaatcaacaaaatgatagctgatgtggataaagatggaagtggagctatagattttgatgagtttgttcatatgatgactgctaagattggtgaaagagacacaaaagaagagctcactaaagcattccagatcattgatcttgacaaaaatgtatttactcataacttagttagttacttcatttgatcttaatttttctagaagctaaactatttttcttccaaattttcaggggaagatatctccggatgatatcaaacgcatggcaaaggacttgggtgagaatttcactgatgctgagatacgagagatggttgaagaagcagaccgagaccgtaagtgtcctaaaccttttttctcattctcttgtggcacaatgcttggtttgactaaagatatatgatacattactgaaaactgcaggtgatggtgaagttaacatggatgaattcatgaggatgatgaggagaactgcttatggtggtaactagaaaggttgttgctgttcttaacgatatttgatgagctctattatagttctttaactgaggcttaattatctgtaatattattactgaagatacatatatcacagttttaatctatagctcatcttaatggcaagtcttggtctgtctttgtatcattataagatgtataaattggcaaaatattcgtagtcttagtgaaaaactttaggagctcgcattggttacttcataagtcgtcaagatttggacctctgcgcacatcatcatctagaaaaagatattagatttgtcttgtcataataccctgttgcattaaagttgtcgattcatcattttttctttcacaaaaagtggtaccattttatgtcaaccataagttgtaaagttacacaactgtggaaacttcacttacataacatatccgacctttgaaagcttacatcaatggattccaaaaagaaaaaaagatccattgatcataacaaagcattttccttaggcaaagtttccaagttagcttaaaactttaaaagttgtcgattcattgcacaagggttttgaaacaaaaaagtaaagcataaaaaattaattcaataagagtgtgtactgatttgtagaagctataaagataatgttgacaacagatacattggggccgtgaattgggtattctacaccgaaaacctcacgacaatatttttaccaaccatgacgaaattaagcattaccaaagtccccatataatgaatccccaaacgagtaaagagaacaaaatctaattatctaacgaggataaaaagaagaaaaaaaggaagctaactgatatatgggaaaattgaaaggaaaaaaagtccaaatcttcttatgaagccaaagctggttgggttattgggatgagtttatatctgaacggacctggatggtgaagaatcatcaaattgagggggaagtggtggtggtagtagaggaagcagaggcacagctgttaccagtctgcttagccacatagatttgcttgacctttgggttattcggaaagcctctctctctggccatgggttggtttctgccatggtagcccgatctccggttttgatggtgctggtgttggtggtggtggctgggcccaccaacatgctgagactgcgtgttcttctcctgagaagattgttgttgttgttgttgtggtggcttgaagccaggaccatttggattctgagtgttgttgctgttgggatcagataacgtggaggtgggctttgctggtggagcaccagtggtggaactgtaagcgtttgaggagtccaccattgcgtctacaactgtggatgcttgaacgttgggatatctgttaggaggaggaggaggaagcatgttgttgttaaactgaggtgatggaagattggagccatctgttccttcctgctgtttctgcatttgcatcgttggaggacccgaaaatggcatgtaaggccaccgtgctcgaataggcatctcctgagaagaagactgacccacaccataaaataaatattaagtcgatggattcttctactagttagcattattggaaatcataatgatgggatccaatacctggaaaggagatggatcaaacattggcataggaaggtgctgaagagacgcaggtacaatgttacattgcatggaagccacattaggattgtttacatcaccatctcctccaaccggagaagaagatacgtttgggttgtgtttccaatctggttgctttccagatgggatgtaagttgttcccatgaaactcaaccctccaaactgtccaacaggtgcaaagtggttataaacaaacatgtgaggaggtccctgaacgccaggaatagcaccgggtggggttagaaaaggacccgtgaaaccggcaggaggggcatagaaggaatctactccagaatgaccctgctgctgccaggtcgtaggtggaccagatactgttactggacctttctgggactgtgattgggttgctcctgcgtcatggtgcgggccaaaagcaaaaatgggtcctcttaacatgggattcacatcatagaaagggtaatgaggagggcctggagggaagtgagtgatcatttggtttgagttgtgtggacttggtaattgtggccacagagagattggggtgtccactgaaagatctgctggtagagaaacaatgagagattcctcagcttttgatcgactagtctgcccaccaacagtacctgccaaagcaaaagaaattacttcagacaacaaacaaccatttgggaatgcataaaccctacagaaagcaaatataccacttgctgccccatcatctaactctgttcctccataaattttggtttcaacaggtaatacagagccagtactcaaggcattcccactggtttcatcattagttatggctgccacagcaatagctgaagcagcagcttctgcttctgcttcacaaatctctatgccagtggatgatggatttcgatgtttgttatctttttcaaaatataaagagctatccttctctgtacgcccaccacagggagggataacagtggaagatgtaactgcacctaaaagagaaagaaagatccatcatttaaatgcaacgacgagccagttcaaagtaataatcaaggtatctagtcaaccagctcaccaaattgaattttgccctcagcaagcaatgaatttattggacttgtgctgcttgaaaaagtattgttctttggcacaacagacgttgatgtcgaatttgactcgctaattcggttggcaccattctcaacagaaacacatgaaagatgagatacgggtttcatggcttcatcaagctgactctgggttagggccataacctacaaggtaatatgaaaaggcttcagatatttgcataggcgtgattcataactagtagagcatgagtcataaactattttgattattatccactatgactttctctgtcctcaattcttactgctttctgttttcagtaaaccattctatcaattcatataaagtgactatgagatgcggcttaaaacacaaccgttttagatgacattggaaaggtaagcaagaatcttgcagatacattttttggattgtccgttttcgatttttgtagaaacttgaaccaagtcaaaaaaaccatgaacaatatatatactcaccggctgataggtgagttggttaccccaagtccccacaggtgtatgactgttatcgagaaccttatttttgttgctgaatacaaaacctgacgctggattctgatcatttttgggtataactggaagagcactactttcctgagtggacctgcaaaatgaaatagaaggtaagaacataagcagaggggagctatctctacaaacacacttaaagcatttcaattgatcaaataatggaatgtacttgttgctcccagatttttcatcaacatgggaatctattttaggtgaaggtgtgccaattggggctaacgtctgtctgttggagactggattaaactgcttattgttcgcagctcggctagctggtgggcttctgttggacctggctgcagtagtattgttctggaaagttgaacgaggttttcggaatgcctacaagaaaacaaattcacttttagtgagaattacctcagaataggtaacaattcacaagtagaagaacactagagttttagattgcatcagaaccttggctgcctgagacttctctttaatttccttttctctctgttcacggcgatcattaagcatttgcctttttgatcttacctcaataaaatcatcatcgtcactaggagcttcaataccttgttgctcaaagacacgaacaattccaatctgcaaaggtgcatcaatttccttttcagataccatattccttttaaggtttgcttgtccagaatttggactgagtggattcttcacgacagcatctttcccaagtctattctcaaatgaacccccactaactgttttctgcatagcattcaaaccggacgctgagctgtctaaggcttgtttctgggacttgttggacacaacatattttctactcccaatttttgtagaagtttgtgcccttccatttccatttcgattttcatcggaagatggccagtttgattcccgaactctaaattcaaccctctgacgacgatatcttctattaccaccagaatctacccgagaaacctcagcagtaccagatgagcgcaagccagaatttcttactgcacttgtgtcagtttggacttggtatcctgattgtctttcagcaaaatttgattttccatgactcatctttcgagaaggtaattgcgaattaccagacaactctggttgcttttgaggtgacacagcagcctcaatgctcgctctcgctggaggtagattagcattcttcagtgtgccctcatcagaaacatttgtcggtcttctaagaacactaagctgagggtgtgagacagaggttgctgcgtttctagcgagcaggttagccgaatttccttgaccaagctgaacagtcaccaaggatccaggattctgattcaaagcataagttgataaaccattcgcttggacaactgaatgatgtggcggtggcagcaccccttgggatattggggatgtatacggtagttgaccaaactgaatgagaggaggctggggctgttgcatatgggtaagcgaggagccaaattggggatgaagaggaagaggcatttggatggaaccaatctgtatggcagggaaaggagaaggtatcagcgaaggaccagaaaacaaaccaaactgaaacttgacaggctcctccatctgtgctgaagtagtagatacaggaggaatagctgtctgaagagatgatggatgcagagcagcgctgtgaagtggtatgacaggatgagtagaaacggtagagttacttgtggagtctactttactggccacctcaaatgactggcgaccaatatttgggtgaactgtcaagttctgcatcgtggtttcagcaccctggaaggtcctagacgcattatgcatgcccaagggatcagaaacgacagcaggttgggcggcttgttcaccacggcttgtctcaatagaaggtctttcatcatctaaagaatcgacagtatgctgatgaagtggaaatgtagattcggagttccgttgacatttttcaaagtcatcgctgggtatttcaacctccactccttcattaaagcctaagactagattagagtctttatcatcgagatgcatttcttctaactcttgggcgagatctatgttctcatcaaccccgtgtattttatcctcctcctggtatccatcttcatcttcgtcgtattcttcttgttcctgcaaccgttcattactgtcaagagtccactcttcattatcccagcaagacacagagcctgtcgccatcatcaaactatcctttccaatatcactagaaataattggtgctccccccttctctagtaaaccagcatcttctcccattctggaagtaggtaggacagttgaatctgctgattcatccaagtcatcatgagagagatgaacaggggaatcaggtgggctagtaacggaaagtgaagattgagagtcacatcttccagtcagcttggtatcgaaccggcgatgttcatcgataccacttccaggcagcacatgatgatcctcaatataattggctagaacagtcgaattagtcctacctttatggctgtagttaatccctccaatagacgttgagggaccaggatgctcaacctcgcttctaaaggaagtcttttgcctagactcctggggagggggaagaacacgtggctgccttactgaatatcttggtcttccaaaagggtaatagtcatccccctcgggattctgatacaacttttcaggataaggagaatatggaccatgacgaggacggccctggctttgcccccatccaggatcaccatattgctctccaaaattttcacgagattcagattccattccatagttcctaccatgcgtccttccatctccaggaattctccaactctgatcaattgaatgctccgggaatcctggtttgaagtaggaaggggcactgagatatccagctgtcccaaagaattcttcctgtgggctatgtggaacattctccaaattttgtggaataaaccttgaattgcttccactctcaatatcttcctttctccacgtaggcttttgtctatcagggaacccaaaagaaccatccctagaaaattgagacgtggcattgctctcaaatgatctcatgggtactgatagatctaaagttgatgacgtagtaattctatccaccattctttcgctgtcttcccaatcaacaacatctgcagagtctttttctttaacaatatctaagaatttatcctctgaaatagttgaagagctgctgcaacctttggcagcttcagcctgtctcctggaaatcttttcttccaactctagaagcttttgcttagcagcttgcttcctcctttcttcttccatgaacaacctatgtttctcctcttcttttgacttcctcaactcttctgccctccttgtagcctctagtctctcctgctcgtttctgaaagcagcttctctggcctcttcttctaatcttctctgccgctcatcttgttcacgagccagccgtagtctctcttcttcttctgttcgagctagttctatcaccctttcctgttcctcaataatccgccggcgttcctcttcctgcatcttttgaactctctcaagttcagcctcaaatgactccctgacaggatcatgaaactctgtttgctttaaagcctctttcttcttcttagtaacaccaagtactgggaatggatcatgaacatcaaaaccagagtcaccaaagtctttcataaaaggatcttccacatgaggtttgtcactcttgaagaaggagcgtttatccctgcaagaagttcatatagagataattaattaaaagaaatttgtcaccagatgcagagccatactggaagagttagtcccatacctattctgatgttcaattccatacccatcccgattataagttcccctgttgctggaactatccatattattattccatggctgtcttcctccatgctgatatggagcctctctagctccactattattccaaacattttcccttgatgatgacaagacgtagttacttttcttagcagcttctctgcccctactagagggccttgctccataattattatgatttgcaccttcattttggagtggtgaggagactctccaagcgttggcctcccttcctcctccactgacaggtcttacttgagtcaaagaggactttgcaatttcattttcacgctgtcctggtttgtcaaaaacattagaagcagcatgcttctggggcaggacatgaggcctcagatcaaaacccctatcccaaaatggttcattctttgaatagccatgatccctgtcccgatctcttaagccatgactagtatcacgttcatcatcagcccaatcagatcgtggggccaaacgaacaagaggcagtggccctgcaaaatactcctttttcctcacatgttcagatgaatgtaatccatcagagaaactaggactctcgctgagctcattaccaagccggctacgcccagactggttttggggtctcatatctacaagtgaactgctcataccagagacacctctcggctcttttgaaaaatcctcacctgcagcttgcttctgcttctgattcagaccctctttctgtttctgcccagacacagaagctgaaggcaaagaagcctttagggacggaaaatcttcacccctcaaagttgccactttctctacatgatgaaaagcccgttccataggctcagctgcaccaacccgagaagcaagagacgtattcaacccattactccccctagtaacaccttcaccagtatggttaccaatatcaccatcagtagctgtagcagcaggcttactccacccaataccagatgaagcaggtctagttccactcccagcgatccctccaccggaatgaaaactcgaaccagacgaatcaactcgctcatgctccttacggagggaaggaaggttcaaggggggtggaacagatagtttctgcccagcattttgcgagcttcttggccgtgaaaggacaaccatacttctcctcctccaacaccaccaccgcatatccaccacctcctctcccccgcccataacctccagattgattatactgatgatgagattgatatccataagacttattcagattcacagacgcgtacttgtttccatctccatgattagccatttcccgcttccgccggtcactgaacatccccaacgcatcaaaccttaaacctagatctgattcttctcccagtcaaatttgttcgcagtgtattgcctcagatctactagagtgacgaattgatcaaaaactggaaaatcaatccaagaatctcccctgaatcaaaaacaccaaaattaaacaatcaattctcagattcgatccttgataaaaccagcgtcgaacaaacgcagagcttaagtgatggaaaaatcgacgagttagggtttcgttttcgcttttaaatcagctcgaaacggcgtgtaggaaggggcgcaaaattacctacggcggtggtgggcgtatgatatcgacgacggtggctaacgtgcgctgatgtcagacgacgaagcgcgagggaacgaatcgtcgggaaaaaaggaaagccctacccctactcactgcctctttgtcggagataaaaccaaaacaaaaaaaaaatatacaaattcaaaaaaaaaaaaaaaaaaagctgaggcacgagagataaaccaggacaagttttactctttttatgtttttgaccccgtattaatcaatcatctctttattaccccataattctcaatttgatacatatagtactctgctttcaattacgctactttcgattattagaaacatgtaaaacttcgaaattagaaacaaaaagatattagtttcttacaattaaaacaaaaatacaaaataaaaccctaaccctatactctccggttgatgatgaaatcctcgtgaatctctagtctatactcgtccattgatgatgtaaaccttcgtacgtagtcctcgtgaatgatctcttctcttccgttagtgaacttttctttggaggatacttttccagtgatcaatgacggcgttagactcagacctgattttagggttaccgttcttagagagaaagagaagaacgcgtaaaccgtcggttttgctaataagacgagcgttgagaggtaaggttcgcatatgtctaaggatctcaacgcattgtatggcttccggagagactatgtaaaaccctttgtctcttgcaacatgagcggctcttatggcggtgctaattagttcttcaagatgcttcgttcttatcgttcttcctttcttgcttcttctcttcacatgatcgttcacacatggtggtgggagatcatcagaaaaatccattgtgtgtttgagagaaaaacaacgcagagaaaacgtacttaagaaactagggctagaagaaactcgagagaaaacagagggatattgatgaataatgtgggtgatgagactactcgtctattatatatagagagatgtttccaaattttgagatgggattgtatttcggaaaaaaggaaattacaattttgattattattatttttgatcaatataatgtacgtcggtttatttgagatcgccacatatatatttcctttttcttataataaatacttgataaatctgtcaagagattacaacacttgaatctcgatgagaagaagaaggggaagaagacggagaagaagcttcacctagtccttgatttggaccacacgcttatccattcgactcttgtttcgtaaatttctaaaaaggagaagtatctactcgaacaagtcgattcaaggctagatttatggagattcaacaaaggccattccaatgagtatatcattaaacttcgaccttttcttcatgaatttctattaggagccaacgagcatttcactatgcatgtttacacaatggggttattcacttacgcacagaccgtgttgaagttgattgatccggacaaagtttactttggagatcgagtcataaccagtaaagaaagtcctagtaagaagacacttgagcttgttgtggctgataagcaaagtgtcgtaattgtggatgatactagtgatgtttggcctcatgacaagagcaacttgttgcagatcaccaagtatgagtagtttttcagagatggtgatgacaatacaaagtcgaaatcttacgcagaaaagaagacggacgagtgtccagacaacggatcattggcgaatgttctcaaatttctcctacagattctaaaaagattccaagaggagttggattcacaagacttgaggctgttgatacatggtccttgcagacaaggctgcttctgactgaatgtacgtattcagtccaaaacgttacttttcttcaaggtatttgtaatgaatcacttgagtaattttagttgattggttctcataattttgatgatcaatgttcaacgtctctcattccatttttattcctcttattggtcacgccaagttgagtagaatcttgtttacaaaactgttctgaacttctgatcaacaaattacatgtctttgcttgggggacaagtttaataaccccattaaaactatattggccgatatatcacacctcggatgcagaagacttcgaaatcggtctcatagtcctatgttgatgaatcgtgattgatgcagagaagaggaaaacaaacgtaaaggagctttattgcttttattttatgtaatggttctattatagaagaatatatatacagaggaagtgattattgttcactgcttttatcgagaaaacttaacaaaaacccactcacaatccggcgagcaattggattaggaatttgtcggcacaaacgtccgtcgatgtaagctacgatacctgaagcaacgaagttcccaataccagctttccacatgaacttcattttcttcttcttattgtcactaactactggtaccattgcagtattggaaccactgtcacttgtctcggcctctgcttcttctttctttggccttagacttgtaatggccttagtggcgtgctgtttcaatatgcgaattgcaaaactgacgaatagatgttcacacaatgtcaacaccgttggtccgatcttccattcctgtgatcatattgagagagatattcacatgactgagggtgtttatgtttatgcagagaaaagggattggaattaaaccttgtctccatggagacggcgacgaggacgagagcttgagggatctcctttgagtaaacccctgctttcgagaaaatctttaacacggtctatcatctcatctatgagagaattgcttggtgggaggtttttcaggaaaacctataagtgaaatatgttcggtcagtaacggaaatatgttggtattaatcatctcttggaaacataatgaatcggtttacgttttcttttattggaatggcaaagcaaaactaagttcgagaaatattatttacctgatcgtcaatgactttgactctgagatactcttgcctatacattgtatccaacatagcttgaaggtatccttcgatgtataactgcaaaggagtgaatttgagcatacacgtagatggacattagaaaaagctctacgcatagagttttctcagttctcttttatactctataaaaatgaaaatatttaaattgaaagtagaagacaaggcataaaatatcacctcatcaataccggggttacgatcaagcttaattgttctatcagggccaccttccatcaaagctgttcctatcacagacggttccattgccagtttaaggattccatggtggaaaccgctaacctgagagaagagagggagattataagaaagacgatagtggtaattaaattcaacctaccggataataagtagatgagtcctcaccagtccatcaacacctttcatttctgcacccctcagaacagaatcggagatttcagtgagagcaacaaagacgacattggatcctgctgttcttagctgcaacatggtatttgcataagaggttgaatggaaaaagctagaaaattcatcagccatatactatatgatacttacagttttcccaagatcaccaaagtaacgtcttgtccctgacaatcctttgttgtcaataagtttgctgaggagtttgaaggtgcctacaacagatagaagcaaattatatttccaccttaattgagatttaatacatatggaagccaaaatttaaggtaatgataccacgaatgctcattgcttacccactgtcaaaccagggacgttcaccaagccacgagaaggatcaaaaaaggcatcaagagaggacgatgaaaaatcatcaaacatggatgcgaaagctggaggaagcaacggactgccctttgctatgtagattgctctcattgcatacctagggagcacttatgcaagttaataatatctaaaaacagagggcagctaacttcggagcttttagcatagaaacaaaagatgataccatgagtaatgttttacacatcggagaagtagttcgcgaacagttattaaagcatgagtgaccaatacaccatttagctctacaaccatattttttatatgtggaacctacagaaaacgaagtaccagacaagcattagctcatataatatgatgtgcatgtgaatatacgcaaaacagcaaaattaagaagataaaatgaaatttctgatgcccataccttaaccacactatgcagtaatgacctcagagtttcttgagctgagttatagctcgaatatgaactcccaggaacaaaattagcagtaatctaattgaaaaggaaaagagaaacagaggtagaatttaaaacacaacatagagtagaaactgaaaaaggaggcaaatagagcaactgttagagcaaacctttattgggtggatttcaaaatgatcaaaataatattgactactttgcgtgtttgtactgagagatgatctccaaaatgccacaactctcattaaagtctcttcgtctaggttcaaattgactggctgcaatgtaaaacgtaagaatatcatatccagcaggcatatatgacaatacaatcaatacttaaagagccagaagttgactctggctattaaaattcccgtcactaatttagacagtgtgaagagaaaagggtaaggaaaatttcaagaagagtgacacagtaaccgcctatacctgcaaaactatcgaggagtgcttgacttgtgtgacgctggaaccacttgatactagaatgaatacacatttgaatagacaaccatttgcgtcacttgaacttgattgatgctgacgaagcatggctgcaaagggtgcccctgcccatttgtgatccacatttagagcctgcagtatccaaagacaaaattcatgtcttatttctgcaaccctgaaaaccaagccaatctattgcacctcataagattatacctctatacataattggttaaatttttgctggtcagtgaacatggaatgaagaccaacattctcaagtctcgccaccaggatcggagaataagacacgacagttttctcctctgcattctacataaacatttgaacacaaaatcaaatctagaaggcaaaggaaaattttaggttgtcgcaaacaaatgcaggaaaacaggtatggtggtacaatacagacttacttgcttcactttttcaagtaagtgaactcctaaatgggttactcggaattgaattttcgaacgagattggaatgctgagtctcctttaaggctttctgaaacttcacaaatgcgaatgactcgagtcaggccatctgcatagacttcatatccgacctttaccatagggattctactcaattccttgtcagccgttttatgatctttggccttctttttcatcattaagtgtgaggctatgcttctgtgctgagttgccttgaaaaggggtttccatggacggaccttatctaagctgacttcacgcagaggtatcatgcctgcaaaattaaatttccagctttttggtcaataaaataactatgagtgctcagtagattggaaacatgatttaaactgctgaatattcttcttcctagtaaacctaggacgttatgaaggttgataatttctaagcaggaacaatgttggaagccaactattaccatctactataactacaagcttgtgaggaagtgtcatatcatcccatgcataatcagccccacttccaggtccaagtacttcaatctctgatgaatcctacaattaacaaataacgagcagtgaaatgatgcacataattcataaacacatatgtagcgaagacagtaagtaggagctgaccaaccttttggtagtacgtgagagatgcagaatgcaagaaattctcaatgcgatatggtggtggggtatttggtggtttttggaagtgcacagcaagagttgaaccttcttcagtaacattaacagatgcaaattcaattgcgcctctgcctgcttcacctgactgctttctgaacttaatgaaaaaacacccaattgaagtgatgcataatgggcctgaccaactccagtttgctttgttcaaccggaactgaatgaatatcaatgaatttgcactgtcacttccgtgctttttgataaagttttcgaacagatggagttctttcttctgaatggtttcttcctgcaaccgcaaggctgctctctgcttgcttttgatggtgattatgcccacagagtcatccttcccaataaaacagaaaagtgatagaaagaaaagtaaataaatcatgtttatgagaggaaagcaaataaataaaggacacaaaacgaacctgaaaatagtgctgacggatgttgatagtctcttctgattcattgattacaagatgtctcggaacaaaagtcacaatccgtgatggaactagcattttacttgagattgatctaactgacaaaccaaaccttgttacataccgaaacccagactcatcttttgttcccaaactaatttcggtaagtcctgataaagcatccaaatccaacactgcttcagtagccccatgaccatcagccaatatgacaccaaccttgcgagatctggccaaacaagatgctgaataatttctgaaaagatattgggtgaaaataactatgtactgagcacggatagcataccttaaaaaccacgacccctctgtctttgggggtaaatacaatccaaactcaggtgggacaatgtgatcaagtttttccatatcctctctacattgtttactgtaaatgtaaatagccatcaccaatttaaaggatattttgatttcttgtcaaatacctggatagaggcttctgatcagggggaaagaaaaacaaggtgcagtctgagtcgtttttaagaatgtacgatgtgaaaacagctgcctgtaccaaccagaaagatatttgttaagagaaagcaaccaagaaggaaacagatgataagataaaatcacgacctccagtatgcctcttttccctaaagacaatctcaaggaagcacagtattttccgccggaaaaatcaagatcaacatccaaacattgtgcatcattcttctgtttctgtaacttcttgacccactgaccactattgactggtttgcagctcgcttgggaagtagtgagagtaactctaaagtatatcatgtctggattaacatagaagtcaattgtttttccgctctgtatagttgcatgtttgccaatgctgtgtctctccatcgaggtgttctgatctgcgaacgagataaaaatgttaggggcagaatacaggtcacccaaaaagcacatacttttctgcagttaccagtttctgtcaataaaatggctgcttcggaggaaaggaaattcgacacctgcacagtgggcaaaagaaaaatttccttttgctctcgcaatgcaatacatgctttctgtttctcaagtacatcagaggatgcatcaggccgtatgatcgatacttcccttcgaatgctatggatcagaaaatgcaccttcccaacacactgactttcagatgtaacagagcaatatgtagtagtcaaggagaccttcactgattcgatagataaagcctttttaactccataacttaatttatcaaaaattcctgttaggcgtaccgccttgcctccttcaagctcttctgaccattcacttcccagagacttctcaccctcaaacaaagtttcgaaagattcaggtctgaaagagagtgaaaaattacctgccatttaatgtgcaaaatcaatcagattaccattaacaacaataactgtggttgattatcctgtacgctaagagaaactagacttctgatattacctctagaactaatgtaaataaatataggaacttacaatcatttaatacacagaaagacaaactgatggaaacctagttgcatactttattgtgatgaggggccatataaaacttgctcgaatgtttcaagttatatatattgtagcaggaaaccaaaatactaccagtgaaacctaccaacagctaacgatgtcaatgccttcttcatatctcctgatgagcttatggcattaaatgctgcgactgaatcatcaattgaaccaccaggcttcagaggcacagaagcaaattcgtctctcttctgtttagatcgttgaaaacgtatctctatgggaagactggtctcgttatgaatccttgtcaaaggagaaactgagatcgataaaccatcctacagggttaataaatgcaaaagttaaggaaaagttgcatcttcaagcccatcggttgatatttagtgatctttagaaaaacttgagaatcgactatgacatacctcaagtcccttcttaatatccacaacaacaaacggtccaggatgactccttgaatctacagaagatataaaaatttcagcagtagctcccacatatgcttactcaaggggaaaacgcatgaacagatagaaggtgtggaaaacatcaaagtacctaggagtgatattatccttgttctccaagctagtgttctagcttctaacaaagaaacgttaatagaagaagttatgaactttccagaagatagctggactgcagccactggagaagcttcttgttgatgattcattgaatgcctttgaaagaaattacacattataaggatatcccacccactttttcatgcaaaagaactagacagtagtgaacaagtttctccactctcagttagttcagaggattattattttttagtacttctcttttgcaccttatgggtaaaagaagtatgcaatctactaatccgatgggaaataaaattgtttcagcaatctaatcaagagagtgccaaagactgtcagcattcacctcgaagcataattaaacacatgctcttcttgttgcggaatcaaacaaggtataagggactaagaagttaccggagaaaaatcgcagcagtttgcttcctgccaactgtggcagtctgtttctcattgaaacggcaaataaggtcaaggccagagagattttctatctgaaaaaagaagaactttttcatgtttctctatagaacaggtgtatatcaaaagtatgaaaattataaaagttgaacagaaatcaaggaaacgataaccttgcaacaattggaaagaatagcggaggttttcacagaaaatggaccagcaaactccagttttccaagcaaaaaaaggagcatatccaacgacagctcggttagaaacacctccaactgcacatacgagggaaaaatatgtaacgagttattatatatccccaatacttcatggaaaatgaagtaaaaatctttaagtacctttccaattctgcagtaaatatgggtaggtactttgtgcatagtattgttaagatcccgagtctgaaaagttgaacggtagaaagcactaacttcaactggatgaataaattcccgcctatttcaacagagaaaggaagaaaaaataaacagttgcttgacggaattctataaaggctagaaaaatgcatgatcagggaagccatacgcatattaagaacccagggaaagaaaactactaaccattggtttgtctgagcatcaaagtacagcactaatatgtttgatgtgctcataatcctgactttagaagatagcatttgtacagttagctgtgtgatattgactgaaccacgaaaaaggggaaatctgtcccttgtttctgaaagttcatggacgatggtcagagatacgccatcaattgttacagtaatagaagggggagaagagtccaccatcacagaatgcgtttcagactcatggatctcagagggtaccacaggtgtaagactacgagtcgccaaactttcatgaaacactttaaacttgaatggatttcctggcttccggacaaattctggaaaaccatcaataaatgcaacagctgaatcactcttcttgttgacgaggtaaaatgtatctttgaccagtttacggtaggtctcccagtcaatatcacccttataattttcggattcgccagaagatgcccgaaagagtgttggtgcattgtcgtaaagtccagagacgtttacaatatctgaacttgaatgatagtttaaccttaggggctctcctttattgtttttggcatacaaagatgtcaaggaaaaccataaggtggatgaattccatccttgatggcggtggtagctgacctgtacatgaattcaaattttaggggacaccatctcactaaaaagcagggtgaagaaaaaagatagctgacccgactttattttgaaacccaaagaatactaattactttctctctcttcctattgttataatattgtactgtacataccctgaaaagagctctttctccgacaagagaataatgaagggtaccagtcacaacacatttgttccccccatcttccactgtgacgaacatatgttggtttatatcttgaatagcaacaatcgctcctacacatatatcaatttttcattagaagaagaacccacaaaagaatggctaaaatattaatatacctacttaccatcaggaactacagactcaaaacttctttcagattcactgttgaacgaagaaggcctttctaaagaagcatgtgcgctatctcctccaggtatcgcagcaaataatgaaagcatagaaagtaccatctgacataaaaacacataacaggccagcaatcatgactattaacaactataggaatgtgtacatataacgagaatttcaaaacatgataaatatattatataccacaaagactgatacctgcaattctgacagagaaatagttatatcaaatcccagaacagaacaagcgccagcccatgcctggctaaactggtgaccggtattttctcgcttcttaacagatgcagagacacgtaggtcttccaaaatatagttgttataacgagagtgaaattcttcctgtaaattgctgtttgcagaaaattctcttagagaattaaaatctcctgaaacacttgtgctatcacctgaactgattacatcgctttgctgaaatgatgtttcaagaggagtaccaggcagaaaagaagaagattcgctactaaatgctggagaagaaaattgagtaatatttatgtccctttccacgctctcaagaatctttgaaagaactgacaggcgagaaacctcacaaagaaacttctgttctccgcctgccgagtcaagggaactgtggagagtgatctccaggacaatttcccttatagctcctgcaaatcatgcaattataatttcttctcgaaatgccaattatctacatatgtagaaaaaacgttgtacaagtaaataaagatagtacgacttaccatattcatcatcacacacaaaacccagtgcaaactgggcgacatctatagaaaatgcttctacagggtacccgttttcttgttgagaaggaatactaatttcagtgacgcttgaatcagcttcgaatttctcaagaactggtgcagaattctgaatcactgacaccttacttgaaattaaataaaggtacgtggagtaaccatgaattaaccctatcaaggcctttggttcaaggacaaaaagaacaccctgccagcaacatcgcaagttacttcatgcacgataaagagctagtcattatgattataaagctagtcgtgtttataatttacctcgacgctacaggagattgactgaaatcttctcccaatagaaaccgatgttacaaacttacttgaccgacgaacgtccaccaagacattttttgttgagcctttagctacaagtaagtcagtcaatgctaaattgatgtgcatccaacggattgagttggatggtaaaaggtctgaagcagagtccaacgtctttacttctctctgaacctgaacattgtttgtagaaggttcatttgctgttgatgcgtcccctagagctgatgggcttgagcaatccatagacacactcaataggcagctagaaaggcatgcttcaaacaagatatcatgtgacctgaacagcaaagattctgtgataaagttgccagaactcttccatatattaccctcaaatttgaagagaactgattggagtttacacaaatcaacattgattaaacacttatgttcttcaacagatagttcaatgcatgcttcctggacagaagaccagatttttgtatcatctagctccacaagcctctcaaatttgtcgtctactgcaggaacatcaaatatcacatctatatccttcagcttaatgcttgctttaactacaaaaagagttttgcaaggattcctttcgatctcatgttccacattcactgcatcagacctgagaaattcttgtcccgatgaatgacccccagagcttaagccactcaaaccacgggaaagcccagaaactaaacttagaagcatctggtacaaaataacaaaacttacttgaatgcttttttcataacctaaaaggtcaattaggattttgatgctattcatatgttagactcagatcttaaactaaaggagcccaagcaaaggttcatttagatagagtaactcataagtatttgagcattatgtccaactataaggaagtctagaaggatcttttctaacaccacgccggaaatcattaagaaattccgcaatcataaatagaaatcctttagccatcttgataatatcagttagcaacaagtctatatccagatatcaatcattcggctagaaaagcacattactatagactatagaggatttttaatcaagtattccactggcaaagattaacgccatgacagtatgacactatgcaagcaaggacaaaaaaggcaaacgtttaaaaagagacatgtaaatcatgctgcatctgaaactttagaatagcttatgaaacacacatattaactcatgcagccagcaaaaaagtgagaaaacacatagaaactattttttccacataatgcaaatttatagacatgaaaagcgacaattgccaagaaagcctctcttacctgaaagtaagcatttaggtcatccggttttgttacaatagtcagacccagcacaaacacatccaaaccaattgagaaatccattatagcttcgctaaaggaataaacattctctctgcaataaatcgcagttctctcagtattgtattgaattgcataaaatgtaagtggtacaatagtaagtctcctttctatgatatagtgtcaccggagttaggaaacatcttatggatatacactaactagttcaacgaagtacctaagctcagtcctataatttgggaaggatatgcagctgagaatcaattttcagcgataaattatgggggcgaacagttcgcatatgacattagaaccaaaacatgtatcaagcagcgagacaaagacaatgtttagcttagtataacacatgtagcaatataaggcaataaattccataccttaaggaggaaaagcagatagttacgggtctcactacaaaaacttgactccagttctttactgccattttgcagaaagaacaatcaaaaccagaaaaccttaggtgtgaggacagggaattccatccttgagaaacatatttttcataacttggaatcaccgtatcacttagccccagctcctgaagcaaaggcctatctgttcttatgttatcaggcccttgaaacatccttgatgacaccacgtcagatttataagtcggccagataacaaactcaaaatcatggaaatcaaataatagaatatctttcttcccaattaaagtattcacttcttcagccttctcaactaacaatttgatctgggggccaccaagaagtatgccaacctgaatctgtctctctggatgaactctatgcaaagacagttcaatactgcgcctgtagatcccatattcgtcataactagccatttcaggatcaaccccgcctgttaccaaagaacttgaatgcacctctccagtataatcgtctacaagtaacttctgagcccattctatctgccaaattagcaaagccaatgaaaacaacgatgaatattcaaaaacaatatccaactttcccaacaccatgctgcatttccagaactcggaatcttggttaccaacaacctcatatgccatacagcttttaatatcaaccagtaaacaaggcttatcagaaattgtaaaagtacttttatctaacttcatgcaattgctgttccagttcaaccacatttctctcaaaagattttgtagatgcagcataccttcatgttgatcactgccatgattgttaactgttttggaaatttgctgtgctgggtccatgtctagaatagttttcacatcttcacgcatgtgcttcttatttccttcagaagaactactgggatcttttgtagatttcatgaaacgactggtattcttaaaactagaagactcaaccttcagtttcccacaggaagcagacagatactgagtaagacagccaacagtatacaacaccaaaaactcatcaaccgaaaggcaaagcatgacaatgtttgagtccacgtgtccagtactgtctttcgatgtcataaaacttgaaattattttctctggataacatgtgacagaaagtttcccaagatttacaactgcatgaaactcaagagatacacactcggaatcatcttcattattcctatcggtttgtagttcttgggtcaacagtttgtttaaccacagaaagcaagctatagaccagaatgttctacttataagtctccagatataagctaaaacccaggtggtcttagacaaatacttgaagtggccgtaaagggaagattcgtcataatcatcatcagcatcctgagaattcagacaagctctgtatctggctactctccgtgcccgtgcaatagcttcggcagggagctctttctcaatattacatatcatctcccatttacgtcttgcagttacaaaatgccttttgttttctgaaaatttccaaagtaatgatttctctggcattttcctggagtacccagctaaagatagcaaatactcgtacgcatttacgtatcgcagccagaggataacaacactaactaaattctggaatgaaacactgtgaggtgaaatcatcaagccagttctgcgagcagcaactttccaaagataacgtccattcctgacataattgctatctttggatgataaattcgccaatcccattaaaaccggaagatcagtgggtctaaacgagaagctcaactctggaacgcggacgaccagatcaacaagttgaagattatgcagcgtaatcaacatgactaggctgtcaaatccacaaaggtcaactatttcattatccctcttatatccaatgttaaaaccaaagcaactcagcgtaaacgaactacgcctcaaagggaataaaactgcagcagccgaactcctaactaaactaagatttccaaaattctcagaatcactcctcagctcattgatttccataagacaactcaagtcacttgaacccggtaaacaaacttgtacattaataccatgtatctgaatacggaaatgcctgagaataagattcgagaatgaagtcttgagcttacttatctgggaagtgctacgaccaagcatcttttccaaaatgtcatgtaagacgcatccctgcaacacatagttacaattacgatcaatcaacaaatcaatcccattcacacagtagcaacattgatttaagtaccttgggatcaatagaagatagaactttctttatctcattagcaacagtatcacttgatgctcgcttccttctcgagcttccttcgtccgtccctctaaaaaaaacaacgcagaatctgataaaccctaacggaacaatggacttcacaaaacaacaattgagcaatgggaataagttacctagctgacaatttgacattgacaccgcgaatttcgaatttaatcgccggagctgaccaaacggaaaagctaacaactaattggtcgacagtaaatttctcaaattgaaaattcgattcatcgaaaagctgattaagctgagaaacatcgaatcgaaaactccgtaaagtgatgagagtatcagtaaaccctaattcgacttgaagatcaggttcatcgcgagaaaaagggagtaacagagtacgaagtctccgtcgaacccaattgcgaaggaacgtcatgcgaatttagtgtttgttgtgattgaaatcgaacgattcggccattaaacgagttgataagagcgggaaagcaagaggacaaagacgaagtcacggagaacgaaaccttatggacacgtgtcagtctcttacgtcggtaactcagttgtagacttgtgtaggcgatgaagaagttacttatctgccgttttcttcctagctaacgagactacctgtagtttttgtagaggatattgtcaaaagaaaaagaaaaaaaaaattaacgtcggtaacttaatttgaacttattagatgagtatgttttttggttaggacatactcctacttatgtttatgtttcttaacttcaattccagcaatgttttagtttctgtttcagtattgtaatagctctagttgccttagagtaaccactttggttacttttgtggatgtctttagatacccatttttaaatataaaagaataaaaaaataagagagagaagtaaagatgtctttaaattgtctttctagagacatttgagacatctatttttgagatgtctttacttttactattattttatgtgaaagacatctatgaaaaattgttagatattcttatgtgtttaagtggaaagtccactgatcaactttttgtaagaacttaatgttatcaatgaaagacaaagtggaaaagaaaaaaaaaagaacttattaccagtttgcacaaaatctctcaaacatctaaaaagattaaccaaaacgatagccaaatcagtgttctattgggaataagttgagaaaacctgttaatatataaatcaatttacatgttataaattcaaatttttaacatataaatcaacaaattaaattggagaagtgtcttttgtcaaatggcaacggtttatctgcaaattttttccaccaaaattatactccaacaagtcatatgttactccacataataaagattgaggtatgggttgggtttttttctatccaataattatatatatataaaaaaaaagtcaacaattaaatattccgaaccaattatagtttcatggtccatcttggctatacccaggcatcgaagaagaagctcagccattaattttcgctattcattctgtttttagttgttcttgctttattgttatgcttcttccagcctctaatgttatgatggttaaaaattaaaaatcacaatacatgtttattctactatcagattttgaacgttatatatgtataagagtagatataaaaattgttgttttttttccttcctttttaacttttaatataaaatggcaacgaaacaaaagaagaaaatgtatgaagtatgaactatcaagcaacggaaagatggttttcgttttaatttacttacgagtttaggaccattaaattatttaatcaaacctaataataagttgtacttgtaccgaaataaacggttccaatttcgaataaactataaatggaaagtaaaaattccataaattccatatagacaccatcgtctccaacctttttcttcttctccgtaacctaaaactctgtctaattataaatccaaccaaaacaaaaaaaaagtccatcatcttcttcttatgtcttcaatgcataagaaaggtacaagcagagacgtaaatagccaagcatttacaaaactaacgaaagtagaaactattccagatccagacatttacgacataacctacgtagatatctctccctccgaaggctcctcttcaccattatccaaatcaccatggtccgttcaagtcgatccatccgccgtagattctccgtatcattcggtgaaagttacgacggatacaaccaaagaaaaatcaaccaaccactctcctaatattctcttggggtcacttgttcgcgaagaaggtcatatctattcattagctacatcaggagatttactctacacaggatctgattccaagaacattagggtttggaaaaaccatgttgagttctcgagttttaaatcgaatagtggattggttaaagccattgttcttgctggagataaaatctttaccggtcatcaagatggtaagatccgtgtgtggaaagctgcatctaaagaatcaaacgttcatcgtcgtgtaggtacaatgcctaaccttctcgattatataagaaactccattgttccttcttcttacttcaacttcacgcgacgtaatcgtagcagtgctgcgttagggtttcgtcatttagacgcgatttcttgtcttgcgttaagcgaagataaacggttgttgtactctggttcttgggataaaacgtttaaggtttggagagtttcggatttgcggtgtgtggaatctgtgaacgctcatgaagatgcggtaaacgctgtcgtttccggttttgacggtttggtttttaccggttcagctgatggaacggttaaggtttggagaagagaagatcaagcgaaggatacgaaacatttcttctctgagacgttattgaaacaagactgtgccgttacggcgatcgctgtagatcaaagcgcgacgttagtttattgtggttcgtctgacggaaccgttaatttttgggaacgtgagaataatatgaaaaacggcggcgttttgaaaggtcataaactcgccgtgctttgtcttgtcgcggcggggaatttgatgtttagtggttctgctgatttagggatacgtgtgtggaggagaccagaaggtggaggtgagcatgtttgtctttcggttttgaccggacatgctggtccggtgaagtgtttggcggtggagagagatcaagaatcggtttccggtgagagacggtggattgtgtatagtgggagtttagatagatcggtgaagatgtggcgtgtgtcggagagttcaccgccgatggtgaatcaagagtttaagttgccggatcagtttggtggtggtggtggtggtggtccggcggagttaacggtggctcctagcttctcggctcaagggaggattagtccacaaaaatagttgtttgttttttgtatgtaaccaacatcgaactattcaaacgtgtatgtaattgtaatttcttctgttaaaagagattttgatccaacaagattcaagcatttttcatttcgtggagttccggttcaccttaaccgggaatctgacaaaacattacttacttccatcaaaactgtaaaatttcagtcagtgaaatgattattcaaatattcatgttcagaaactctaatgatcataagacaagaatgatctcataatctgaatttttcaattgcatgtattagctagagaacaaaaaatcggtactgatttgaaggcctaaaaagtctatgttgtttagaacgttcaaatatcttaccatgggaatgaaagtggacacgagtcatgtgatcatccttttggcaccattgttttgtcttctaatcgaacacgtagtgtcattttcatatcttcaatcgtatattttgttactactagtcaagtttcttcttatataagaaaatgggacatgatggattatgatttaagtgttccaacggtaggtaatgaagttaattcgactttttttaatcattttaataatgagatgtttggtgcgtcatacataaaacacaacatcaggtctcatcattaggcccttttttagtaatattcaatgttttcttttacattttcatatcacggatccaagtaattaagaaaacaaaaaacaaaaaacgaacctaatttatatacacatttcaacatattaatagttggtagtagtaggagataaattgatatctagttaaataatcttataagttttgagataattggtcggcgttacgactgtattatatacttctttttacccggttagtattttcctaatgagaaaaaataaataaatcgattcatgaaataaaataattttgaaggatgatgacatgatgtaatagagttaagagtagataccatgaaacaagggtattttattttcaaactttctaaaccataaagcacaacacaacagtattggtgtcctaactttatctgtcttctaataaatattaaatagaagaaataaaatcgaaacatgttgaccataaaaaaggttttgtttgttaaacaacccggtttcaaatctaacacatgaggttgcttctcatacgttcttaactagtagcagcagagttatctatataaactcttctttgtcatagaacaataaaaaccaaaaatcaattttcagaaaccatttcgtgacaatgaagaaatctattttctttgtcccagttttggtattattcttctttggatcaagattttctagagtagctagcgcaggagaccaaagagccttagccgcttcattcgtcttcggcgattcgctagtagacgcaggaaataacaactacttacaaacgttgtctagagccaacagtcctcctaatggcatcgatttcaaaccatctcgtggaaatccaaccggccggtttactaatggccgtaccatagctgacatcgttggtaattttattataaagttgcatccaatatataaatcaaattttcattttctaacgatcatgcgctaatgtttttatttttttattttgttgtctataggagaaaagttagggcagcaaagttatgcagttccatatttagcaccaaatgcaagtggtgaagcactattaaatggtgtgaactatgcatcaggtggtggtggaattc

SEQ ID NO: 93 - DNA, 83513 bp, Arabidopsis thaliana
aagcttgtcgtcgttactggactcacggtggtactctccgtgacgttcctgtcggtggtggtactcgtaaaagcgcgaaacgttcccgcacttgctcgaactcttcttcctcctctgtttctggtgtcgtctctaactctaacggtgttccgttacaaacgacgcctgttctcttccctcagtcgtcaatctctaacggcgttactcacacagtaactgaaagcgacggaaagggaagtgctttatctctctgtggaagtttcacctccactctgttgaaccataacgctgctgcgacggctacgcatggatccggttcggttattggtatcggaggttttggaatcggactcgggtcgggttttgatgacgtcagctttggactcggaagagcgatgtggccgttttcaactgttggtactgcgacaacgacgaatgttgggagtaacggtggtcatcacgctgttccaatgccagccacgtggcagttcgagggtttagagagcaacgctggtggtggatttgtctccggtgagtactttgcgtggccggatctttccatcacaactccgggaaactcactcaaatgagaaaagcttctgtcttcatcaaagggcttcaaagtctcttcctttttttagtctctattggtgatgttgatctcttagtttgtgtcttgtcaatttagaaacttgtcttcggaaactagaaaacagagaaagtttgtgtttttttggctctatgttcttaactttggtactttcttctgctctgtttcgtttaattgatttcgaatggaaatgactaaacttgtttagaacaaacttttaatttgaacagacaagtttattgaatgatgatttgcacaacatatttctctttaatctatttaattcatcttgagcttgacttacaacttctgggttcgactggtctcctgaggagaaaacttgtgtattgttgttgttcacttcaatccagctcaatcctggatctttagatgaagctaatcctctaatcttccttctcatctctgcaacatcctcccatctcccatttactgcatataaatttgatagtagaatgtgtgttgcagtgtcttctggatcaagtttcagtatttgctcagctgcatatagtcctatctgcaagtttcttgtgttaacacatgcgcttagcagagttctccagagctctgcttggttgttcccgggaggagattgttctatcagttccagtgcctcgtctactaacccagcttttgatactaaattcaccatgcaagagtagtgcttaaaccctgctttgatgccctgttccttcatttggttccataggaacttaccttgcaacgttgatcccctgtggctacaggctgctaataaagacaagtatgtaacagcatctggcatgaatccgttttctagtatttgctcgaagaagctcagagctttttctaccattccatgctgactataagcacctagcatcgaattccaacatttcaaatctggatttgaagcaagagagaatattgtttctgcagtttcgtatttaccgtttttcccatacatgtctactagcgctccacatactgacataacacaatcgaatcccgtccttatggcaagacaatggaaaacttcaccttgtcttagcattgccatatctgaacatgctcctatgacactactcagggaaaaaccatcacttctattcttttctctgtacatttcaatgaagaattggaccgctaattcgctgtttcctaatctagaatgccctacgatcatctcagtccagagaacaacatccctttccttcatcacatcaaacaccttctgtgcagattcagcttccctgttcttgaagtacatcgacaatagtgttgttccaacaaaaacactcctttcatatcctaatttcgttacttgtccgtgaagaagcttcccatgaacaaatctttctggttccgctgtcgcagatatagcagcagagaaagtatattcatccggccgaggtgtggacatcctcagcaaccttctatacataagcatcgcttgctctccaaagccgttttctgagcaccctgaaataatcgagttccatgaaaccaaatttgggttatgaatcctcccaaacacataaaatgcttccctcatgtctccacaactgcaatacatgtcaagaagagcattatctagaggtaaatcagctaaactatcagagactattatccgggcatggattagtttccccagtgaatagcttcccaatttactacaaccattcaacacaatcgaatacgtgaactgcgttggatcaacaccagacatcaacatgtttcgaaagaacataagcccatcttctatcttatcatttttcaaactcccaactatcattgtgttccaagcaaccgcatctctattatttacacagtcaaatattctcctcgcagattctaagtccccgcaactagagtacatccccaaaaccgatgtctggacaactacattatctgaataaccaagctttataatctgcgagtttaatgatgaccccattaaaacatcctcaagcacagcacatacttgcactaagctagtgaaagttgaactattgggcttcacgtactcaaacgccatatgggttgttagaggaaacgcataacttgcaaaatctgggttccgggaatacgccgaataaagcgcattataagaaactacgtttctgtgaggcattttgtcgaacactttccgtgcttgttccagtgaaccacacctcacatacattgagatgagattgttatttgcgtacggagactcggtagcggcgccagcgccggcggtgaggacgagagcgtggatctgacgcgcccgttttagtaccgtgatcgagacgcatttccgtgtaagttctacaacggaagaagctatttcgttcagtggcataaaaaagctaaagaaagcttcaggttttccaaaagaaaattgaaatagttgcccttttaagaagattgtcctcgcagattctaagtcccctcaactggagtacatctacatcatctgaaaagatccaagctttataatctgcgaatgcagtgatgatcccatggaaacatactcaaatacagcactaagctagtgaaagttgaactaatgggattcacgtactcagacgccacatggattattagactaaacgcatatcttgcagaatctgggttccgggaatactccgaatagagttacaatgtttctctgaggcattttgtcgaacactttccgtgcttgttccagcgaactacacctcacgtacatcgatatgagattgttatttgcgtacggatactcggcagcggcgtctacggtgaggaggagagcgtggagctaacgcgcctgttttagtgccaaaagttgtacaacggaagaagctacttcgttcagcttgttcgcagggcggcaattcacattctctctataaagcgaagtttcgaaacgatgcgtttcatttgaactcaccttttaaacgccgtgtttgactttaaagtttaatctaacctgtctctacaaacaatacgctgcgtttcatcgaacctctcgtcataacaaaaacgctacgttttaataagagtttattgatccccggcgagagtgaactgtcgtcgttgtaaaatggctaccggaaacttggcttctcgtcttcatctcttgatcgatctttgtgttcgccaattccctgtaagtattattcttcagctcttgttctccgtttcgttatgagttattgtaactatgtgtaattgtataaacgcaattggttctcggagtcatgtaggaaagagaagaagtaactttgccgacgaaggaaacggaaaaagatctgcttctttctctatctcaggttcatcattgtcgatgatttttttgcttcctgtgtgttaatcctcgaagctccggtcctcttaaattggatagttttttttttttttacaggtgttgagagaaattcaatcttggaggagcgaaatttcatgtgataaggcggtggtgagttcattgctttaagaattcctaatattttaagattgtataggttggttgatgagtattggagctatttgattagctaagattttcaataggaatcgcgagaggagactgttgttgatcatgatgaatctgctgatgctttatatggtccagactctatagagtatttatgcttagaaagacttgtggcggatcttgtaagtttctcattctgctgttaggtagagttgtctatgatccttagcttgatctggtttctctggcaggtttgtttgttgggtatggagaatgtgcatgttaaacatttggctggcaacatacttgtggaagtatccggttgtcttgttgaatctgtatgttacatctgcctcactcgggattttagaatgttgtattcttccagctctcatactcactcatttgtttttcctagggaagtcaatgggatgagttcattcgtttgctttgtgaatgtttgcggttagcagttatctacagtttcccaattcctgctgtaggatctgaaactggatttggaagtctagatcaatgtttcttcggttctgatgttcttaaatgtaagctggaaaaggctaactggtccacggtgtcggatatctttcgagttcttcgtaatatattgaagcgcttgagccaagaagacaatgaggaaatttttgatgtatacttggaatctgtcaactctacacttgcaaaagttccttggtgccgattggatactattttttctcatcagcatggtagtggtgaaagaaatttccaaggtcagagtggaaacagtgaggaagcaactgtatttcttgggagctttgtccagtttctctgttccatggttcagcaggttcatgttgtagaagattctgatgattttgaaccttcatatttgatcctccaaaaaaccatcaagcttattccggatctcctccgttggtgccaaccaaagttgaaaagtcaaagtggctcttgcatgtcaagatacctagggcacaagttactggtacgtatttccatctgtttctaatcttacaagttcagagaaccactttgctttgtttcttgatatatctcggataataacttcatcctacacgactgtctccccctttttgtaggtgttgatgatcaggcttactgataagtccaaaatcaaatgtaccattcttctttcatggctgcaatatttgcaacgggattctcaaggctttcttcaacacaccctaacaaagtttaaacccgttcaagataattgtttggagggttcgccattctttgtgagtttgtctgatagggaggtcaatgagatgcattctaatcatttgcaaagactctctgtgtttctgttcctacggtgctccttcactttgatttactcaagtagacataacgacaagctatgtgagtttgattgtagaaagaaagggatggcagagatgtttaaatggattgaacgacagattccaggcaatatgttttctgatcacagaatttatagcaagaagaatgttgaattttctgcatccttcgttcggctgttcatgcatgaggtttgggttatcattctgtatttgccattcgtatttggtgttttagtttaacaccatacactagagctctgttataacttttctatgttaaactgtaggatgatctattatttaaagtcctcctgcaattgctgtctgtaccattgcatagacaggaattgtaagtagggtaaaacacttgcctttctgcaaacagttatctagatttctgtgagttcttatgggcatttttttacttacaggcctaacgtggaagggggttcgcttgaagatgaggaacaaattactctcttccgtttatcaaccttgttcaatcctgtaagattattctgtatatttctttcagaggtaattttcatataacattctcataatctcttgtgctattttccatttaggcttggtaatatgttcatcattcacctctgtcttctgttttcagctgcattatgatcatcaagtacttcttgattaccttatatctaaagatattggggctagctgcgcagagtacctgctgaggttaatccttttctcttaagaatttgcatatcaactgctccatcttgagtaataagattggatatgatctgttagtttgtgtgagaccagccatgttagctcgtactctagtctttgaatgatttctctagtttacaaattacgttatgaattttccaaacaaatacttataggttgattcccatatgacatccgctgttttttcctggtagatgcttgcgtgcagtatgtgattcatggactctatttgtggaattcccatttgaaggaagtacagatgctccatctccgaagagaagaaaagttttgcctgagacttctgaggttgaacaaaactggagattacatgcccaggcttttgaagacgccaaagattgtctgctttcgttacaaaattcagttgttaagctacatcagaagaaactgtttccatacaacccagaggctcttctacgacggtcagtcttattttcgcaacttgtaaactcacctacgcatataaatcagctaaataaaccttcttctattgtgaggcagtttgtcaaggtttcatgagctctgtctatcccatgagtaatatatctggaccaaaggtaaatcagttgcaaatatggattcaaaagaactgttatatgaaaattgtcatatgcttatggtttagcaaaatgttgtgatccttagtttgtgggttgcggtaattaggaagtcagattcaacaaattatacttctctgttagctgctagataagtctctaacctctcaatttggtgcttctcaggtgagattctctgagacagaacagaaggatcagatgccaacacaaagaagtctcctttccagatcaaatttcaaactaatcggctcaccagtagaagtgtatgtaagtttgagaatctcatgtctaatcgaattttcttggggtacttctgacacaagtgtagctgacatgagctgtgtttctgcagagagatcctacattctttggttggtgcagctgctatgaaacagagagcattatgttcttgcctccacaatccaaatctgaatggtataagatactctctagtcaagctaatgtgaaactgccccagccaattagagtaagcaatgaagtgtagaatatcaagaatcacaaatattgaaactctcttattcatatcatagatgtaactgagcccaaatcatacacaggtgtcatcattttacatttagttatatttcgctgctatttcttgtagcagttgagaaagttcatgaggcttagtgagcatagccatgtgaccagcttcttcaatccgcttaacttcgtgaggctcgtagttactaatcatccacttctgaatctcctctggaaccacattgtcgccttcacagacaataaacactctcttcccagatccatacctctcctttgttatcagatcttcacctcccatttccttagtgtataaccagcttggtttcatcaacgccatggctaattctagatcctgcaatcagattaccaatcagtgaccacctgatctcagacaaactatgccataatcataactgtagtggactcacctctaactggcaattactatatgccttctccttcaagaaactagtaccgaacaaaactgaacttggtgggtgttctaatccttcctcgaatgtaaactcacagtccatagcgaaaccctctggtagtctcgtaaaatactgcaaacaaacagaaagtgacaagagattataagataagttcttaagaatggtaccaaacaaaataagataagaagagactaatttctttttccggcgacctcttgaatcaaaaccgccggaggagagtcatggtgcggcatgtaagcagagaggaagattccgacagagactttggtcggaaacctttccatagcaagagaagttccaatgccaccatagctatgaccaacaagaaccactttctcgttttcagggagagactccatgaaactcatcaaaggctctagatacgccgacaccaaacgaacctcatggagctgcctcgtgtcgacaccggagccaccaaggtcgatagctgtcacacggtgaccatcgagcttgagctttgcagctagtttgaaccagcaccatgctccatgacatgagccgtggacaaagacgaagtgatggagttgttgttgctgcatgtggtgtgtttgcatttggtattgcttttggtatgtcatgttatcttttgtccattcgtttgttatatatatacacatcagggcacatagttttctggttctgcttataactcttggtttaccaattcgaccttatttggacggttaggatacgtgtttcatactttatctgtttatgattccaagaaggcaataataattacagtataagattaaggaaaaaatctaaaaaatctaaaaatggggtgaatctcttactccctctgtttctatatgtagttttaggattttgtttttttgcaaaataagtgttagttttatttttctatgcaaaaattaaatgtacttaatagttttagaccaattatgttttacatcatattttcttattggttgatttagttgtagttaatgatattttattaaaaatagatgtaataattgaaaattttgtgttttcttaatttgtgtaaaaaatctgtaaactataaataatgtgaagcagagggaatagtatttaaaaattacacaattatacaatctcttattatgttttaaatattgggttatagattatagtatactgcgaaaggtttatgattacaatttttggttatactcacaccttaccatgtaaaagcaaaaaaaagtattggacagttaaagttatttttattctacggttttttttgcttcgaataattacaatttatgaaaacattaaacattctaaagccatttaaaatggaccatattcttagtctaactgtctatatgatcccatattattatttcgtgatacgaaatatatcatacttttttttttttaagaatgatgtttacctcttgtttgaggtttgtctttatgtacgattcataaaatcgtcggcaaaaataaaattttcaattagtgggttaattattcttaattagtggagtaattgatattatgaagtagaaaagagattgcgcaacaagaataaaatattagtcggttaattaagggtttcacgcaaaaaaaaagtaatgactttttgttaatcaatggaaagaaaaaaattggacggttaaagttaagaacgtgtgaaaacaatatgcaaaggcattgtggaatcagaagtccatagtgacaattgacaaatatgaaactgttcaactttttttttctttctatctatctctttaaatcttgtcagtgcaagtcagatcagttaattatgacatttactcggccattgcaactttttcgagtcagtatttggttatctaaacgttacaagagaaatgacaacaagagaaatataacgtttgattggatacagtgtacaaaatagactaaattaaccgttctattttagaacagtcaataaatcatcacagatgatgattttttatgtaaaaaagtctgtagttagtcagcccaataccgtttttttttcatctacactataataaattataggttacgaatgctaaataaaaagcggttcgaaccgcaaacggattcgtccgctctaatcgccataaccatttgaatccataaggtattataataaaaattaggtgagatgcatatttttttgtgtgtttaagctttctgtctgagatattgtttttcttcaaatattggtaatggctcaagaattctcaaacaaatttcttattttaacaatgtagtatataataatatctcaataaacacttatttgaatctagggatataaactggatatatttggtgcttttcataattgtgctcttcataccaaaaaaaaaaaaaagatggtgctctttatttatacaaatctaaaatcgaaaaaatttctaacaattttagtcagtctaggttcatatttttatacatatttaaaacaatatctttaaagataaatagattgagaagaatataacacatgtcttaagcttatttgacccaatatactgtatatgcaattattttcctttctacaatatccttttagtggtattattaaaagatcatttttgggggttattttgcttaattaagaatgaataaattttgaacttggaaggaaatccaactacgcaagtacaacccaatgccaaaataagctctcaaagagaaagtgaagaagaagaacaaatattacatgctgtggtttcgggtcgggaggaattacgaatttcggcttcggccaaaaacctcctggtatttaaaaaaaaaaagaaaaaaaaagaagaaataattcattacggaaaagtataaatgacaacctaataatggaaatagtccaaaagcttgagagcactaaaagagaaaagagaaggaaacaaagagttgaaatagacgagagaattaaatatctatttagcaatttacagtaacatgtccttcatatagaaagacaatagatctatcaataacgaatgacctcagaagaagactgttacgatcatcaagaggcactttcaacagtaaatgcaactaaaagaacgtgtgtgcaaaatgagttaaaccctgatcactgtgagataagtcatgagcggtttgaagcatcttgttggtcacgtttatctcaaagatcctttcgaagatttcccataaaaaaaaaaacaaaaaaaaacattagaattatacagagatgattagtatgacccttacacaatgatgacacgagaaacggcccaaaaaattgtcatagttttgatcgggaaacccataatttctaatattgggttaacttagctctaatattatattgaaaaatgcatgggtttaccatttaaacctagttgacaatgagtaaaaaatctcatgttgttataaacggataatctatcttttcgattttattttatataagatttagccattaagagactttttctccaacttataagattttttcaccaagccttttgttcgtatatatatatatatatgttggttcgttgttaaacaagatataagaagaataagaagtctttcgttattattctctacatcttcttctcgtgaattctttctcatacacatatattaaaataataatattgagcagtgttatattttatgacacatgttgccttatatattagagtaaaaatacccaatctatctatgtgagacattttaatatagactgatctagctggggaaagtgattttagaggacatatatgacaccatcgttgattggaagaacaatacatgaacattttcttgttcataaatcattatgaatttatgattttgggataagacctcttgaaaagattgtagaagcaaggtcctaccacaacctctttcctcatcagatgcttctacaatcaatgatagagaagatgagaacaagataaatatcactttccacaatgaatagcacatgtttacctcaagggtctacatctactttagaatggtgggactttcccaatttgggattttgcagcctgtgtcacagtaagatttgatgaaccataccgttcaaaatagtgttcctgatccatgatcgttgctttgcgttttcacttaatagacaaaaacaatcaccatgtatcaagatttgatccttcctaacttgattaagttgcataacagcacaacctaaggcccatttaataatttttaaaagcccaaaaggaatgtttccctgaatttccgaccacgcgcttaaaaaagaactcgatttccctgaattttggagatttctggtggtgtattacacgcgctataggtgcgtctgtgtgttggacacatgatatttcttttttgttcaacgggatacatgagaatatatactaacattagttcacaacaacttgaagaaagttatcttaactacacaaagtcaaaagattctataattacaaaattagagcaatttgaaaaagttaattcaagtatgtgtatttacttagaaataaaattatttgttaacaaagaccatttccacatagagtcatacgataattaacctccggcaagaagttaaagccaaccacgtccttaaattccttctataatatcgattagtctccatttaatcaaagctttaaagcttttctgaagaaaatgcctcttgttgagcttcttacaagtgctgctcttggattgtccctccaactccttcacgacgccatcataagagccaaggagagatccttaatcacaagatgtatattggaccgtctcgatgctacactccataagataactccatttgtcattaagatcgataccctcaccgaagaagtcgatgaacctttcagaaaagtcatcgaagagcttaaacgtcttctcgagaaagccattcgtctcgttgatgcttatgcggagcttaaactccgaaacttactcaggaaatataggtttgtgaatgtcgttaatcatttccatatgtaaatgtaatgtagtgttaaattataccaaccaaagtatatactttaacaaaaaaatatcctaccaaaatcttttatttttcatgcaatttttttgttgttgttgtgaatctttctttaggtacaagagaagaatcaaggagttggactcttctttgagatggatgatagatgtggatgttcaagtcaatcaatggctggatatcaaaaaacttatgggtaagatgtctgaaatgaacactaaactcgatgatattacgcgtcaaccaatggatatcatcgaagcaactggtcgatcttctgaagaagatggatgcacaaagccaacgattgatatacactttcgatggaaaaaccagaccaaagagcacgagatccggttcatcttcaaatgatttgttaatgtaacgatcgtgtcctagaccacaaaatgttttttgagaaaaaaaaaactcaacaaatgtgatatagtttttggagtgttggaattattgtaggtgaatgtgtgatgtaagtattaatttaccaacattttatcttattacttttgttaagcattttatattgttattactggaaattgtataactaatatattaattagttcacaaccttatgttattataaacttctgagaacattccaatggttgacaagacaaataactcttgtgccttttatatacaatatctcttattagattgaacatcacgtaacgtatgttcatacacaaatgatttgacaacatttgatatgtcttcataaattgattgcgagacaattgactatgagataaaaatcatccaaaatccaaactaactctgcatggatacatatcaatttgcacacttagtttcttattcgtatgagatacaaatgtgcatgatgcatcataagtactctattatagttaaaatttggttaagaaccaactattatctatctgaatctctattatattatattactagaagttgtcccggatgcatggattatatattcggttttaattttgaatatagaataatatttatattaaattagatataaactttatttataattgttaatatatcgctcaaaataattaataattaataatagtaattttgatatttacaaagtatgatgtgtttagaaagacacattagttgattaaaaattatgcacacaattgctttttttgttttgtgaaaacagtatgttttactattaaaaaaacttaaaatattaagtatttgtttttgtgaaaatgcaaatgcatgtattaccaattgtcttggaaaaaaaaaatagatgaaccttcttcgtaggaaaaaagtcagttcagaggaaaaaaaatcatataaaatatgagaaatgtacaaaaaaggacaaattatatatataatttatctataattattaatatataactcgaaagtaattaaaaatattaattttgatgtttacaaattatgatgtctttaaaaaagacactttagttaattaagagttttcaatgcactatactttattttctgtttttttccgtgaaaaatgtatgttttaattattttttaaacttaaaatattctttttttttgtgaaaatgtaaatacatgtattaccaatttttttgaaagttgaagtaataaatgaaccttcttcacattaaaaaaattaaagcatatgatttaagatgtctcttggaaaacctttttacttgactaaaacccttttattcaaattatttgtaatatttacgtttatttacgtttatcaatttttcatttccatcttatgaataatcactctctcattttccactatattcatgtatatatatatatatatcttatgttgttatatcggtaaaacacaattttatataataaaaagatagaggtaagttgattctttcgaagaaccggaagcgaagcactatgctgaggtgggagaacgggaaaagaaaagtcctaaaagtaaattggggttctctttgcccaatgagatgagccaaccccgagatgttttacgcccaacccacaaggttctgagatagagattaacttgagtcttggttaagaatgttatgatctacgatttcacactacacatgattccatgtatagtgtcattcgacattgtgatggaagacatagcttatgatcatcggttttgaacatgacgctaaaaatttgattaagatatctaattattaaaaattaaacttcttatatggataaaagatttagcatattttggtagcgtaatgtagatttgtatgtggtaggacaaaataaattaactacctatagcaaatgagtgaaaagtttgtatatatatttctaccctaaattatgttaaatacatgttttctgtggataatgttgtctattggcaacgactgttggcattacgctaactcatcaaggaatcattattacttctctccaattcatgatcagcttttgacacaagacaaaaaaacttcttgtgtaaaaaaagctaaagagaaaaaactgatgttacaaaaactatgttaatatgattcgagaagttaaaataaggagaacaaagaaatgtaactaatagttaaacttttagaggattttctgatttaaaattagaacatggtaaaatttataaaattatggtataaaaaaaactaaagatggaaaaattcttgtaaaattggagaattatttatagtagtgaactattactttgtagtataaaacataatatcatgtcaaaaatttaaaaatttgattttgtaattagttaagggagttgcaattatgctagaaaaaattcatttcaaaattgtagtttaatatgtagtaatttcatagtttaatgactatttttctaaatatatgatatatctattaaaaaattattttagtcaaattacaattaatgataagtacacgtgtcattaaagtagtgtaccaaatgtcgcattggtaggcaaagttaaaaaatgttataaaataatttaataatatatatataaaatatttatgactaaataaacattaaaatgtttaactacattttaaataaattaatcgttttatagttggttcagaacaccttggttgtcttggtactgtgaggaaacaacttaattttgtttagtgaatatctaaataaggtttcatttaacattgtcaaacttaaaaaaaaaaaaaggaagtaaactaagatgacaaataaatacttttttctatatagtaatctttagtaatcatagtctaagaatttccctctatttcatgaaaataaggtttcaattaacattgtcaaacttaaataaataaaggaagtagaccaaaaaaacaagtaaatactcttttctatatagtaatctttaatattcatagtctaagaattttcctctatttcatgaacttcttcaaccttcttctttgtcttctttgcctagacagaaaaaacaaatggagatacacaatcacggataatgagtaggtactttcggatttgattattctagcaagaataattatgcatctcaatggactttaacaacaccagagaaaactttgcatgtatttaccaaatatttatttagctagtatatcccataattgttgtgaaattgagaatttgaattttcaaagaatatactatatacaaatataagttagtgtagagcttagatgtttactgaacttgtaagaaacacatccaaactctagaaagatatatcgatgtacaactaaaatatgcaaaaaaaaatgaaaaacggatattgtatttggagctgagcatttgagacacttgagttgccaattgcttcttctcaagccatgcttgttatatagttgcattcttaagccatttttagttatatattaagtcataaattgtactttaatgtggtgatcaaaatattgtaacttatgagatataaagggtcataaatttttggatcaaagtactcctaaatagtgtttaataccttattacggttaagcagctaagaaaatgttaagagtatgcattaatggtaatctataatagtaaatataataattttttattatcaaaaacatataaatagtgataactttgtactctaaaacataatatcatgtcaaaattttaaagatttgattttgtaattagttaagggagttgcaattatggtagaaaaaaattcattttaaaattgtagtttaatatgtagtaatttcatagtttaatgactatttttctaaatataagatatatctattaataaattattttagtcaaattataattaatgataagtacacgtatcatcaaagtagagtgtcaaatatcgcattggtaggcaaagttagaaaaaactttctcttattatagaagatttttatctaaccagacttcttgtaaatccttcttatgggtcacaaacgcacaatcaaatgcggaaacataaaatattcacttgctttaacaactactagctgtaaaccaaacttaacaaagaggtaagcgaaacatttcactataattagtaggatcaatatgaaagaaaaactttttctatatttaatctaaatttagctaaaagagtttccatatgatagtcatcataatatttcacgataatgtcaatatagaatatacaatatttctaccaatataaattagaaaaacgagaatggacagaaacgttaggagatttcagtacacgtcagtgattaatccaacgtatgtacaaattcgatcatttagaatatgattatcttccctttttttctttagtttcatatataacttgaaacaaacaaattaattttcattgagaatgcttcactgctcgctcttctcttctttaatttcatagtcacaacaagttgatcaaaatattaatatttaacagaaaaaattaatccacattgagactatttctctactcctttttctttaattccataatcacaacaagttggaaaaaatcaatccaaataagtgtttttgtcaaaagaccaattcaatattgattcattcatatactaacctcgtgcgatcgagagctaaagctaattgcaataaatctctttgtaatttaagtaatccttaaaaaaaaactatacaaaatgcctcttaccgagattatcgcaggggctgctcttggacttgctctccaaatccttcacgaggccatccaaagagcaaaagatagatccttaaccacaagttgtatcttggaccgtctcgattctacaatcttgaggatcactccactgatggctaaggtcgaaaagctcaacaaagaatccgatgaatctctgaggaaagtcttcgaagatcttaaacatcttctcgagaaagccgtggttcttgtcgaagcttatgcggagctcaaacgcagaaacttacttggaaaatataggtttgtgaatcttttggtctcgtatatatatacatgaaataatgattttttttttaatcttagatacatgaatacttctacatattacttgatctcccaacattatatagacaccaattaaacaaaaacctatcatttttttttgtttcatgtatgtatttaattacatactaaagtgtactgttgttttaggtacaagagaagaatcaaagagttagaaggttcattgaaatggatggtagatgttgacgttaaagtcaatcaatgggcagatatcaaagatcttatggccaagatgtctgaaatgaacactaaacttgaaaaaatcatgggtcaaccaatagattgtattatatctgaagataatactaatatggacatagtcgaaagagttgatccatcattggaagcaaaagctggatgctcaaatagcgattctaagccgaagatcgatatccaccttcgatggagcaagcaaagcaaagatcacggaattcgcttcgttttgaattagttttttttttgatgtggtatgtgtcatagaccagcaaaattgagaaagaaaataatcaaatgtaaaaaaaaaaaaaaaattatacttacgaatattgtgttatcaacttatcatacatataacgcctgcttgtataaacaaaaaagaagattggttccaactaatatgtaaattaagatttttggatttttttaatgcaaatgtacaagtcaacatttaatcctactgttaaagtcaatcattgagattgattctcccttcttcgtaatttaaaaatcacaacaacttgcatatagatccaattatctcctttcacctagaaagaaagagagtcgactaattctaagtctttaagtcaacgtctcttgtcttcatatagttcatcaaaaacaaaacgttttgttaaacaaaagattcttcaatggtttcatgtatatagattgctccatacaatcacgttgagagctaaagagctaatctcttgacccaaagaaaaatgccggttagtgagattatggcaggggcagctcttggacttgctctccaagtccttcacgatgccatcaaaaaagcaaaagatagatctctaactacaagatgcatcttggaccgtcttgatgctacaatctttaggatcactccgttggtgactcaagtcgataagcttagcgaagaagtggaagattcaccgaggaaagtcatcgaagatcttaagcatctccttgaaaaggctgtttctcttgttgaggcttatgcggaactcagacgcagaaacttactcaagaagttcaggtttgtatacaatccatgaaatgcatgaattcttttggttcatacgaagtcttcttatttcttaaatttaatagttaaaaataaaataaaaaattgtttgttttgtcactacttaaaagatggataccattagaatctcagattgagatactgacttacagtgattaatttcatggtgttttaaaataagatatcttggattagctaggaacggtttacttcaagttcgattcaagtttttttcaagtgaaatctttttttagatgagcatttctataagtgattttcgtaatttctcaatataaatctaacaaaacttatcattttaatgaaataacatgagtattaatatttttgtgttattttgatctttaggtataagagaaggatcaaagagttagaagcttcattaagatggatggtagatgtggatgtccaagtcaatcaatgggtagatatcaaagaacttatggccaagatgtccgaaatgaacactaaacttgatgaaatcactcgtcaaccaactgattgtatttgtttcaagagcaatcatagcacatcacaaagtagtagtcaaaatattgtcgaagaaacagaccgatctttagaagaaattgttgaatgttcgagtgatgggtctaaaccgaagatcgatatccacattcattggagttcaagaaaacggaacaaagaccgtgagatccgatttgtcttgaagtgatgattcttgatgtaccaattgtgtcaaatcactcaaatgtgatagtaggactaatttaaaatgtagactcaactttgaaataattaggagaattccttattttcctcaggtgtaatgctatcatttgtatataaaatgaacttattgtagcaggatcggccacgaaaaccctcgatattagatgtcgacattctggtgaaagatgtaagtactctgggatttagtatatggtactaaggattctctgcgatttaggataatgaatgagatagaaagaacttagaaaagaagctttacttgtattgtctttcgataatctattggccttgtggatcttcaaatggatatgctccaaccaacattacatataaggttacggcgcacatttacaagctgcatgtgtattttagcagcagcgtaattcagaacctatcgtatttttgttttcatgtaataacatacaaaagtgggcagatattaatgaacgttaactcatgggcaagatgtttgaaatgaatactaaccaatacactgtattagatctgatgaggataagactaatcagaacatagttgaaagcgttgatccatcattggaagccagagctggatgctccgaagatcgatatccaccttagatggagcaagcaaagcaaagcaaacatcacggaactaatattttgaggaggcaggtgtatcataggcctaaaaactgaggaaaatataaaatcaaatgtaaaagtttgattgattattattttaaaaagtcatagattttaatgttagtatttacggtaggtattcaccgaaattgttagtattcacgtttctattcacgaaaattgcgttgatcatacatatgataatccaaactacatgtatgtacgtctgccttgtacgtaaatatacaaaacaagatcgatcggttccaacttatttgtaattcagatttttggaatttcggtggaaatgtgcatgcaattcgacgattctacgtaaaaagtcaatcattgagatcgattttcacttcttcttcgtaatttaataaataataatcctcttcgtacattaattgtaaagactaagaatggttgaaaaagtgcttgatgttattgatcgatcttgaggagtatatatacacacatacaaagacaaccctaagcttactctccaagcacttggtctccatttcaaatcgttttcaatccttatcctctttagatgatgactagtcaataacacagctgtctaaagcgataaggattctagattgttatctaagagcacctccattgatgataaatggggtgtctttcctaaggttttaatatttgattaaagacattcatgaagaaagagaaacaaatgtctttagcaagacattgaagacccatttgaagacactcttaaactttgtgatatattttgattggttctgtttttttttagtttaatatttttattgactaaaattaattaaagacacattcgttggagttgtgtaatgaggatggtctaagtgtctataaagacaattgaatatactctatcaatgtattgagaaatagagcaataggattcaaagtgtcatactttctaaacttcttcaaagtttcctaatacatatatattctttacataattgacatagtaaagttctaagaccttctagaacctaaaccgtgttgcactataccaccagcaacttgcatacagaattatagatccatatcctttcacctagaaagaaatatgagtctacgtcttcttttttgttttttgtgaaaacgtcttttgttttcatatatatcatcaatataattcatcaaaaacgtattttgtcttcataaatgtgccaatgtaacttaaacaaagagaaattcagaaatatattacacattacaatacaatacatataatatgcatgtgaattcaaagtttgtagagtaaaaaacaacaaacgatcccaaaatgacgattctctgccacattggtctctcaatttgtttatttagaactcaaaatgctctaaagaacaaagtttttacaaagagatgaacttagcttattaaaatcaacggagaagcaaactcaatacaatcaagtttgaaggataatgagtataacaaggttgtggataatgaattaatggtgaaagaagatataaagaacttagaaaaaagcttaactaaatttgtttttgcttcttacataaaatgaaagtttttaaggattcttctcatttgatttgatcccatctttgaagtgtaaacgaaaaactggaggaagaaaaatataatgtgtcaacacatgtataaaaggctcaataacaagaaaaatgtttatggcgtttgagtggatctttcagattagtggtttttaacttcagtatttttttttcagtttggaataagtttttgagatttaattataatattatgggctaattcaaattcatataataataatagtttatttgcatatacggcaaaaacaacaatacgtattctggtctttctcatatctacaaaataatttgattatgataaactataattatttctaaattttaaatatacactgcaacacgcaaagtatttattattagtagtaacttcttttgttgaaatatttttagtagtaaattcctttgttgaaatatttttagttgataccaccattttcctcttctgcttccttctcttttttcttcttctgttcttcctcagccaacttctttgatttttccttctcttctaaatgtacaaagtcaatcagtgagagtgaaagtgacgctcgctttttcgacgtaattcaataatattctacgtaatttaatactcacgacaatttgcatataaacccaacgatctcttcttacctagaaaaaaagagagttgacccgtacaatactaagtctatgaatcaatctcttttgtcttcatataattaaaaccacacgttaacttgttaaacataagactatttaatatggttccatccttgatccttccataaacatagattcctctatattcagccccggctatcagatcgtcttctttatcgctcctctaattatattcatctcgagagacgagagctaaagaactacttccaaaaaaatgccgattgctgagcttgctgtaatcaaaacagtgggtgggcctctgatagcggctgctcttggagttggagcccaagtcatttacgacggcttcagaaaaggaaaagatacatctatcataaaccgtctcggccgtacaatggaaagtatcagtccggtgcgggatcgaatcggtaagctcagtaatgtggaaggtaaaccatttagggaagtccacgaaagtcttacgcgtctccttgaagatgcgaaatctattattgagaaatattggaaactcagatggagcagacacgtttgcaggaagtacaggtttgtatattttacatgaaaattaataaaataaaatttgcagccgctgcgtttaaatcagcaaattggatttgatgaatatttttcagcttgatttgctttatccatattttgtagtttggctcatatttgctttttgtttatttagaagatcatttatggatacataacttgtggtttgtactaatggtgtctacttatgatttccataatttagaaacactaaacgtagaaaaactatcatgttctgtaaaacaacatgtgtattatgtttttgctgtttatctttaggtacatcaaaaaactcgaatcgatagaacttgaattagtaagggtagcacgtgagatacaagtccaccaatggaccgatatcaaagaaatgaaggcgatacaagtccaccaatggaccgatatcaaagaaatgaaggcgatacaagtcgaccaatggaccgatatcaaagaaatgaaggcgatacaagtcgaccaatggatcgatatcaaagaaatgaaggcgatacaagtcgaccaatggaccgatatcaaagaaatgaaggcccagatatctgaaaagcataataaatgaatcaatatctaaaatctggtgtttttctctctttcttcttcccaacaatgattgaaaaactctttcttgttatgaataaagatggatgcccattataaggcccatcatctaagcccatcatctagatgtttctagggttttaccctttccttgtactcctatataaagaaccctttatctcaatggaataacacactcatttcttctatctctttctctgtttataacacgttatcagcacgctctaaaaggtagatatagagattcttacattttttttaagaaccatgtttacttatcgactcatggttcatagtacttattttctattattgaaacaaaacaatatgagccgatcgatgattatagtatagatcggtaaaagcatgttttcaatgattcaataaagaagagaatcatgcttatcatttgtttctataattactatcgcatgattcaatgattctacaaagaaaatcgttaaagaagagaatcatgcttgttaattgttaatttttgtgatttactattacaatattgaatatataaattaccaattttataattatataactaattttgtaactattcatagcccggtggtgggtgatgcaagcatgtattaatgttttagcattccagttttgaatagttgcatctatattcaatatcattttataaatattatattgtctaaaatccatttatgattgatatgatatcccttatttaactcctttgattaaaacgttatacatatcttatcacttttagatattgacttttccatattaaatatttgatttccatatatttgattgtgttattattatttttactaaaaacgttgcaaaataatttttttttttataagattccatatatctaaatcttttgtgttattattatctaaatctttttataagatttccatatatttgattgtgttattattatttttactaaaaacgttgcaagataatttttctttttataagattcttttctctaaatctttgtggtatctaaaaaaaaattaaactaaaaataaaaaaaataaaaaaattgttcatggttttgccctaattttgcacgaaatcattttacccaaatcttgcacgaattcatattatcctaaataaaagttttgtcaagatatatgtaaaatccagattttgcacaaaatagttttattctgattggttttacaatattacattaaaattgtattagtatataatacttgattattttataaaataaaatgattgataaataacttaatttaaaggtataatcacttataaaaattttcatgaatgactagtttaatgtatcttaagaagatatcatatttttgatggtcaaagttttttttaagaacttaaattatcaccagaagttgagaaaataaatataataataataataataaaaaaaaaaaaaaaaaaattctaacgatgaaataatctagtatatcaagtagtataaaatcttattaaaagactctagaagagcatatacattgttttctatgggaatacaaaattaaaatcatcgatgcggtatgagaaagttaatatgatgagatataaatacattatgattctagagtggaattcaatacgagatggatgaacttgaagtttcatcatttcgaggaggagaagtaatgaatctcacatggataataagtgacatatccagaagattatgttcaatctttgactactaaagatctaaaagttgtataaagcaattcttatacgaatgtgttattagataaaataagttataattagttattactgaaacttcaagacttgaagtctctttgtgaatataactcacattgttaagagaatatctatgatgcagagatggtaaaacagacgcttaaacttttacgtaagtattgttgtcctgtagacacaatatttggaatgaaattttgagaactattataaacttaaatcgagtgtttttcaaaggctaagaaaacatatgaattatcgatgataagtaatactcatattctgaagtgaatataagatcttacatagttagtcaaatttaatatcgtttatactagaatataaaattttaattattatcttgttattgttttattaacatatgattgattattaaaatacatggaagtaattttgattataagatctcattaagggagtaactgataagcaatgaaaagtaaattagaagttttgaaagaactagaagtttcaaaagaattaaaagtttcaagagtatatttggcttaaccggattggttatcctggtttaatgatgatgtgaaagtattgagaattatgtggacattaggtgaaaaaccagaagattctccctaataatttatcaaatgttacttgctcagaaagcaatatgataatgtgatttttaccagggtaagtaatttggactttatctattcgtaagtatatacaaggagataattatgggttgatcacccactatatgacatttagatacctaatggttgtaaaagatgcatcgattcaatggacgcattgactcgattgttgcatcgacaagaaggtcatatttatccttgttataaacccgcaacatagagtttgcgagattactttcttgattaaagtacaagagtatttcagtgtttatttataataaccattattggatatccgttgggataagtgtttaacattttgaaattcatgttcatacacaaaatggtttagtaacatcgatacgcatcaagccaatgaataattaatagttttccccattattattggttttgggtcagaaaccaaatagttttcatctaaaagctttgaatgtgaaaagtgctccaccacagcacgcagaaatgaaccctcaaaggaggataagaatacatgttggatatgaatgataactaagccatcctagaaggatttatataccgctcgttttgaagactatcatattatatagtcagctattccaacataagggggagaatgtatacagctggtgaaaaagataaatagaaatgaattatcaatgatcctcggagtaaagaatgtatattaagagtccaaaagataattcaattacagaatttagcgttgtaattgccagacgcatttgctgacccaaataaagtgatgaagtcacttataccagttgtaaattaaatgctccagaatataatgaatgtcctgtaaagaccaatttcaaactgctattgagtcttaatatcgcatgaagcgtaatagaccttggttccaaatataaatatcctcgtaaaagtgaaagagcacaaaattaaaaatgaccaaattgaggaaataaatattttgatgatctcttgaagagagtgaatgatctctaaaagagacataaacatgacaaataaaacattcacgtacttgacaatgaagagatctagctagctatgtcatgtcaaaatataatggaatcaaaagcaaatcgacgtcgtaatatatttgcatgctatgagcagttgatattacggacaaaaaggaggatcatgaaagaaactctattgaaaagtgtacacaaagtaatgattagccaaaaatggaaaagaagaaatagacatataattataacctctagtagagatatttggactagtagtctatgcacatgatgtgtaaaaccagtggaaaataaattagtctttatgtgaaagaatagtgaaattaatgagattttcacaaagataagaaatgtattatgaagagatatattctcttgtggtggatgtaatatttttttttaagtatctaaagtctggcaataagagacggaacactggatatgacatttatatgaaattcttgaaagatataatctcttaaggattaattatatgagaattatgttctctaaaactctactcgatcgaataaaaaaaaaatatgtaacatggcatataatcatataaatgtatatttatgttgagtttgtcaaaatatattgatcaaactaatatttgttttgaaaatcattaaaactcctacagagttatcataagtaatacgatgacaataatgtatgataaaatatcactagataatgatatttataaatttatatgaaaaccatataattttgatcattaagattatggttattaattccaacgagatattgtatttgattgaaaatcatctcatgaagaagatgtttccaagggggagattgaatgatatgcgtggatgtaccctttttccttatcatagtttttatcccacatgatttttctatgacaaggtttttaacgagacattaaagaacacgcaaataatacacttgatgaatattaaaaaattctatcaatcatccaaatgaatattatacactaatgatatttagagaaataaataagatggtcaagatgaatcatctaaaagattcatgagcagaagaatggcgttgtactttatccagaaatttgttcaagagaagatttggcagacttattctcaaatactgtttattctctgccacatcttctaatcatgcagagattttaccaattcatgaagctagccgcaagtgtgtatggctaagatccatagttcaccatatacaagaagactgtggtatatatgcagggaaaaagactccaacaattatgtacgaagacaatgcagcatgcatcgcacaactcaaagacggatacatcaaaggcgatagaacaaagcacatcctaccaaaattcttctacacacacgatctacaaaagagcggcgatgtacgagttctacagatccgttcgaatgataatctggctgacttattcaccaaggcgctacctactgctactttcaagaagttagtctatcgtatcggattacgccgtctcaaagatctcgacgaatatactcataagggggagtaattgtatgttgcactctttttcccttaaccatggtttttcccattgggttttcttggtaaggtttttaatgaggcagcatttcaaatactttacgagttatgatactataatggtcatcagggagagtgttatgaataaagatggatgcccattataaggcccatcatctaagcccatcatctagatgtttctagggttttaccctttccttgtactcctatataaagaaccctttatctcaatggaataacacactcatttcttctatctctttctctgtttataacatttctcaatttatgtgtaatttatcacaaacttattttgattaattcacaataatctttgatattttgagtacaaaggattacttttaactcaaatatatccatgaaagccctcttggcccaatgattaaccaaaggttcattaatgcttctataccaaaaggtctaggattcgagtcccagctactgcgatttattagcaaatttgcatattaatggagacaagtgtgcaggaggtctacaacgatgtacaattatagttgttcgccaagattctacgcagagaagatattgaaggtgtccatcaagcgcatggaaaagaagaagaatgtgtcgtctctcttggatctaataagggtcggaaggaattgtccgtggtagaatcgtctatgtaacagttctcattatttataataaataataaatctaaaacggcaaaaaaaaaaccaaatatacccaaatgtatatgaattactaaaacaaatgtagtatattcggattaataatttttatttttggtatttgaggtattacaagtatatatcttatatttaacttttcatactattgcgacatttgacattcacaaatgatttgtcctccttaatagtaattttatttttatataatcataatatataaaactagagaataaatgagattggtttaccttaacgtattcataacgttaacgtatcaccaaaccagattgtagaattaaatctgatataacatatattaatataagatataatatattataatacttattttatattacttttttgatatatgattttgtcttatattaataattatattcatgttattaacacacaaaattttcattacattttaaatacttatataatattaacttttatttatagcaatagtactgctcttaatgaaattaattaacgaaataaagaaaatagccccaaatataagaaatgaatttaaaacaaaaatcagcccaaaacactaaattttgtaacgtttggttattaaaatcccacactaaattgcttatctttaagctaacattaataactattgaaaaccatacaatgaattcttgtgaagaatcaaaaccaaaattaatgccttttaacgttgactaatagcaataaaatagtatcataatcaaagaaaatgatgtctttttaaaatataagtagaagtaatgaagacattgaaaagaagagaataaatgagattggtttaccttaactgtggcatattgtagaattaaatctccattttatggcttataataaataataataatggtgagaaataatagaaaaactatttataaatagcaatgtttcatgcataacaaaacatcaaaactataaaacccaaattatattctgatccacaaaattttcaatagaaaatatactatacacattatgctatgaccaaattccggctccatcgcaaaccattaaccacttacgtcccaaaatcacaacaccagaaaatttgtttccgtcaatattgaaaattatagtattcacatgtttcttactgcacgaaaaaggtaaattgttattcttatcctatgcaaatttaacatgttctaattttaaatcagaaaaatcctctaaaagtttaactattagttacatttctttgttctccttattttaacttttcgaatcatattaacatagtttttgtaacataaatatcttctctttagctttttttttacagaagaagatttttgtcatgtgtcaaaagttgatcatgaattggagagaagtagtaatgattccttgatgaattatcgtaatgccaatagtcgttgccaatagtcaatagacattgcattaccaagcattctccacagaaaacatgtcttttacataatctagggtagaaaatatttatacaaatttttcatccacacacaaatctacattatggtatcataaaatgctaaatcttttcatcaatatagacagtttaagttttactaattgcaaatcttaatcaaatgtctagcggcatgatcaaagctgatgatcataagccatgtcctccatcacgatgtcgaataacactatacatgaaatcgtgtgtcgtgtgaaacatagatcataacattcttaaccaagactcaagctaagctccatctcagaaccttgtgggttagttacatttctttttctagtaccatatcatttgtataaaatgtgccaatagttattaaacaaagagaaatacatagaatatattacatattacattacaatacatatatatgtatgtgaatccaaagcttgtagagtaaaaaacaacaaacgatccaaaaatgaacgatggagtgcgtggagctaagacaaaactccagtggtgtgtctcaacagtacggacaaaacagactttgtcctcaggaatctcagagagcataaactatctctccactactgtcaacatcaatctcagattcggaatcaaagtcatccatgtcatcgtctagatcaagattatccgccatgaaatcatcgaggcaacgattacgaacagtcggaatcgtagcctccgatattatctgcataatcgtgtcaaggctctgcattggctgctcaggctcttgaaactgacttcccattcggttctcatccatcaaatcacctggtagattcttcaagaaccatttatcggatgtgatctccggaatagtgattctctgccacattggatctctcagtttgtctatttagaactcaaagaacaaagttttctttgaaatgtaaaacttactgttgccggatcagccacgaagatcctcgatattagatggcgacattctggtgagaggtgtaagtcctctgggatcgagtatgtgacactaaggattctctgcgttttaaaatcagtggagaagcaaacatatacaatcaacgtttgaaagataatgagtttgtgaatgatgatgaatgagacagcaagaacaattgaaaaacattacttgtattgtctttcgataatctcgtggctcctgtggatcctcgaatggataagctccaaccaacattacatataatgttacaccgcaagaccatacatctgcaagctggaaaaatgtaacaccagctatttcagaggacaactcaaagaatatttgtggtataaacagtcatatggataagctggtttgaactctagacagaggaattggtctcatggccttaccttgccatcatattcctgtcgaagaagaatctctggtgcaatgtatgcaggagtaccaacagttgactttggttgggaatgaagaacagaagactgaagaaaagaaacgcatagttaatacttgagcagaaatcaaagcgaaaacagacacttagtaggaaacacatgtaggtaaagagcatgaacgataagaagcacaacgaggaatcacaagatgtcccccgctgttctgcgcttggccatacagtagcatatataaacttagaattcagaaaacaaaccttgagagaaataaatagtaccttggaataaccaaaatcacatattttcaaacgaggtgccggacttccatctaacaatgtattttccagcttcagatcccgatggcatatttgcttcacaggaaaatcaaacacagaattaaaaccagagtggtatacacgagaacgagaaaagttcaagtaagttgcaagaacactgctctgcgtaccattgcatgacaatagctaactccagatataagctgctgaaagaagaaccgagcctatacataaaaaaacttaaagatcagtagtcacacatcaataccacaacacagtacgataaatcagaatccaaacctcatcttcactaaaccgtccggcattacaaatccgctcataaagttctccaccagcagcatattccataacaatagccaaatgggaaggcgtcaaaatcacctaaaccattacaaaaacacacacaaaacaaactctaaaccacactgacttaatacacaaacacacacagaagaaacatcaaggtgtattatattatacctctttaaacctaacaatattaggatgtctcaatgatctatgattgataatctccctctgaacattttcatcaatctgcaaaacaaccataaaaaaaagtatcatcatttattgagaaatatcaaaacttttcaaaagcatttaatcatagtaacagtaagtaaccaccattaaagacactagatcaacaagctctaaaaaggaaagctactaaatctggaaactaaaaataatcgatcatcaatcaatcactaaagcctataaatatcaaatctttttttcattcaaaaaaaaaaagacgaaaccttttctcctctctcgatgtatttaacagcaacaagctccttggtgactctatcggtcatgagacgagcaacgccgaaattaccagagccaatatctttaacgaagtcgtaacgatcactgtcgtgcataatcggtaaatcaatcggcataatcggtgaattagtcgccggatccattttttctgattcttctcttcctctattgctcttcctaatcacatcagattaagtcgaagaatcttctggagtagctggaatctagaagaagaagaaggagaaaaatatctaaggaaggatatgaatttgggggaaaaagatggatcaacgacgaatgagaaagacaaaggcaattattggtcgctctctaagttagataagaggagagagatgtttgcaacgacaccgttttctttgttttagttatctgatttgatacgacaaaggccgccgcgttttggtgattttttttttttttttttcaaatatttttttttttggtttttttaggtatcaatattaattttactgttctatattatcaacacaatttggttgctcctaaaatttgtaattgaatgagtacgaattgtgaggtgagtaaattgttatgtctttcttaaattaattatgtgaatgtctcatgtatatatgtattgttttaccttcacttgtacttgtttacttccaaaatatcccaactttatgtgggtgattgtggtcgtattttgagccaagtcagaaattgtttttgtcacgaacaaaaaaaagcttcttatagatcatataagacgttttcacgtacacagcaatgttacattaacctttttctaattttataactcttgtctagtcgtttgtacataactacaagtgcacctttattattttgttatggcagagtgtagttctacacaaggtccttgttgaatgttggagtatttgtaaaagaaataatcaaattgactaaggatcctgattagaaatgttaaggtttacggcttgaactgccgctgagtttattaacgtaaagatagtgatgaggcaaaaagtactttttcgaatcttaaaaaccaaaaaaagctccgttaccgggaatcgaacccgggtctcctgggtgaaagccagatatcctaaccgctggacgataacggatgttttgttaactaaaaacaataattgtatttatatcttaatgtagttatacaaacgactagacaagacttaaaaagattttaaaagcttaccattgttatcaagattcaatatgataatgattaatgtaggttaaagcatggtccaaatttttgataagaacttttgtcacggtaactctcctcatcgtgctgcatctgcgtctcttgcatttgagcgctttgtgtggatgcaaaacgttgagcctcgttatacaactgttgacccgttaaacaaccaccgttattaggtgtgtgttccggtatcatcataggattgttatgcatttccagattcgtcatcgaaggtggtggcacaaatgtggggacgatacagtaagaggcaagttcgttcttgacgatcgcgagttgttcttccaagtctttaatctgactaaggaggttgtaaatgatacccagacagccattgaccggatcattggcttgaacttgtgcctcccaagcgagcgtgtccatggcaaattctctttggcatgggtgaagactgttgataagtgtagccacatggcttgctccaaataccttgtgaaccgcttcgtagttgtccagtttagtcgaggggaagtaaggcgcaaacacacaatcttctgtgcattttctcctcaggtgcttgcatgccgcgcatggtgtcgatattttgtccatttgatgaaacatcataatctgtgaaagaaagaaagaaaatgtaattgtacatttttgatcatttctagaatatatacaaaatacatttaaatataggatatatcgaaatacatgatgtaattttttccttttaaactgaatcaaacaaacatatttacagaatctttttcttaaacacgaaaatccgaaacatgaaaaaaacaaaaacaaaagggaaaatcgtatgcctaggtctatacacgaactgaaaaaaaaaaatcacaacctacgaatttttatgtgaattctaaacagtaaagagattaaggtttctaaataatatagtaatcagaatagccaatcaaaatcgtggattgcgttgtactgcactcaaatatgttagagaaggtgtgaagatgaaaacacaaacctcaatgcataataagaagatgaatctaatcaagcgaatatcacctgatttctaaaccctatatattaatagagataaagaatggatataaaatgaaatcaaatcggtatttatatgaaaataaaaaaggaagatgaatagagagattcagtttttaacctaaacacaatgcttcttcaaattctattccctacttgtaaaatgcgttttgagaaagaacctaaaattgatcaacacagatttaggtcaaaatttcctaccacgcaattttacttatatagtaccaaaaaatattcaggttagttaatatttttgaaaaacaaaatctagataaaactgaattcatgattatccaaaaacaaaaaatatatatattagcttccaaaaaagtaaccaatcaaaatcaacatataagatttgatatctaaattttaattaatttaatttaattagaaaaacgaaatacattattattttccaaaaaagtaaccaattaaaataaacaaattagatttgatatctaaattatcatattaatttttttattaattattatagtttacctctcatctttatatgattctaattttgcaaaaaataatatcatcgttataaaaaataattagagtttttttcgcatatgccataatttgaatttttaaaaacaaatataaactgttcaatacataaaaaaatattataacagtcaaaaatagatttaagaaaactttatactgagtaacgggtcatcatttgaatatttatattcaatttcatacatattattttgaaagttataatcttatatacaataataattaataacatattagatttttttatgtgtatgatgtgattcaatttttaatacaagcaggaaaattctagaattgacgggtttagatcgatattaatacaagatggtatactacaggtgaaactctaaaattaacaattaaaatacaagtgtataatcttaaacactaaacaatataaataatatcaacaaaacatatacaactcgcagtttactatacatttaaaatcaaataaaataatattatctatttataattcatctttacaataaaattttttagtttaactaaaatataagcctacctgcggtataccgcaagttaatatatagttagctcaatatcattgtaataattaaatattatttgcttcgttccaaatattttataagaaatttagcagagttttacgtatttgctttggcctctcttcagctacagttagagatccagatatggcggatgcagtagcaagatttttttatgttactattttatttctctatacatgtttccatgaaattaaccaactacagtaaaacctctataaattaataatattgggaccaaaaaaatttattaatttagagaagtattaagttatcgataaattaattaaaattgtacaaattttgtaaattcttacaaaaatttgatataaaatgaagtttttttttcttataatcaataatatttatgaaacaaattacaagtacaaatcaattattaagtttaaaaacaatacaattttttttgatgttgtaaaatattagaattgaacatacaaaaaaattaataaaaattgaagaaaaacaatgtcatattttatatatgatatttataatatatattggtaaatttatattattattaatttatattattgatgggaccatatatttatataagatttttaaaaaaaaattagaatcttattaatttatcgagttatatcaatttttatattgatcttaattcgagactggaataattaattaatttatagaaattattaatttaacgggtattaatttatagaagttgtactgtagtatgtaataaagtttgttattgattttaacgtgagagaggaaaaaaaacgtaaacatatttgcttcgttcgaacaaagggcaaggcccataaacaaaatctaagtaaagcccagttagtgttaatgtcatatcaatggaattggtttctcgtcgttggatgaatctaaagcaattgtcagatttcagcatctcccatggaggaatcaagattcgagtatgcttcttcttctagcttcttctcgttatttgcatctttgatcgtgtttttgacgaaatctctttgttggttttactacagttctgaagatgttgattatgctgagattgttgttgttcgtcatggtgaaacatcttggaatgccgagagaaaaatccaggtaaatttaacaataatggagtttgtatctgtatctttggaatcgaaacttgacttagaaatcgtaaattttgaatctttatcttgtatttagtaatgattagcatctttgtgaatgtatagttattgggaattttgattagagatgttgaaatgtggttataatttggtgttacagggtcatttggatgttgagttaaatgatgcaggaagacaacaagcacaaagagtatgtgttatcttttgattgtgttgtaaccttaatcatcatgatgccttttaaaacatttctttcatttgaaatgaaggttgcagagcggttatcgaaggagcagaagatatctcatgtatactcttctgacttgaagagagcctttgagactgctcagatcattgctgctaaatgcggcaagcttgaggtagacatctaaagacataatgctatgtgtcaaacccactaaagtcttcacctttgtgcttgatttttagtagagggatctaagttttgaagctgaatccatatgactttctagacttcatagaagtttaactacgaataatggttgtctaggtgcttaccgatcgtgatttgcgggaaagacatttaggagatatgcaagggcttgtgtatcaagaagcttcgaaaattcgcccggaagcttacaaggctttttcatctaaccgcacagacgttgatattccagtaagataagaagcttagttatatgaatgatgcttggtttctgtattcaactaacttttgcttcgtttatgtgaatgaagggtggaggagaaagtcttgacaaactttacgatagatgtacaactgcattacagagaatcggcgacaaacataaaggtttcttcctcttctctgtgtgtttctttctcacagtttactacactgcacatatgttctaagtattggtttctgtctacttggtggttgatgaaggtgaaaggatagtagtagtgactcatggaggtgtgatccgatctctctacgaaagagctcgtccaagtgcaagaaaagttgaaaagatactcaatacatcggtcaatgtgttccgtttattcgacggagacaaatggaccatccaagtttggggtgatgtgagtcatctggaggaaaccggcttcttacaatcaggttttggtggtgatagaacctctggttagagagattctatactcttagtcttcttccccttggaagagcatttatgtaatttaagtttcactccataacttttcaatttttaacatttgaccccattactttgataaagtgatttgggaggattgataaagtaaattgctataaatttctacagtcaaatgttatatggttcactaagtacattgaatccaaagcattcgtgattatattaataaggtttagttttcaagaacgtgttgtctgaataatttggactaatggctaaattaatcccgaaaaatatgctagccgaagaatagacgattaacgactaactaagcatataacaaaatcaagaagtttgctacgattatgactaatcagctatacattttctttcagaaaaatatgagacattgaacaatgaaaataatcaatattggaaatgaaataaggttcttgaaggggaccaaatcgtggtgtcccaaatgacctctatgtaagataccgtgtgttggagtttgggaatagaaacattgaacaatgaagtgtttagtaacttgactaaactctaaaaccaaactatagtgttaagtgttaaccttcaaataacattgggatcataatcttaactttttcttatcttggagattgagaaagagatcttgtctaattgacagaaccaccactggaaataccctttttatattggcgcaatcgctatcaaaaagaaaaagggagaaaggtacgttgagtccatttgaccatatagtattattggccccagagcactttctgattttggcggcaatggtacaggggtaaaaatggcaaaaacataaaaagttgaaacaccaagtagagatgtgttattttcctaagctccatgattgtcatcattaggagtatatgagtatcatgttgttgctttctttatcgattttttttcttccgtaaatgaagcctagattaattaatatctcgacttgttatgtgaaatttataatggttaagtatatctaatgaaaattagagtattatgtatgtgatgatgttgtaagcaaaataataacgttgaaatcaatgttgtggctaaaatgagagcaagaaagattatttttctatgtattggttctattgaagaaaacatgatcaagaattcaagattatgaagctctttgttcaacaaaaaaaaaagattatgaagctagtgaaagtttttttggcattgaaaacaaaataaagaccaagacaaatgtaagagtatagcggaaacgtggaagaagataataaaaagggtggccatatttttttttgatgattgcggtgcaccatgcgataaatcataatttatacatcactttacatataatttttcctgtaccataagatttgagaagttgactttggattctttagtgggaatgtcgattaaatttattcttcccttcttttaatgagaaggcacaaaattaaataaagagtaaaagtctattcaaaattcttggatcttgttacaattttgtttcttctctttattttcttctatatttctatgctataagtgatctgtttatcaaagaaacaaactataggttcataggatgttaagttcgatcgtgccactaatttagtcaccttgagtatatgatttactcacgtattacacacaaccttggcttaggattgtttttaattgctatcacaaatttagtcgattaatttcaaaactgacgttatattattaggatcactttagtaccgacgttaaagtatttcaaaactgacgtcaaaaatgtttttttttttttttttttttgtagtggatagattttatcaaccacaactttcccaacttttatacaagtttacatatcaaaaatactatatttatctacatttattcctaaataaaatcaaaatattttattcttttgccacacacttacaagatatcatggatgcaaacattatttttctgcatttatcgtatatagatgatagttaataacacagtcacaaactgaaactgaaacctctaacattgaaatattaaatatggatttatagatagtattttgacaaccaatgagttttctcttatcaatggtgttcgaatgcatgatcttgaaaatttactatttttaggtgatcatgtgaagggtttcggtttgatgagctattcaaaaaaacgaaaatatattcaaactgattacaataaaatagggaacataaaaatttcatcaacacataaaaatcttatagagagggatacataatgaatatgtttaccactatacgtgtgcatgcatttgaagtatcaataatacgaatatataagtgggtaaaaaatgatagctagctgcaaattttgaattggcttctcaatgtgtcggacgcaacaagcaacaatttaacaagtttcatattcatcatcatacgaattataaaaatacaacataatcattagtttcattcagtctcacgttgtattgcttttagtttacattaaattaattacactaaacctcaaattaaacatttgaatgaatcttttgcgcctgtaacgtaggctaagattgttttaaattgtcaaaaccgtgcaagtagcagttatttgttgtgtttaatctcacgtgagagaagttaacgtcgtttgaccaataaccattaacgaattgaattactgacgtgtcgtagtggaacttgaaaaaaaaaaaaaaatagtgatataatgacgtttttacccttgaagtgaacatagagaaggcacagctttatttgtcgaggaagcatcgaaagagagtccccaccacaaatccaaatggcaatagcgttaattaaggaaggaacaaacctacttctttactatttacactatttatttctccattatttaatttattagtaagtattaattatttatctagctggaccaccagactcttttatgggtcccacctttacccaccacgaacatcttacgtcgacctccgattattattacatcacattttctctatacttctctcttgaaacctaaaaccaatagtagagaacaaaatagtttgaatttctgtgacatgttccaagttttattgcttctgttctgtgtatatacaagttaatacgaatatcaaagttatagtcttcagagatcgcaattgataaatttgttgttatctattgttaatagtggggtaatcatgtatattattatatggaccataatgttataaggcaatattaataccgtcggacctgagagtgtccataccatttaagtttgcttttttaaacgatatcagcagaataacttgaaacttataatttagggtcccgatcatttattggttttaattagtgtcatcgtttacatttccatataaatttttttgcattggttatagatttgtaattgataagaaaccggtatcaaactatcaactaaataaaatttgaactcgttagaaactgctgaaaataacaacttctattatgttgcgatgttttatgtcctagaacaatgtaaaatacagaattaaaaattgaaaaccctacttcgcttgaataaaaatcacaaaaaaaaattataaagaaaagtaaatagtctaacaaatggaaaaaaaaaacaaaacgctagattccaattaaaatccataatatgaaattatgattggttaacttaatattagtggccttaccaaacaaaaaaaaagatgacctgaaatgaaatctaatgcacattcaagagttggcaggattataaatgcatctgtatatgtataataatacaataccctgtcaatgtctattaaattgttccaattaatttctcctcccaaaaataacttatccaaataaacaactataatcaatgaagttagttagcctttattttcatgatgattgtgataataccaaaattcttatcttcataccaaagtacacaaaataattcacactctatagtctatagtataaatttggcaaaatttcaccgaattctcctattttctagcttcggctttgtctttttatatacacgtattaactatagtcaccaataaaaaattaattaagttaaactgattaggaaaaaacactagttaattgtgtaattagtagttttgttcaatgttgttaattaaaaagcgaacgtatcgtcgtttctctttttaactcattctctttggatccaaatctttcgctttggaattcgccattgacaaagtactcaattccaaaacaaagaataagcaaacaacaacaattttcacttccttcaaaaattataaaaatccagtttttatctttgcaagattcaaaagtttgaatttttacttgttttgatttctgggttttgtttgttttttgatttcggtaatgatacaattgagattttgatttcgtgtgatgttgagagattcttaaatgggtctatgtacttcgaaaccgaattcatctaattccgatcaaactccggcgaggaatagtccacttccggcgtctgaatccgtcaagccttcgagctcttccgttaatggtgaagatcagtgtgtaacaacaacgaacaatgaaggcaaaaagtctccgtttttccctttttatagtccaagtccagctcactatttcttctccaagaagactccggcgagatctccggcgactaattcgactaattcgactccgaagcgattctttaaacggccgtttcctcctccgtctccggctaaacatatcagagctgttttagcgagaaggcatggttctgtgaagcctaattcgtcggcgatccctgaaggtagtgaagctgaaggaggtggtgttggattggataaaagctttggtttttccaagagttttgcgagtaagtatgagcttggtgatgaagttggtcgtggtcattttggttatacttgtgctgctaagtttaagaagggtgataataaaggtcaacaagtcgcggttaaagtcattcccaaagcaaaggttagtgtttctatggtttgttagtgacgagatctggtgaattagagatgatatttgcagaactattgaatgtgatatgtcctgtttggtgattgtgttgtgtagatgacgacggctattgcaattgaagatgtgagaagggaagtgaagatattgagggctttgtctggtcataacaatcttcctcatttctatgatgcttatgaggatcatgataatgtctatatagtgatggagtaagctcactttttgctctaacttatcagcttgggaattggcattattagcgaggcttaacaagtgtttctgtctctgttggtttagactatgtgaaggaggagagcttttggatagaatactttcaaggtaaagaggttttagccactttagaagtaggattgttttggtattgtttttactgaacttggtggtttttaatatgcagaggtgggaagtacacagaggaggatgcaaagaccgttatgatacaaatattgaatgtggttgctttttgtcatctgcaaggcgttgtacacagagatcttaaaccagaggtactaaaagctctttattggtacttatacatttgatgttcattgcaatctttatgaagttcacttaaactgtttggatcagaattttctttttacctcaaaagaagacacctctcaattgaaggcaatagatttcggtttgtcagattacgtgagaccaggtaaagcccttagattatatgctatatgtaaacttagattccagaacctagagaccagcatttgcttatatgcgttgacaattgcatttgcagatgagaggctcaatgacattgttggtagtgcatactatgtagcacctgaagttctgcatagatcttacagtacagaagctgatatttggagtgttggtgtgattgtatatattctattgtgtggaagccgaccgttttgggctaggacagaatcaggaatctttcgtgctgttctaaaagctgatccaagttttgatgaccctccttggcctttgttatcttcagaggcaagagattttgtaaagcggttgctaaacaaagatccgcgtaaaagattaacagctgctcaagccttaagtaagtgtagaatgcatacaaaattgtttcaatgtgaaaagatttgtaatcttgtttattgtttcaggtcatccatggataaaggactcaaacgacgcaaaggttccaatggatattctggttttcaaacttatgagagcttatttacgatcatcatctctccgtaaagctgcattaagagtgagtggatcagtttttcagtatttctacttaaaaggtcactttgttttcacttaccgttcgccatttgcttgcaggctttatcgaaaacacttacggttgatgaactgttttatctgagagagcagtttgctttgttagaacctagtaagaacggaaccataagtctagaaaacatcaaatcagtaagttttctatcttccgtcctgtttcagtttatcttctggtatgttttggttaacatcatgacactggctcgaactctctttgttaggctctgatgaaaatggcaacagatgcgatgaaggactcacgtattccagagttcttaggacaagtaagagccttgattctttctattcaatgtttaaaccatacagtttgacttggtgattgaaaatcttattggaccatctttgtagctgagtgctcttcaatatagaagaatggactttgaggaattctgtgcagcggcattgagtgttcaccagctagaagctcttgatcgatgggaacaacacgctcgttgtgcttatgagcttttcgaaaaggaagggaaccgaccaatcatgatcgatgaactcgcttcggtctgtctcttttgcctctttatacaagtctgtttaaagtctttggaaatgctcaaattaactcattggttaaacttacctcaggaacttggtcttggcccttctgtaccggttcacgcagtgcttcacgattggcttagacataccgatgggaagcttagctttctcggatttgtgaaattgctacatggtgtgtctagccgcacgatcaaagctcattagaagggttttgaaactttgaatgatatgtatgaaatttgtctgagctctaaggtctcattctcctaggagttataatatgtggcttttgacttttgttatgaaagctgagaagcaaagattataaaaaaaaatgagtgtagcaaaaaaagagagaagtgtgttagttttgtagagaatgatatgatattttccccaaatttggtaacttatgacgattgatgatatttctgacatttttagattttgctttttttgacaccaatcttatttccaaatttttttctctatcaaattattatttttcaaaaaaatcataatactatgagtttgatgatttcaaattcacattcgctggacatgtgccacaaatgaagttagtgcttcctagagaattgtgctctcctcaagaaactcactctacatttggattctcattcaacaaaagatgaagtcgagaaactcctcaaaatcccaagagcctctaccaaatgtgaggttgtcttttatgaatcagtttgatgtaagaagttcttgctacacaggaaatgcatgtctagattttgaaggtacttttgtaagaaatcatgttttctatgcaatcaagtttattactctcttgcttagaccatgtacataggtgatttattttgggtatcagtagcccaaaaattatattttaatagatcaaaccatgtatttgggcctgatccgtataattgtactgatacctttgatacttagtatcaggtgatgtggcagcacacgattggtcagcgtttttgctcaaatcagagaaagaaaaaaaaaatcttttgtaatcctatgttttaatatattactttttgattttgcaaatttttttttttatatatttaaaccgatctcaccaatgcaaacacattttgtaggagtatcataaaaatctcaaacaataaacaaacattataaatagtactaaaaaattctttatgatactaggatcaattatgggattggcacaataaagtgtggtattgtaaaattggggcctttctcaaatgcttatgggattaggcacttctaaataatcaaaatacggatttaaccttttattactttgtttactttcaaaccaaagagatatgaagatcccgagaagcttggattgatggtgaaatgagaaaccagagatgaagaagatgatcgaaaggcttatcattattaggatttgaaatgattttgttgtttgaatcgaagtttgtgtttgatttgagaagaattaatggtggtggtggatgaaggggagatgaaattatgggttgacgacatgatggactacggtggcgatggtgagccggtagcaccgccgtacaaatacttgtgtatatacgcacatatctacacatatagaaggtgaagattgggtttgagtggatttgcatgatccgatgttcagaaactcatcatcaccatcaaaaactcatcatcacaatttggttattctctaaagttgaaacatttgggttccttatgcagtatctttttagggtttagttttcttacatcaaaaaccaattaattgtttattgggttcatcagacagtcgttggtggcggagggattgttggtggcggaaggatcgtgaagtcgaaagaagaagaaaagatgtgttgatggagctaaattacaggggtaaattagtcaatctcattcacagaaaatgctttatcctgttagccctttatgaaaatgctcaatccctaatttttgggccataaagtacccatatatgtaatagcccctatgatactatatgagtatcacccatatacatgctcttatatttttaaaatttaattctcttgagaaggttttcactcttttcttatcttccttaaacatgtataaacagtaagtactaaatataaataagatattgaaaacacaagcattcttaaaccaaacatagaaatcatgtgtcgcatttgttccaatatatttaagggcaaccgagattagatgttagtatcgcaactttagaacattttgatctaaagttgactttacgctttccatattctacgcttactctttttctatgggtgtacaatgttggctatcgacaagagaagtgaagaagacaaggcatttagcagtccctcaaatttgcaatacaaaaaaaatgatgggttttggggaaaatgcaaaagtcatcgtgtatgttgaataatatataatttttgtatttttttagcttgtagaaattgaattttgctaggttaagcagcattgtcacttgtaaattaattattttagagcaaactcattagttttagtgaaattaaaaaaaatgtgaaaaatgaggttattagaataaataaatcgaggattacaccaacaaataagtattactatttatttatcccaaaaaaaaaacaatcatttatatgttttccaaattagccaaagaagtctttcaagccaataactcttatgtttcatgcaaatcctccatgaggatcaaattagggactgttcttgatttgccattttggcgcccaaattttttggatttactatttacttcaaagatattatatttgtcattttggtcacttaaaaactatacatttgagaatattttttatatacaatatatacttaataacaaacactaaatcccaaaagaaatggaacaaaataaactcaaacataatatgtaaaattattttttagatataagaaaataacaaaatgtaaaatatttaaggtaaaatgacaaaatcctcaaatgcaaaataaaataaaataattcgtattgattcatcacattatgtcttcagtttctatttaacttcaatgaaatcaatgtttaacaaaaaaaaaacatttaagaaaggataaaggatccaacagtaaattgcacacgacagccaaacggatcccagtcggggctccgacaaagttttaatggtttcttaagaaaaatcaaaagccgtttgctttttttgaaatttccatggcggacgaaaaggagatcgtcgatatttatagctcagatgaggaatacgacgaagacgatgatgatgatgatgataccgatggcgagagtagcgacgaagacgatgaagaagaagatcggaatctgaggtatttgcgtatttcacgatgatttatcggttctggatcggaatctgaagttttttggatctgattctggaattactcgattcagtggagatgatagcgaatcaagcgaagatgattacactgattcgaattcggattctgatgacgacgatgaagaagatgatgatgatgaggaggaggaagaagaagaagactcccttgttgataaagtcactcgtctactcaaaggtttatcaatttagggtttaattatggatcttgatttgttctttgtttgcatcaatttagggtttatgaatcttttgatagactaacaaattaggaacacttgtttaatttttgagggaaatcattgaattggaattggatcattcaagttcttgctagaaattggggaatgttgctatatatatatatatatatataacttgttttactaaaatctctgttgggatttggttttagggaaacaagattgactcgtacacatttcttagctgagaagctttttttaaggtaaatcataaagtgactactattagtggaacattttgttgttctatgttgttgttggaacagctccatgtttgtttggatctatctctctgttatatgatttcgttcttcttgtgatcgtatccttatcaggataaaaggtaggagcatgaaagaagcagtttatcaaagatcatctattgctaaggtaaatcatatactatttctatacatgctcttaataccagagatgtcgaaaacatttgttaatgcaatggagattattgttctcttcacacttatataagtttcttcagagggtttaacgattttagaatggctagccccaaagactatttgtaaacttgtgttcgaatcactcataagttcgcttgtcatatatgatcgtcttatgattgtactaagcctactcttagcgaactaccggtattcatgatttttggggtggcatgcaacttctttaactcactgttcctggtctagttttcgcttctttacgcaatacaataacacaatgctagcacaaatgtgtagtcaaagaaaactctcagtgtgttcttgtcaccaatgcttatctgtacttttattttgttattctagaagtataagaaagctacaagactcgttaatgatctcttgatgacttgactatcaccaaagttttactctcgtgtgaaaaaatggaccccgaaacatagagtagttccttgacgtgacaacacttaaggaccattgtttctagtttacctttaagggggtccctttttattttgtgatcggatcttaagtccattcacatgacttgtcggatcttcttgtgtcccgaatttaaacaccaaggcacttgtacctttttaaacttaatgccacaaaaaaagttcaagccttagccgacaagacaaaaccatcatctctaaagtcatgcaaactaaagaacaaaatgaaactattaatagataagagattgatagcttattcacgccaatcataaaccaacccttttaaatacttaattacattacaaacacaagaatacacatacatacacatttggctaaaatagcattgaataaaatcataaaccaatcaacttgtatttttttttaagtactagctagaaatttgggtttgatggtcggatatcgagttcatgtgtccaagctctccggtcttgaacatggagataccaataagtttgagccaatacatcaggatccattcccatcactcccgagctttctccttctccttctccatcttcgcctcctacgttgaatgattgctctgcgaccattcctcggggagggatgtttgtttctctgaaaacacattttcaagagattttatctatatatgcgatactatttcattttgtaatatcttcaaatgcttaaatgtgtcaatagagtggaccgttgtgagtgtggggactctttttcatatttgaccgatagaagataatgaaatagaggctatggaatcaaaaaatggtttccatttgctagaaaaaaatagcaaataaataagaagtggagctacatgattctttatttgcgatttttttttgaggtaagaatcttgtcggtttggatcagaatcttgccgtttgtggaaggtataaaaagttaaaagagcctttttcggacagatatttgtggttctaattcaattataatggaaaatgatcacataattgtgtgtaccttggaggtccaaccacaccgtcgatgataacatgagccacatgtattccaaaagcttgatattcttttgctaagcattgagacagtgccctcaacgcaaatttcccacagcctgtgccaatttcatatattttcttcagtgactaacccattaattaatatatttttttgcgaaaaatttaaataaaatcatttttaaaaatcttgagaaagttacatagttcggagaaaccagcaatgccattcaaagacgccgagcaaccggtgaagagtatagttccttttcctttctccatcatcccgggagtaaccttttggtaccatttattataaatcaaatataaaccttagaaataagaagctttttaaagaaattgaagtgtcgaaatcattcactataacatttacgcttctgcttcctgacataaaataaaaacaggatttggtacaactagcacatcaacaaatgattaagtaatctattaaaaatttacttcttgtggaaataatcttatctattttaactaaaacattaaaagtctaataaaaaatgacgcttccaataatattaacaagtgtttttgataaattatgagtcaatacaaagattatcctgatcaaaccttatattctagggtttttgggccatgaccaacatgcgagggatttcaaaagaaaacataatattgtttcgtatataataactaatcgcgatttcaagaaatatcacctgttgagcgcaaagaaatgcagcgaagacagagacagagatagatgtttggaaagattgaaaaggaatgtgggtgaaagaagtgggatggtgacttgcgtaagaagaatgataagcattgtacactaaaacctccacgaaccctaacgacaatactccttcgaaggcttctcttacacttcttggatctgcacaatcaattcttatagcaaacacttgtgctttctcttctcttgctatctcttctgctactctagataacctacctgcacaatttacccgactatattaagagagtgaccaacctgagtatatccttaagtgttactaaaaaaaagtgttatatatattttttgtagtggatcggcaataagtgcaccgttttgtgattaatattagctgatgggcgtaacttagtaactatttcatatacatggagggatgaagaaaactatttattattatagtcaaatggaaaccagtttaatgttctcatcaccgaacagaatgaaaaagtatcttttgtgtcaaacaaaaacaaaattatttaaatttaatcaaataagttttcactgtactggttcttaaaaagctgaatttatcgacacatttatttacactgaaaaatttccactattagtactatgtcttacgaaccagttaagcctatagtgaagtactgaatagtgaatactgatgtataaacccaaaatcttttttttttataaccaaatatacatttaaaatgcaccttttgactataaattatatattgattaatatgcatgtatgtgtgtcagtgtgtgtgtgtgactgtgtggtgtgagtcagccacattaatatttgccaaaagcagaaatccagcgaagaaaaacattctaaaaataactctccttttttgtttgttcaaggcttcaaaaataactcattttgcgaagaaaactgccgcaattccttttcttcattggaataaaaatgaagaagaaaattcccatgggaacatatatagaaaaaatcatatttatacatggaaacatgtgggtgtgtatagtgtatgaatagataaagatatggataaaaagaaaagcaaaaaacaaaatgaaaagagagaaagaaaaggaatcaaaccaagatcacgagcgaggatggcgacggtgtagccttcgtgagcaaacttccgagcgatggagcgaccgagctttggaccaacgccgactacggccgctatgcctttgctgccagagctcgaactccctacgtttctcatcatcgatactttatgatctttcctttctccaccttcttctctttatagctacttctctatggataaaatcgataaatagtgaaaaataattataagaaaattttagtttatgttgtgtccccttaacctaggcctttaataagattgtgttgagagagtgagagagagaaatattcttgtggactagataaatttttggttgttatatatacatatatacacacctttctttgtcattatatcagaaaagtttcatttcctttgatagcaattatataattttaacattgcaatgatgtaacaatttgcataagtatacgtatacctttatcgaattattaatattctatatatatataatatatgtgttctaggtgaaagatggtactgtccaatggatagtgtggttcttagacaaagagacatgtcatgtggaagaaaatatagcaattggttcttacttgttagactctacaagatgtttcgaaaagacccatataaggtcgaccgacttttgtaaattacgtggtcgaggattttatttcgatctattggtcaatataccatatgcgaatttttcattgcacttttttatgatttggtcgttctaaattgtttaacattaaaaattaatagtatttttatgcatttctgaataataagaaactatagaaacttttgtgaattataggaaagagtaggagagaacccttatagtattgttttgtaggcttgtaatgttaaatttaatgtgatgttaaaacttaatttattgatgattaataactttcacataaaattaaggaattttgtatgcacattttaaagagtttatatatatttcttataagaaatgaagaaaagtaatgaatatgataacaatttattaaataggttgacccatatgctctctttttaaggggattattattatgagattaccccttttgatttttgtatatagatttggcttttatttttgtcttacaagttggacatttgctgccccctttcctcttctgtcaacagctcataggcatttcaaacatatacatacaaatgtatttcatcgaagtttctagatacattacatgacatgtatatccttatatttaatttagtttttaatgtgggctctgattgataacttttttttaccgttgcggtatagagcttactgattttagaatgactaattacaaagcggtatggaaagcgttaccaaaaaaaagggaatcaaaaataatggtcaccgattcttatatcggttacaaagttatatttatttgtgttcgtgtcaccactactatatccttaacaaaggtgattaggattgccgataacattaccctcgtgcttttagaattatgaatgatcaagaacatttactcttgcattttttttttaatatactcaaattaacttacattactctttcttttatttgttaaagattaacattactcttgcttttagatttatcaaagattatcctacgactgatatgagatatcttagatgggatatgtgaatgtgaactgcggaagataaggattgatagattcttgcaacaacaaaaaggatctttcaaatacggaggagataaacttgaacaaaaatatatatatatatatatatatatatatatgaaaaagtggcaataagatactaattacaaatattatgtcattatacatgggaccagatattggtaactgagtaactaacccatatcatctatgattggtctaaatcttctcaaatctttcctccattctcttgtaacgcccttcgatatcacctttatataattattcatgtgtgtgcattgcattatatgatcgagtcttttagttaagttcatattaagttgatattaacatatttaatcatttaacatcaaacaaaaaatatacagtgttctaaattattcaataaacagtaagactacaaaaccatataatatagtggctagtgctaaatatgtgtctttactataaaaatatcagattattagtttctttaaaaaaccgagtttagccgtttatgaacacaaccttatgaaaataacataaagtctggtcattctcatcatattctcgtttttaaactctctaagtgaaaacaaaacaaaatatagacattatgttattttcttctcatgattgctctcgcaccgtcacataaaaacaaattcaattacgtgttcttgaggtgtaacattaattcaagaggtcccgaaggagttgaaaagtagctatcgttgtaattacaaaattgttttaaatatgtttctattataatgttacacacttacactccatttttttccaatactattatattatttaaatttattttaatatacttcctctaattttaacaaaacatttgtgttaaatttcatctattcaattcagctcatctttgtattctcttgactcaaataacttaattaatttcgttgtgacaaaacaaatacacaaaatcttagttaatatatttcttttggaaattaacttaagagtatcatttatcaaaattaacttatatccacatgatttttttgagttcatccgtttttctttaaatttaatttttaccataaaattaaaaacttatactatagtcatataaatacatagatatattttatcttattttgtcataataaaccgaattggtaaaacgcatgttttatgtatattgtggtttaacgataaaagcccaattctaaaactttttagccttacattagtccatattttcttgtcaaacctaaaaagtagttcacgaattagatcaaaagagatccgaaaaaaataccaagaaaatttctacccgcaatttcaagcggatctacgagcatgcacataaatttgtgaacaaatttgtaacagaaaagaagagagaattaaattaaattctaataataattaaaaaaaactatgattttattaattaaacgacgaacaaatcaagatatgtccatgagaaatggacaaaacaaaatcaaaaccctaacaaaactaaaaataaggaaagaaaactaaatggaggaacgaattgcgtgtggaagacttgcttagttcttggcatgcttgatgtgacaagagtattgaaggagaggagcaaagaaatgactcttaaacatcatgtgaagatggccataacacctcttgttcatattcacaatgatctcacaacattctttgtccaatgcgaaatcattctccgcccaactcgaaaatatttgcgagaaacatttctcattagttttcgacccatctttagacaaacatttctctaactcaccggattgcgacacgagaagagactcaaacggaggacctggaagtccagggatgttagggagtccagggatgttaggtattgggattcccggaatgttgggaaacgggatgtttggtattcccgggatttgggggatattagggaacgagccgggaggtgaaggaggagtgttggggtctgaagaggaggagcaagcccaaccaaccttagagtcaccgaagttgttattgtgattggctagatcggacggcttaggccatggtttctttgttgatccgacggtagggtttgggagagagacgaggcataggagagctacaatgacaatgacgctcttcatggtgttacggcgatgtaaacaaaggattttttttaagtgtataaacaaaaatgagtgagaatgcattgatccgtttatatagagttttattcttttcttttaaagtaaacaaaattaaaaataaggattaagatagaatttgtatatactacgaatatgttgtagcagttattattatctctataaactgatttgcttgcaaccattatctcgtggaatatttttttgtgattaaatttttttttcaaaaagaaaaaaagagagtagaaattagcataatctaaataaatcaaatagttggaaatcattttttttacagatctatttggtaaacaaaaattatgtaaaataatcaaaatgaataaaaaaaattgccctgaaaaaaaggttttaataaagaaaatttatcaactgaaataaaaataacgagtaaaaagaaaaagaaacattcaaatcgtaatcccattagtcttcttaatagtttccccgaatatccaacaagaagatccaactcttttgaatgaagatttttttttatatgtttaaaggttaattcaaattataatttgtaaaccgaaataacagaaagaaattaaagattgcatcaagatcgatatgaatcatatgatacaacagtttgctttcctaactatcttttcaagtccaaaaatctaattctttatacgaggtcacataaattgaatgttaattagatgggatataattcttcatcccatttactgttacatttcatagctcaaaaaaattaaaaaggaaacaaaagaggtgatttttgcaatgtaataagaaaaatttcaaataaattatatagtaactaactaaaaaatcacgaagaaaaaggaaaagaaacattcaaatcgttatatgtttcttcttgttaattagagatcacacatttctgaatgtagaattttcaaatattataaattaaaaaacgatgtaacaaaaagaatgattgcatcgaaatagacatgatatatacttccctaacgatcttttcaagtccaaacacaatatcttttgcaaataatgcgatttaacttttggtatttgatattttctttattcatttgcgaacataaaacaagcaacaaagagaatgaagagataattattcattgattaaaccttaacaaaagatccgttcatcagatatgaacggcaacaaatatcgcatgactaaacgaaccaaaacgaaaaacaaataatcaaagaaaaaaaccctaattaatcaagaacaaacaaagaagaagagaaactagcaggtgacatggcaagtgtaacgaacaagaggaacaaagaaagggtcgttgaagaatccccaagcgacgtcgtcacattcacttttcatgttgacaacaaggttgcaacaatagtcactaacttgaaacaacctcgtgtagaaactgacttccatctgcatccgacacatcccaacaggtcccatgtttatcatacatctctcgatgtgttcccatggattctgttgatgatgaggtggatttgatggagatgatgagtgatgacttggtggcggaggtggagacttcttgggtgttggaggtggaagagacggtgttgaaggagacttcttgggcgctggaggtggaagagacggtgttggaggcggagatggagacttcttgggcgttggatggggaacaaacggtgttaatgaaggcggagatggagacttctttggcgttggcggtgggggagactttttaggagctggaggaggaggagacggtgttgatggagttgacggaatcggcgttgatggagaaatagaaatggcaggagcagatccgttgctataagtacatttccagactttggaatctccatagccgaaactatggccagtgttcaaaagcatcagttcgtttctagtgatttcagacgggtttggccatccttcgatttttggccagtattttccgacggttgtggtcggaaaagccacaagacaaagaaaagctgccgctacaagcacgatggaggttttcattcttaaagggaagatttgtgagtgtatacaaagaaatggactaactcgttctttatatatagaaggatttaacttcttttttttggttggttacaaatatatcaaagatctttttaacaaccaaaaaaatatgaaaaaatccatatctcgtaactattattttttaaaatttaaactgttgtaaatattatctcttggaaactcgaaaagaatatatttttttattttttttatctaacaactttctttcaaaactcaaaacatatccttgtttacaaatgggattaaaaagtatggacaaaaatgtataaacaccacggggtcatgggcgtaggcagtgtgtaattagggggtcaattgacccctatgaattttaaaatttctactatattttattaagagtaattataatgaccccaatgcattatagtttttgatccccatatcaaactaattcaactaaaacgacaaaaaagccaaataagtttggttcattagaattttaaaccaaattgtaatgtaataaaattaaaaatccttgacttatttaaacttaagttcaactaatgatctaatgttataattatatatataaaaaaaacacaatttgtttttgcttttcttagtctttgtggaccataacaaaaagttgtaattattaatttagttgattttcagatatttttctcaggtgtagattatttctaaacaaaataataataaattttatataatatactatttttattaaaattctgatccttataacaaaattttctagctccgccactgcacgggatgttacatcgaattgaatttttggcgtagagcatctgcacaagtattctgctcacgatgtttgaaaacaaaactttggtgacttgaaacttcgcgtccatccacttatcgtagttagatagtgttgcagtcgtggtgatgatccattgttgtttttgagactaattcggttttttatatatagaaggatttaacttctgttttttgttggttaaaaatataataaagatctttttaacaaacgaataaatatgataaaattccatatctcgcaactattatctcttaaaacttaaactgttgtaaatattatttcttggaaactcgaaaatgaatattcttaacgagaaaaaaaaaacataacgaaaatatgtatattgcaattataagacttaaaaaaataaaaaatattaaatgcagattaacaaaaagaaattattagatgcagatttgtgtagatctttgaaaagacctattaaagcccatttaggcccattaaacgacaacctattaaacccatttaggcccataataacggcgtagtttcagaattagacagtgaggcaatggagcataaagtaacacccgaaagatccgacccggagaagagagatccggacaacccgacccaaatatttgacatttttggttcgatgttcttcttcttcctctattgatttttctgatcttcccgttcgatctcactctgtttcccaaaaaccttcgtgtaccttcgtattctctgcattggatttgaagcaaattgatgaactagtaatctcacacggatctaagagcaggtaaaaccaaaaatgaacactacaaagctatcaacgaattttccatttttttttgaaattttattttctttcgaagatcagatcagtaatcttattatcagcttctctcgttctcttgatcgatctgaatcgaaattgtgacaatgatcagccgtattttgtctttcagaagttatggagtgggcaacggtgcagcatctggatctgcgtcatgtaggtcgcggtgtgagcaagccactacaacctcatacggcggcgtttcatccttctcaagccgttatcgctgttgccgttggctctcacatcatgggtataatactctccgcaaattcttatcgattggtttcatagtttgtgactgtttgatattgaaacttattggtttttgcagaatttgatgcattaacgggatgtaagatcgcgtctattgatattggatctccagctgttagaatgttgtatagtcctactagcagcaatgctgttgttgccattcttgaggtcagtttcctctaatgttattgtagagattttgttttcaatttggaatagtagttttagcttggtgttcagtgttttagaatgatttgtgtttggaattgtttaggattgtacaattaggtcttgtgattttgaaacggagcagacttgtgtattgcactcaccggagaagaggagtgagcacatttcctcagatactgaagttcatcttgctgtgacgccacttcaacctgttgtgttctttggattcccaaaacgaatgagtgtcacaggttgggttatcagttcatgagttctcctatatgagtaggtgtgctggtttattttaccgattgactgtatttgttcttttctgtagttgttggaactgttgaaggtggaagagctccaaccaaaattaagacagatttgaagaaaccaattgtgaacattgcttgccatcctcgactacctgtcctggtatgataaaacattcacacattttcatgttagtgtgtggaatctgattttgttgtacacacgcgtaacttcttgttcaatgttttgtcttttcagtatgtagcatatgcagaggggttgatacgagcttataacattcatacttatgctgttcattatacactacagcgtgagtttaggaggatctcacaagtctcattgtttttattcttctcacttggggtatcctgagcaatagccaccagttaaagcagttctttgttatcctcgcagttgataatactattaaacttatcggcgcaagttcgtttgcttttcacccaacactagaatggatttttgttggagataggaggggtacacttttagcgtgggatgtttcaactgaaagacctaatatgattggaatgtaagtcattttcgttgcttttagatttctgtcagctggcatgaaattgctatcccttttttttctcgcagcaattcattcttgtttgttatattttggaactgcagaacgcaagtgggttcgcaacccatcacttcaatttcttggcttcctatgttgcgtgtacttgtcactgtgtccaaggatggatctcttcaagtgtggaagacacgagtaataattaatcccaataggccttcgacacaaacaaacttctttgagcctgctggtaagcctgatatctcttatagagaaaatatattttcctccccgacttaggaataattcccatggtttggtttggagactttgattacgcattgtagcactatccttttttttttttctttgcagctatggaatcaatagacattcctaaaattctctcccaacagggtggcgaagctgtttaccctttaccacgaatcaaaactttagaagttcacccaaagctgaacttagcagctttgatttttgcagttaagaatacttcctactggcactccttccttaggtagaagtgtggcttctgtctttgacatactgggtttcttatacagaacatggtgggtaatgagaacactcaaaatcgagcagctcagactagagaaggaaggaagcagctctttgcagttttgcaaagtgctaggggatcttcaggtgaatcttgaacactaatgttattcaaacataacaattgatactcttcttaagctgtatggatgtgtctcttgagagtaaccaatcctctgttaatagtatgggttgtgggttcgaccagagtcgttcgtatcaatatccggctttctaacatgtgagatgattaacagcttctgttctaaaggaaaagctttcgtctatgggttcctctggaattttagccgagcatcaacttcaagctctgctacaggagcacaaggggtaggtggatatttctcatgcaatcactgttggaaaattgcgcaaaaaaaagttactagcatgtgctgtgaattccgtaccaaatgactcaaatttcatctgcttcatagttcactctgttacttttctacagccagagtcagctaacaatttcagatatcgcacggaaggcgttcttgtatagtgtatgactgctttaccttcttgcttagacattatgtttgttttattatttggaactattttgagcttagtcgatgaattaatccgtacagcattttatggagggtcatgccaaaactgctccaatatcaaggttaccccttattacggtcgtggatacaaaggatcaacttaaagacattcctgtttgccaggcatgtaactgttgtttagtgtttcttttctgtagtatctgatttatgcctgactgattggattatctgacagccatttcatttggagctgaatttcttcaataagccaaatagagttcttcattatcctgtgaggtccttttatatcgagggccttaacctcatggctcacaatctctgttctggaacagacaacatctacaagaagctgtacacatcggtataatctgatatcatgtgatttcgttttagtttttggtttccttttacttacagaacttttctgtttcagatccccggaaatgttgaatatcattcgaaacacattgtttacagtcgtaaaaggcacctctttctggttgtctttgagttcagtggtgctacaaatgaagttgtgctttactgggaaaatacaggttcccagctgcctaatagcaaaggaagcactgctaaaggtttgtctaatcattggattcccttgctattctttagagaacttcctatcctgcctcataacttttagttttgaaaacattaaacggtatcatactgcatccagtcatttaaatataccaggggtacaatgtatgctataaaacagtagttactaacaatcaaggaagctgaacgtttcaacgaatgatctgtttacttgatagagatgcaagcttagaattatttaagccgttcatcctttttgttttcctatgtttccaaaggcgtaaacgaacaagagaagagtaacctcaaagctatacttttttggtatgcaggttgtgatgctgcctttatcggcccaaatgacgatcaatttgcaattcttgacgaggataagacaggactgtctatgtatatcctcccaaaacttaccacaatggaagagaatgagaagaatttgttatctgaagaaaaccaaaagaaagaggcggatccttctggaattcagggtccacaacaattcatgtttgagacagaagtcgatcgtgttttttccacaccgataggtgatgttgcatcagataatctcattcttgaagttacagataatctcattcttgaagttacttatcaattggagcatgccatcgctaactgatgcctctttaaattacagagtccactctgatgtttgcttgtaatggaacccaaattgggctggcaaagttgtttcaaggctaccgtctctcagcttcagatggtcattatatttcaacacaaggtgagggacgaaagtcaatcaagttgaagaaacatgaaatagctcttcaggtatgcaacatctattataacttcgtactgtttattagtagtttggtgggaaattttccaaccaaataaacttttgatatctagtatttgattctatgaccagctcagtaaatgcagtcgttttattccttaccctttaatgtggtttacatctggccggttctctttgaaattaaaacgatcatgttcagaaaattgactcgtcatgttggtgttagcgttctattgctgtcaaaaattggttgaatcgacaattgatattcctgaaattttggtcaatcaacttttgtattacgtagagattcttagaatatgatttagatttctaaagtagttttttccatcaattgtataaagaactaattgttgtctcaaaatgtacaggttcaatggcaagaaacaccccggggatatgtcgcagggatattaacaacccaaagggtgctgatggtgtctgcggattttgatatattggcaagcagttcaacgaaatatgatagaggcttaccatcaatatcctgattaaactatctttcttccctttcaatcatgtgcattatatgctaacactttttagatgcatgctcattgactattgaaaatccttaacttatgcgtactttagatctcttctatgggttgggcctgccttactcttttctacaacaactgctgtatgtttacttggctgggatgggaaagtgaggactattctttccataagtacaccatacgcaggtaagtagatcttgattctctatatgcttaaggtgattttactgtatttcattctcttaaatttatcctcttcaacgcagccctagttggtgccttgaatgaccgcctattgcttgctcatcccactgatataagtccgaagcagaaaaaggggatcgaaatcaagagctgccttgttgggctacttgaaccgcttttaattggattttctacaatgcaacaaacatttgaacagaaagtagacctttctgaaatattgtatcaaataacaacaaggttaccccctttccttttttctttgcttacacgttgttacatatttaatgtcaaatactttggaataggtgtgcaggatacatcaatgagtttctttgtctctttccctagctatctttattgactgcattccatgctaactatattagcttctttttttatatatataatggctgcaggtttgatagcttgcgaattactccaagatctcttgatattcttgctagaagcgctccagtatgtggagatcttgctgtatcactagctcaagcaggccctcaattcaaccaggtgagtcgagttcagtagatcttatgaccagaactctcccccagaagatgtgttctcttactaaacggttttgaaaaaattaggtattacgttgtgcatatgcgataaaggctcttcggttctccacggcattgtcagttttaaaggacgagttcttgcgttctagagactatccaaaatgtcctccaacttctcttttgttccagaggttccggcagcttggatatgcctgtatcaagtaagtaaactttctttgcaggacatatgtagcatctgaatatctaaaaaatatagttagttattgttggatggcctattcaaagctacaatatgtgggagttttagcgtatcttgaactggaccttgaaaagttaatctcaagtatttttaccgcctccccagtcactatctatagttagttggaactccgatataacacttcttgatccttgtacctaaattacatccctatgctagtttctcatggcaatatttttggcaagcttcagtcatctaactactttgtacattttgtactgtagatatggtcaattcgatagcgcaaaggaaacttttgaagtaataggcgactatgagagcatgctagatctttttatatgccacctcaaccctagtgctatgcgtcgtcttgcccagaaattggaagaagaaagtggagatcccgagttgagacgatattgtgaaaggattttacgagtacggtctacaggatggacccagggaatttttgctaattttgcagctgagagtatggttccaaaaggaccagaatggggtggtggcaactgggaaatcaagactccaaccgacatgaagagcatacctaagtgggagcttgctggggaagtaatgccatacatgaagaatgaagatggaaccatcccctcaatagtagctgatcatattggtgtttacttgggctgtgtcaaaggcagagttaatgtggtggaaattaaagaagacagcttagtttctaaacctggagggcttagtttgttgggtaaacctgtatcggataaacctctggcacttcctgctggtgaatcaagttcgatgatgggtctggaatcccttggaaaacaaaacgtagctgatgaacaggcaaaggctgctgaggaattcaagaaaacaatgtatggtgctactggtgatggcagcagcagtgacgaggaaggtgtaacaaaacctaagaagctgcagattagaatacgagaaaagccaacatctaccaccgtggacgtcaataagcttaaagaagctgctaaaacgtttaaactcggagatggtctaggcttaacaatgagtagaacaaaatcaattaatgctggatctcaggatttgggtcagatgttaagccagccttcttcctcaacagttgcaactacaactgctccaagttctgcatctgctcctgttgatccttttgcaatgagctcatggacacagcaacctcaaccagtttctcaaccagctccacctggtgtagccgcgccgataccggaagactttttccaaaacacaatcccatctgttgaggttgccaagacattgcctcctcctggcacttatctttcgaaaatggaccaagctgctcgagctgcaatagctgcacagggtggtccaaatcaagcaaataatactcctctgcctgatattggtcttcccgatggtggtgttcctcaacagtatcctcaacaaacaagtcaacaacctggtgcgccatttcagactgttggacttcctgacggcggtgttcgtcaacagtatcctggtcagaaccaggtgccatctcaggttcccgtttctacacagcctcttgatcttagcgttcttggagttccaaataccggcgattctggtaagcctcctggacaacctcaatcgcctcctgcatcagttcgtcctggacaggtaaatgtgaatttgattttggaattcactaattaatctttctgatgtttcttattacatatatagatcaaatccaacacgtaaaagtgcatatcttattgtttgcttttctcctcaggttccacgtggagctgcagctccggtttgtttcaagactggacttgcccatcttgaacaaaaccagcttccagatgcactgtcttgctttgacgaagcattcttggctctggctaaggatcaatcgcgtggtgcagatatcaaagctcaagccacaatctgtgctcagtacaagatagctgtaactctccttcgggtaactaactctcgtcgatctcccctgtaatgagtttagattctgctcaaacgatgagaccatcttatcaatgctttttttctcctctctcccatttgcaggaaatcttgaggctacaaagagtccaaggtgcaagtgcattaagcgcaaaggacgaaatggcaagactttcaaggcatctagcttcactgccactactagccaagcaccgtataaactgcatacgtactgcaatcaaaagaaacatggaagttcaaaactatggctactcaaagcagatgctggaacttcttttatcaaaggcaccagcgagtaagcaagaggaattaagaggactagtcgatctctgtgtccagagaggcacatcgaacaaatccattgacccgcttgaagatccttctcagttatgctcagctacgctcagcagattatcgactattggatacgatgtttgtgatctctgtggtgctaagtttgctgctctttcgtcgcccggttgtatcatatgcggtatgggaagcatcaaacgctctgatgcactcgctggacctgcacctgtatccacaccgtttggctaaaggttatagacactatcaccgttggtgttaatcaacatctaagcaaatttcaaactggttacatgtacgaactcattcgatcgattttgtgggtttgattttgatttattcgtctgtatatgatttgattatttgtatctgtttattttccgtacgtagctaatacaatttgttgagatatttacgtgcttttgaattttaatttacctcattgaaggtaacaaatattaagaagctcattattagtccatatcaacactacggacgatataatgagtatttaaaatcataattaacaaataatatcaataaacaagctcgtacaatacaaagagtttcaaatgttaacacaacaatttgtatccctaattttattcatgatctagaattatgaatccagtataaaatggtaccaatgggtataatctattacactataatttataaaaatacatatcgtaaaccaatgtattagatatagctataaactattaaaccttttttaagctttaggttcatcgttcttgacagcatgaccaaccccggggctatgtcctggtgtcgtgggtttgaagtcatctcctttcttatggcccataccgggactgtttcctggagttgtaggtgcgaaatcatcggtagatccggttttgaaatgatcttgaccgttcattttctgcaatcgtatttcttccgtgggtgcgaagtcatctttaaaccctttaacatttgcatgccctttcttgtgacctatcccaggactgtttcccggagaagtaggtgcaaaatcgtccgtagatccggttttgaaatgattttgaccgtttgtttgttgaagctttcttccttccttgtgtttgaagtcatcttcggaactttcaacattgacatttcctttcttgtgtcccaccccgggactgtgtccaggggaagtaggtgcaaaatcatctgtagatccggttttgaaatgatcttgaacgttagttttcagcaactttcttccttccgtgggcttgaagtcatcttgaaacccttcaacattcacattaccttttttgtgtcccacaccaggactgtttcctggagaagtgggcacgaaatcatctgtaaatccagctttaaaatgatcttggtcgtttgttttcctcaagcttcttgcttcagtggtgattggtgtttggtaaaataccatcgagatgacgatagaggtcaaagtgatagagagtagtttcatgttgttgttttttgtggatttagaagcaaggtttaggagtttgtatatatgagtagttatgctgaaatttgcagtaagagtgccccaaagagaatgtatttatagtgccatgagattgcttatgttgctgttcattaaatttaatgtgtagacacaatggccacactggttgattttggaccgtctatctattaatttaagattatcaaagtattcatatatatttttttatcaacaaagtatttatatatcaaggccgtttttaattttttgaagggtgttcgaatacatttagtcacgaatttttatttttttcgatgaaaattaacaatacgtttctcatatatttagttccttgtttctctaaattaaaaaaaaaaaaaaagatcaaggagatgataaaaaaattcgttgatatgatcatatgaatgttaaatttcattacaatggaaggaaatgataaattgatgatgaacttttttatatgacaatttgagatagaattcgattaaccttcgcacctcgaacattactaattagtttactttggcatgatataccaaaaaatatatagttactaattaattagttctttgcttctttactgaattctccatttgcacatgcaaatatgacgacatgtcgacatagtataattgtataaattatatacctattcaaatacattataacaacaagtgtgcacgcattcttattttgttgctcgtgcatggttataattgaaatagaaaatgctataatagactatcaatggacggacgataaatagagcctctggttaaaggagattccaaaatattgatagattgctatttctgatgaaggttaatcatacaatattacaaagtcggtccgaaacctctcgtagtgctccattgttgaatatacaacacatatttgtattccgaaagatttttaacgatggaaataataacatttggtttgaaaattatattaataatctaaattaattggttcattgtttttaaaatgaattcaaaggctaagaaaagactcccttcgccaccacagaaatgcattttcaacaacacaatcacacgagtttaaagaagactaatgatttgacaaaagatctttataattgacttttctctcctttaaggctttaaaagtcgaatggttagtgtaaaatactaaataggattctatgcatgtttgactatatattgtgcaacatactgttgagatttttatataccgtgtatagtactttttcatgctaagcataataagatgatcttagtcacaaatataaagatcttccactaccccatgaaaagtgttgcctaccaccaattttcttcctgttgttgatatgcaaagacttcgcaatgaaccaaaactctttgaataatatttagagatggtttaccgcttacctttaaattttgtgtttatttcgaatgtcatttaagtgattttccaatgaataagaatttttttttgttttcaatatacttggaatacatgaaagtttggttattgtggattcattttttttggaaagttccaaacattgaaggttgagtcgtccatattataaaaacatcatatattgtttgttgcattgctcatataaagaatatatatatatatttcgtcctctttctgaatcttatatatatactaaaatgttaatagtttaactcgacaaaaaatgcgataccggtcttcaattgaggagacgaaaatcgctatattagaacaattttattgacttgtagtttgtggatgttattgatttccttgccaactcgcatgtgtccgacaacgccgccaagcttctaaggaatataccatttccaaataaataataatgacaaaatatcaaaccaaaagagggaataaaaaataaaccaaaacatagaaaagccatgtagtcaatagattcactagaataatgtcaaaggcactatccccatcaacaaaaccactactataccgtccctaccagtcaccactaagttaaaaaaatttggtgttcagcatcataatatgtttttggttctaaatatatatctttatacaaattttataacatgtaaatgatgtagccggaataaatcgtctgttttcgaactagcacatattttatataactatatcgaaaatgatcggaatggttgaagaatgcgcatgcatgttaatacaaatacttgatattaccgaaaagggattataaaagtaacaaaatagtgaatatcatggccttttttgtataaaggcttaaaaatagtgaatgacatgttgaaagggaaagaaagcatttttaatttggttggctcctgcacacagggaagtttccactaacgtagcctccgccaccctaggcttctatttatatttagaacaagttgttgttgtctttttttccatacagaaacgagaacagtttcgcaaaaacgataatgtgctttctcttaatcatcactagtcattttaaacttaatcgtacataaccttgtaaattacaaatcttgatcataatccctaccatcaatcaacttctctacctctttgttaatatgataaatgcgcacacaaacttgcatataatatgtatgtggcatgaattcatatatatatatatgaagatcaatatgaaaagtatatataatttactatttccacaaaacttttttgaattaatagatagacgaatcttagattctaaatatttttgttgaagcctgaattttgagaactatgtaaaaaaacaaaataaaaacagaagagttttgacgattaaacaaaacaagagagtgacgaattcccctttgttaactagggattactttgaaataagaaaatatgtattattctttatatatggctttagaaagtcaaaagaaatggaaataactatttgaaaatcacgcgtacgtgtgattgtcttaagagtttttgaagtctagggttctctttaattatcaacgggagaattaataatgtgatttagaaggtaagcaccaaaatctatgtgaacataacatatatattatatttggttttgtgattgagtttcaccatcagaaattttactttaatttgacaaaaaaaaaaaatacttttaattatgtggtgttattatgtatggttcgtgtttgtcaaagccatcgaaacggatttgttggtacgtattatcacgaggtcatgaggacataatgattgtgtttaatttacgcatttttcaattggtgtattacaacacaatttgcttctttttttgttttaacactaatcgattcgtttatacaaaaaatgaatgcgttattaatgaactgtcgcagtaacatatgttcatagaaaaggtcacactattccaatattaaaacatcacgaacgaatcaatttttataaggaatcagaagtcacgatcatagatttgtaaggctgtttcactaacctttccaaccttaaagttggtccgtctcaaaattctagcggttcagaatcattcttcactctatgctttttttctcctttttctttttttcccttttttggtatgttatagcttataggcatctttctttcatttaattacattatttcgaagcttctttgtttacttcttacccccaaaggccaaagtgaatcttttataatgaaagttgagatattattctctctgatttgataagtagactgtagtacaattgtacaactttagttttcagttatataatattttctcataaaaactaaagaagattatagtaattaatgaattaagactcaaataatgccgaaaacaacaaccatttatttctgaggattgttaagtaactagttttttttttgaatttatgagtaactagttttgataacgattttggacaaagtaccattcgcagttgtacgtaattgtattctttttggttaaataatgtgtcatcgagtaaaatatcatgttatcgagttaaatatcactcacatatcaatgaatacgaagtagtattgccgtataagatatcgtgaataggaataaaatagtgtaccattagataaaaggagcatgttgtttaaacctcacgtgaaacgattagcaattacatgtacacctttatttctcgtgaaaatatttatttctccagcatgatttacggtcgacgagaatagacccaacatgaataatgttaaggctccaaagaagtcaaatatgtcaaagtcaaaaatcgaatggtcttactgggcctaatttcaaggcccatttcatcatctatgaaatagtgaaaaaagtacatcagaatgtaagaacagatcataactcaaatcaacaatcacaaaacaaacctctaaaaataagcaatacagttttccagttcctcctatacatccaatgagaagaaaacaaaatcatttatgtgctaaaaagataacaaaaatagaagatgataaaggaaaagatcaacaagtagttgagccgaagaacctaagaagtagaaaagcttcaaacttagaagacctttttttcactaagatagtttaaaacactaataatcagctcgtagaaatttctcgtactcagtcccattcaaagtcttgtttatatcttcccaattctttatatgatctgacaaatctcctctatgtattttcacctgtctgcttgacaaatccttcactggaatgttcaaaaactcttgaacttgtttcaatgtctgcatcaaactccataggtattaacaaccgcgttaagcaaaagacaatagcgtagctttgattatttcgaaagcttaccgtttgatttgttatgagatcttcgtagaagacaacaatatgacgagtggtattgaaatattctaaagcctttgcagctgaattctctgtttcttgtaaatcgtggatcaacgatgtcgagttgattaccggcttatatctagaaagtgcatctgcctgcagtggaatcaaaagaatcaagaaaccaacaaactcaagaatccaaaacatttgtatgcaaaaaaaaaagaacctctgcaggagaatgaacatgagacttatgagttccattcaaaagcttagcataacggtcataagaatttgccaacacagaaaccattcttcttaaaggattccttctaaacagaaatatcgcagagacgcctcttcggttaaagtactctactatgtctttatggttctccaacaaaccctgcaacagaatctgattaagaactctaaaatccgtaagtacttggctcggtaacgatgtttaatacctggttaagcatccatttgaaaccaatagcagcagaacattcgttctttgaagcactcgtaaaccaatcaagattataaactctatcaagagtctgaatgattgaagaaatgtttttccttcgatccaaaacagagaaaatctctccattagaactcacattgttatgactattcaacaatgtttcgaaccaaccgcttcctgatctctgcatcgacaatatcgcaaagtacctcaccggattatgtccacattcagctctagtttaagacaacccaaaacaaagatttaaacaaaggaacaaaccaaagagagtcaaaaacatagacaagaacagaactggtatattagttacctattaaaagtctgaggctttggataatgaatccgagtaacaaagcgtagcgagtgagaatcaataggactagtttggacaagttgggaggtttggaagctgacattacttaactgttttaagcaaacagcgcaaatgtagagaccacaaaccatagcaaacactaaaacaatcatccttaagaataatggtgatttctttggttgctttataacaatcgctgcactgtcctgttacaaacaacaaccaaatcaagagtctttagttgcctagagaattgattttaaaaccctaaatcaaactatttcaagtgaatcttcttccttaattgctctctctagggcttttgttggctcttcgttttcttgtttcaaatagaaacaacactttggttcaaaattaagtcggaatcaagaatatgaaaacacagagcagacaagaatctactgctaaaccctaaaccaatcacattcatttacaacggagaaataacagagagactcaaaaatcatgacttttccttatgaaatctttgcaaaaaacagaactttttggtagattccattgataaaacatacatgcagagatacccagaagcttaatcacaaaaagagacacgagagagagagaaagaaagagaagaaccttgccgaataaacagatatactccgccattgaagcttctagaagcttatgaaacagagataatgttaaaagcagaagctttttagatacagagacgagattacagattcatgaatccacttcaagctacagagaatctaaagaagaagaagaaggtaaaagagttcaaagcaagttgtgttctgagcaaaagaaagattttgtaatattataaacgtggaaagtagagccattgtcattaaaacatggggactgtcctttttttcttcttcttcgctacttaatctcagtaattaattactacaaacctaatttacaaaatttggctaattttatccacaaattcaagatacaaaagtgttcagattaggaaattattaaaagctttttaataaattgacttgttgatactatttctcatttggtgtcattacgtaagttcccttattaatatgtttaagtagaaacttagaagttgactataaattagttaaaaaggttaattatgaatttgattatttcaaatttattttatgaatgaaatttaaattaaagtggagacacaatatcaattaaaagagagagccactgtgtcacgcgtgaccgtccgttctgaaacgttacacttttgactttatttcttgtttaatatatagttttgtttttgaataatatcgtttagtatatatagtttttgcttcgtaattactctaaacttaaaatgaatagttgttggtctcttgtttacagctttacattaatagtagtgatactttacactaagaataataatgaaaaatgattcttccatgctgagttactgtattaaatttgattaaagtcttttataatatactacatattgatacgaatcattaggttgtctttatttactaaccttgttttagcggaagttattatgtcccttttcatctaactatatttatctaatttatctatatttgatcatttagtttatgattgatctaatatatttattcattgaacgaatcttgttggcaaacagacttaaatttctgaagcgggatgagaaggaaagagacttttgaagtttctcgcgtacgattttaattgattaataatgttgttagtttgaaagtgttaatcaaaatacatagtaaaaagaatagttgccatataaaaaatttcttttaaagatcctaaacacacacagaatattcaatctttttgttatattattatatatataaaagataatacatttttcatataattaaccactaaaaatacaaacgcatatatgaccaaaaaaaaacgtttagaaacacaatgacacataagagttcgagctgccgacaccgtacgttacaacttataactggtcggcttatcaaaccgaatcaatagtgtttatttggtctttacgagataacatgtaatagtaacgactaaaaaacgtaatcggagtataagctttgttaatacaaaatagtgtataaccaggtttgtcgcagtttgagacggtcgtccattgatgatagcgccttatttgagcaatcctatttattttagcctgagggctagtgtgattccatgcgtccatatttattgcaaacatacatgatacatggtaaatagtaaatctatatcaaaatttaaccctaaaacatacttaatatacctaactttttcatgtgagttataaagccatataaagttcaggttacatctctagtctctactctctacatagttatcatgtaatatatcattgttattgttaggcatgaaaaaattatcattatttaggcttaggcatgctatataatttgcatagcatcatcatacacataataataaagtacaattgtccatgttatacttatatatatacatagaggaaaactttaaaatattgcaaaagcagcctccattatcacccaccaaattagttcttttcttacacaccaaattagttttactagtttatttcatcgttttgttttagaggatagaaaatgtattagttttcttgttctacaaagaagaaaaagagaagaactttgtttatttgatattgtcctgtacttatttgtttgaatattcctaacaaacgaaaaggattttgagttggtaccacatggttcaagtctttgaacatttgagtgggatccaacgtggctctcatcgatgtaggaatcaaatggtgcgagtcattttggtcgacacttggaagtttggtgatctcgtagatttgtcttattaagttgcgatcttagttaattggctaacatagttttcatttttgctaattgtcatggtcttttctatacaaaatttgtctcaaaagtgaaaaatttcaaaaaaattgttgggtttgttgagccatgtcaagtgttttgtaatttttttgcattgctgattttatcccgcataagatttgtaattttgtgagctgaacaaaaaaatgtgtttgcttttgacccaatgaaatgattatttaggcccagtaaaactaggctacaagaataaaattgtagattctaactgttggacccataaaatcaacgaagcaggcccaataagctgatatttgaaaaaacccatgtcaatttcttgattcgaacggaagttacaagctcattttgtatattaaaaataaaagcccaatactctatcacggaattttatctttatttttgaaaaaatttcattctgagaaaaaacatatacatatataattcgaaactatattccgagattatatatggtcatcagtctctccagagaaaatgtaattttagtatcatgatatttttcgtcaattttggacattttagaagaaaagcacaacatgcaaatgattttgttttgttttgtgcaatacaatatgcaaatgaaagtaaaaaagaaaaatttgaagttcacttaagaagtttgtttttctgtaattatgtattattctgaagagaacataatgataatgtccaagaaaaaaaagaaaaaaaaaaagattccaggcagagtagataagccagtcgttagaagtcaaatcaaattttcataatttatcaactctatatattttcttatatagcaagtcgaatcatatttttgtcgttatgccttgtaacaaacacatacaacataattgaatgatgagagacatatgtacaaaccaatgatactttaaaaataaatgaaatatgtgaggaagaaaaagagacacgatgtctaacaaggagacaatctatacaagctattaatctgcaaagtataagaacaagacggctaaaaacgttagaaaacaaaatggtaagagctttcagcaatgaaaaaaatggtaaaatattaagaaattgtcttttttttttttcataaacccgatcatagatccggtcagccgtagtaaaaacttaacgaagtgcttcagactggagttttctttaaaggttccgattaatgtcactagaccataactctacgggtgattaagaaaaaactaaaacatgtaaaagagaatgataagataaaaagttttatatattatattgtttttgttcgggtttagtgtggttgtaagatggtgatcaatcacaattgtcattttagaagaacaagaagattggacacgtggcagaaaataaagaacccataattaagtgtccacgtggtaacccctaatagacaacgatggaccatgaagaaaggcacacacgttaagatcacttcgactcgaagttcatttactctacccatcctaacattacgacaccatttcgttgtcctttcttctccttcccagttcccactattccactaaccaccaaaaatgcattttcctctttacttctttatcaatttattctttcttatacataatttaactatctgtttttgtgtttgtgtttgcttcatgttggtttacgcttgtgcggttcatgtttgtgatttctttataattattgtccgagtaggatttttatgttcttcgctcaaaccgctagaccgatgatcttaaattaaagaaaaaggaatagatatatcttatataatatgacaaagttttttctaacttttcctaagctaagtgatgttatatatgatagttcgaaattgtatcccataagctaagtgctcaacattttactggagttcggttataattaaattttgcatcaggcaaaaccatcgatcgatgtatgtacgaagagtcttcatgtttgatattttattctgatgtcactctcctattcattcgttttaagaaaaaataaaatcagccaagcaatttcaattgttatttagatattacaattacattaccttttttacatgcatttataaatacgtatactaattaggtagacgtaaatgtgtttgatttttggggctctagctatttgcatagcttctaacatctaaataaattgtagcttgtcctcttctgcttgtgagtgagatgtctgaagctaaggagatgggccaaacccataacaaatcaagtccaactataaagcctggtcaacaaatacagaagatgacaaagatcaaaagctgtctctcatccgtacatgtacctgcaggaaacattgaaagagaaaggaagacgctcctctaaaactaattcaatcctctttcatccttatctaataaccaaaaattacatacatctgtatagtgtcgagagtgttctagatccttctccctcaatctctataaaaagaagaatgtaatctcattgtaattattattgaaaaacagagtaatattattaaaaggttcaaattttctcttctttctcatggtatcagagccattctaaactctcacaggtccaaaaatggcagatccatacccttttccggacaatgtccatgtctctagttctgtaactctcaagctcaatgactccaactatctcctttggaagacacaattcgagtctttgctatcttgtcacaaactcatcggctttgtcaatggtggaatcacaccaccaccacgtactctcaacgtcgtcacaggagacacctccgtcgatgtcgcaaaccctcagtatgaaagttggttctgcactgatcagctcatccgttcatggctttttggcacgctatcagaagaagttctcgggtatgtccacaatctccaaacctctagagatatttggatctccttagcagaaaacttcaataagagcagtgttgctcgtgagttcacgctccgccgtactctgcaactcttgtcaaaaaaagacaaaactttatcagcgtattgtcgtgagtttattgctgtgtgtgatgctttaagttctataggcaagcctgtggatgaatcaatgaagatctttggttttcttaatggtctgggaagagagtatgatcctatcactactgttatacaaagctctctgagtaaaatttctccaccaaccttcagagatgtgatttccgaggttaaagggtttgatgtgaagctccagtcctatgaagaatcagttactgccaatcctcacatggctttcaacactcaacgtagtgaatacacagacaactacacttccggcaaccgtggtaaaggtagaggaggctatggtcaaaatcgcggcagaagtggctactctacgcgtggaaggggtttctctcagcatcagacaaactccaataacacaggagagcgtccagtgtgtcagatctgtgggcggactggacacacagctctaaaatgttacaacagatttgatcacaactatcaaagtgttgatactgcccaggccttctcttctctgcgggtttcagacagttctggtaaagagtgggtacctgattctgcagctacagctcatgtgacttcttccacaaataatctacaagctgcatcaccctacaacggcagtgacacagttcttgttggcgatggagcatacttacccatcacacatgttggatccaccaccatttcttctgattcaggtactcttccactaaatgaggtcttagtatgtcctgatatacaaaagtcccttctatcagtatccaaactatgtgatgactatccttgcggtgtgtattttgatgctaataaagtatgcattattgatataaatactcagaaagtggtgtcaaagggtcctcgaagtaacggtctatatgtgttggagaaccaagaatttgtagccttctattctaatcgacagtgtgcagcatccgaagaaatatggcaccatcgcttaggacattcaaattctcggattcttcaacaactcaagtcaagcaaggaaattagtttcaataagagcagaatgtcccctgtttgtgagccttgccagatggggaaaagttctaagttacagtttttttcttcgaattctcgtgagttagatcttttaggtcgaattcattgtgacctttggggcccctcaccagttgtatctaaacaaggtttcaagtattatgtggtgtttgttgacgattactctcgctactcatggttttatccattaaaagcaaagtcagatttttttgcggtatttgttgctttccaaaacctggttgaaaaccaatttaatacaaagatcaaggtgtttcagagtgatggaggtggtgagtttacaagtaacttaatgaagaagcacctaacagactgtggaattcaacatagaatctcttgcccctatactcctcaacaaaacggtatagcagaacggaagcatcgtcactttgtcgagctcggtttgtcgatgatgtttcacagtcacacaccgctacagttctgggtagaagcgttcttcactgcaagtttcctaagcaacatgcttccctctccgtcattaggcaatgtaagtccccttgaagctt

SEQ ID NO: 94 - DNA, 84196 bp, Arabidopsis thaliana
aagctttgttaatacaaaatagtgtataaccaggtttgtcgcagtttgagacggtcgtccattgatgatagcgccttatttgagcaatcctatttattttagcctgagggctagtgtgattccatgcgtccatatttattgcaaacatacatgatacatggtaaatagtaaatctatatcaaaatttaaccctaaaacatacttaatatacctaactttttcatgtgagttataaagccatataaagttcaggttacatctctagtctctactctctacatagttatcatgtaatatatcattgttattgttaggcatgaaaaaattatcattatttaggcttaggcatgctatataatttgcatagcatcatcatacacataataataaagtacaattgtccatgttatacttatatatatacatagaggaaaactttaaaatattgcaaaagcagcctccattatcacccaccaaattagttcttttcttacacaccaaattagttttactagtttatttcatcgttttgttttagaggatagaaaatgtattagttttcttgttctacaaagaagaaaaagagaagaactttgtttatttgatattgtcctgtacttatttgtttgaatattcctaacaaacgaaaaggattttgagttggtaccacatggttcaagtctttgaacatttgagtgggatccaacgtggctctcatcgatgtaggaatcaaatggtgcgagtcattttggtcgacacttggaagtttggtgatctcgtagatttgtcttattaagttgcgatcttagttaattggctaacatagttttcatttttgctaattgtcatggtcttttctatacaaaatttgtctcaaaagtgaaaaatttcaaaaaaattgttgggtttgttgagccatgtcaagtgttttgtaatttttttgcattgctgattttatcccgcataagatttgtaattttgtgagctgaacaaaaaaatgtgtttgcttttgacccaatgaaatgattatttaggcccagtaaaactaggctacaagaataaaattgtagattctaactgttggacccataaaatcaacgaagcaggcccaataagctgatatttgaaaaaacccatgtcaatttcttgattcgaacggaagttacaagctcattttgtatattaaaaataaaagcccaatactctatcacggaattttatctttatttttgaaaaaatttcattctgagaaaaaacatatacatatataattcgaaactatattccgagattatatatggtcatcagtctctccagagaaaatgtaattttagtatcatgatatttttcgtcaattttggacattttagaagaaaagcacaacatgcaaatgattttgttttgttttgtgcaatacaatatgcaaatgaaagtaaaaaagaaaaatttgaagttcacttaagaagtttgtttttctgtaattatgtattattctgaagagaacataatgataatgtccaagaaaaaaaagaaaaaaaaaaagattccaggcagagtagataagccagtcgttagaagtcaaatcaaattttcataatttatcaactctatatattttcttatatagcaagtcgaatcatatttttgtcgttatgccttgtaacaaacacatacaacataattgaatgatgagagacatatgtacaaaccaatgatactttaaaaataaatgaaatatgtgaggaagaaaaagagacacgatgtctaacaaggagacaatctatacaagctattaatctgcaaagtataagaacaagacggctaaaaacgttagaaaacaaaatggtaagagctttcagcaatgaaaaaaatggtaaaatattaagaaattgtcttttttttttttcataaacccgatcatagatccggtcagccgtagtaaaaacttaacgaagtgcttcagactggagttttctttaaaggttccgattaatgtcactagaccataactctacgggtgattaagaaaaaactaaaacatgtaaaagagaatgataagataaaaagttttatatattatattgtttttgttcgggtttagtgtggttgtaagatggtgatcaatcacaattgtcattttagaagaacaagaagattggacacgtggcagaaaataaagaacccataattaagtgtccacgtggtaacccctaatagacaacgatggaccatgaagaaaggcacacacgttaagatcacttcgactcgaagttcatttactctacccatcctaacattacgacaccatttcgttgtcctttcttctccttcccagttcccactattccactaaccaccaaaaatgcattttcctctttacttctttatcaatttattctttcttatacataatttaactatctgtttttgtgtttgtgtttgcttcatgttggtttacgcttgtgcggttcatgtttgtgatttctttataattattgtccgagtaggatttttatgttcttcgctcaaaccgctagaccgatgatcttaaattaaagaaaaaggaatagatatatcttatataatatgacaaagttttttctaacttttcctaagctaagtgatgttatatatgatagttcgaaattgtatcccataagctaagtgctcaacattttactggagttcggttataattaaattttgcatcaggcaaaaccatcgatcgatgtatgtacgaagagtcttcatgtttgatattttattctgatgtcactctcctattcattcgttttaagaaaaaataaaatcagccaagcaatttcaattgttatttagatattacaattacattaccttttttacatgcatttataaatacgtatactaattaggtagacgtaaatgtgtttgatttttggggctctagctatttgcatagcttctaacatctaaataaattgtagcttgtcctcttctgcttgtgagtgagatgtctgaagctaaggagatgggccaaacccataacaaatcaagtccaactataaagcctggtcaacaaatacagaagatgacaaagatcaaaagctgtctctcatccgtacatgtacctgcaggaaacattgaaagagaaaggaagacgctcctctaaaactaattcaatcctctttcatccttatctaataaccaaaaattacatacatctgtatagtgtcgagagtgttctagatccttctccctcaatctctataaaaagaagaatgtaatctcattgtaattattattgaaaaacagagtaatattattaaaaggttcaaattttctcttctttctcatggtatcagagccattctaaactctcacaggtccaaaaatggcagatccatacccttttccggacaatgtccatgtctctagttctgtaactctcaagctcaatgactccaactatctcctttggaagacacaattcgagtctttgctatcttgtcacaaactcatcggctttgtcaatggtggaatcacaccaccaccacgtactctcaacgtcgtcacaggagacacctccgtcgatgtcgcaaaccctcagtatgaaagttggttctgcactgatcagctcatccgttcatggctttttggcacgctatcagaagaagttctcgggtatgtccacaatctccaaacctctagagatatttggatctccttagcagaaaacttcaataagagcagtgttgctcgtgagttcacgctccgccgtactctgcaactcttgtcaaaaaaagacaaaactttatcagcgtattgtcgtgagtttattgctgtgtgtgatgctttaagttctataggcaagcctgtggatgaatcaatgaagatctttggttttcttaatggtctgggaagagagtatgatcctatcactactgttatacaaagctctctgagtaaaatttctccaccaaccttcagagatgtgatttccgaggttaaagggtttgatgtgaagctccagtcctatgaagaatcagttactgccaatcctcacatggctttcaacactcaacgtagtgaatacacagacaactacacttccggcaaccgtggtaaaggtagaggaggctatggtcaaaatcgcggcagaagtggctactctacgcgtggaaggggtttctctcagcatcagacaaactccaataacacaggagagcgtccagtgtgtcagatctgtgggcggactggacacacagctctaaaatgttacaacagatttgatcacaactatcaaagtgttgatactgcccaggccttctcttctctgcgggtttcagacagttctggtaaagagtgggtacctgattctgcagctacagctcatgtgacttcttccacaaataatctacaagctgcatcaccctacaacggcagtgacacagttcttgttggcgatggagcatacttacccatcacacatgttggatccaccaccatttcttctgattcaggtactcttccactaaatgaggtcttagtatgtcctgatatacaaaagtcccttctatcagtatccaaactatgtgatgactatccttgcggtgtgtattttgatgctaataaagtatgcattattgatataaatactcagaaagtggtgtcaaagggtcctcgaagtaacggtctatatgtgttggagaaccaagaatttgtagccttctattctaatcgacagtgtgcagcatccgaagaaatatggcaccatcgcttaggacattcaaattctcggattcttcaacaactcaagtcaagcaaggaaattagtttcaataagagcagaatgtcccctgtttgtgagccttgccagatggggaaaagttctaagttacagtttttttcttcgaattctcgtgagttagatcttttaggtcgaattcattgtgacctttggggcccctcaccagttgtatctaaacaaggtttcaagtattatgtggtgtttgttgacgattactctcgctactcatggttttatccattaaaagcaaagtcagatttttttgcggtatttgttgctttccaaaacctggttgaaaaccaatttaatacaaagatcaaggtgtttcagagtgatggaggtggtgagtttacaagtaacttaatgaagaagcacctaacagactgtggaattcaacatagaatctcttgcccctatactcctcaacaaaacggtatagcagaacggaagcatcgtcactttgtcgagctcggtttgtcgatgatgtttcacagtcacacaccgctacagttctgggtagaagcgttcttcactgcaagtttcctaagcaacatgcttccctctccgtcattaggcaatgtaagtccccttgaagctttactaaaacagaaaccaaattatgcaatgcttagagtgtttggaacagcatgttatccctgcttaagacccttaggagagcataagtttgagcctagatcactacaatgtgtatttcttggctacaattctcagtataaaggatatagatgtctatacccacctaccggaagagtgtatatctcaaggcatgttatcttcgatgaagaaacatttcctttcaaacaaaaatatcagttcttggttccacaatacgagtcctctcttctcagtgcttggcagtcatctataccacaagctgatcagtcactcataccgcaagctgaagaaggaaaaattgaaagcttagcaaaacctccatcgatccagaagaatacaattcaggatactacaactcagcctgcaattttaactgagggagtattgaatgaagaagaggaagaagactcctttgaagaaacagaaacagaatctctgaatgaagaaacacacactcaaaatgatgaagcagaggttacagtagaagaagaagtacaacaagaaccagaaaacactcacccaatgacaacaaggtctaaagccgggattcataaatcaaacacacgatatgcacttcttacctcaaaattttcagttgaggaaccaaaatcgattgatgaagccttaaatcaccctggttggaacaatgcggtgaatgatgaaatgagaacaattcacatgttgcatacatggtcattggttcagcccacagaagatatgaatattttgggatgcaggtgggtgttcaaaactaaactcaaaccagatgggtctgtggataagctaaaagctaggcttgttgccaaaggatttcaccaagaggaaggtctagactatcttgaaaccttcagtccggtggtcagaacagccactatccgtcttgttctcgatgttgctactgctaaaggatggaacataaagcaacttgatgtgtctaatgcgtttcttcacggtgaattaaaggaacctgtctacatgcttcagcctcctggttttgtggatcaagaaaaaccttcatatgtgtgccgtctcaccaaagctttgtatggcttaaaacaggctcctagagcttggtttgacacgattagtaactatcttcttgactttggtttttcttgcagcaaatcagatccttctctattcacatatcacaagaatgggaagactttggtgttacttctatatgtagatgacattcttctcaccgggagtgatcacaatctacttcaagagcttctcatgtctctcaacaaacgtttttcaatgaaggatctgggcgctccaagttatttccttggtgtggaaattgagtcatcaccagaaggtctcttcctccatcaaactgcctacgctaaagacattcttcaccaagccgcaatgtcaaactgcaactctatgcctactccactacctcaacacattgagaacctgaattcagacctcttccctgaacctacttacttcagaagtttagctggaaagcttcaatatttaaccatcacccgacccgacatacagtttgctgttaacttcatttgccaaaggatgcattctcctactacagcagattttggtttgctcaaacggattctgagatatgtgaaaggaactattcacttgggcttacacatcaagaaaaaccagaacttgtccctcgtagcttacagtgatagcgactgggctgggtgtaaggaaacaagacgctcgacaaccgggttctgtacactacttggatgcaacctcatttcgtggtcagccaagagacaagaaacagtgtcaaaatctagcacagaagcagagtatcgagctcttacggcagtagctcaagagcttacttggctgtcttttctgcttagggatattggagttacacaaacccatccaaccttggtgaaatgtgacaatctatcagcagtttatctaagcgccaatcctgctcttcataacaggtctaagcactttgacacagattatcattacatcagagaacaagttgctttgggtcttgtggagacaaaacacatatctgcaacgctgcaacttgcagacattttcacaaaaccgctaccaagacgagccttcattgatctcagaatcaaacttggtgtagctgaaccacccaccacaagtttgagggggaatgtgagtgagatgtctgaagctaaggagatgggccaaacccataacaaatcaagtccaactataaagcctggtcaacaaatacagaagatgacaaagatcaaaagctgtctctcatccgtacatgtacctgcaggaaacattgaaagagaaaggaagacgctcctctaaaactaattcaatcctctttcatccttatctaataaccaaaaattacatacatctgtatagtgtcgagagtgttctagatccttctccctcaatctctataaaaagaagaatgtaatctcattgtaattattattgaaaaacagagtaatattattaaaaggttcaaattttctcttctttctcactgctagctcaccatcatgccaattatcaatagatgtgtatatttattacaatttggtccatttggatacagtatcgtctgtatcttacacgaatatgtattatatctagctagcttctcgctatatatagagggtttattaatagtaatacaaaaattgactagcaaatttcagccatatactatctgcggcggattctacaaaaccagttttgttttcactgaaaaactaacaatattaacaatgtagtttttatggggttttcggtttaaactcctgcattctttgtcaatgttactattagttgaattgtgtgtgattttgaatctgttattagtattttgaaaacctacattcaacgatacgtgtgatgactccacaaaacacgacatgtttcttcatttggataactggatctcatatcattcaaacaacctttttatggttgaccaatcattcattagaagatgattatatatatgttatacgtaccaataatgttgatatatttcgtaagctaaattaaagcaaggcatgaaagtttattttcttttcattacataagaaaaggtatacgaaaaccacgtgaatgatgcatttttccatgtcttttatcaatttttgatgtaaaatcatcgaagaagaaagatgaatcagctttacatatcaattcatatgataaaattcatgaatctcctttcggaaagagagtctttgtagggtaattggaggagccttgggaaatccatggggagaaaaagaaaaagttcgacttgagaaagtgatctgctttctttccccactataattgagttgcgtgaataatgtttaaaaagtatacaaaaacacattactttatttctttttattgattagaagagaaatataacctttttcccttccgttaattaaataaagttgtcgtcagctttctttggcatatgaagttatgaactttatttaataaaatgtttgtttttttcatgtgttgcctaaaacataaatcatcattctccagcataaactcgaacatgcatggacacaagagcttagccttgaacactcccaaaaccaattttttacgaacttagactttaggtaaaattttaattaatgcaatttgataatattcttaatgtggacctttcttagtaagtttatgagtcagagtaacgttaaagtttccaaattccaatcattcattgactgcttacatataatggggaaggacatgttcattactacaatttaatcttcttaatttcttgtgaaatagacttcgtacttcatttttaaaaaggaaaaaaaatgaaattaatcctgtttttctctgaatagttagtagtttatcaacttatttcttttctgttttgtcttttacggtaattaagtcgatcttgttttatgttcaaaacttcaaatactaaatacataaataccataagaactcttgtctaattcataaaaggacattattggggtcgcataaacatatgtaaatcagatcgagaaatcagaatatatatacattttagcttgatcaatttaattaatgttttagttgggaatatatttagccttgctttgggtccacccacctccatcaattatcattcttttatctttttgttttgacaatccaacagtggttgtgaatcatgtggtagcttcgcacctatacatgatccccacaaattgaatttataaattacgttaatctcgtaagaaacagacaaaactatgaaatgtcatataactaaggttccattcttcgatcagataaaataaccaaaaaaaaacaaaaaaaaaactacactcgatcacgcaagtaacaaaaaaaaatgtgaagttaaaggtttttttttactcaacataatactttactacttatcactttactcgttaatcaaacactcatactaacgactattttaaacttaagccatcttcaaattttagaaatggagaaacggcaattttgcttcgcattttggtctacactatatacggttttaagtcattttgctgtatttttatgtactcaagattaaactgcattcttctacactataattgtaaatgattatgaaactctgaatcagtgactgtctttttgatataactgtaagaaaacgatagaaagtgctttggagacttttttttgttttgttaaagggtttaagtgctttggagacttgtagtaacatttatacgtgattacaaattgtgatcatgatatagactttatggattataaaatttcgtgcccacacaatacaaatcactaaagatcccatgtgcccttgtctgcattcacttaagtctttttcgtttttattggatatcttttccatctagaaagatatatttagatgtgttgcaatttcacttttcatgataggcacagtctttatgtatatttggataaaaactgggacatatctaaaagtaatgttttacgataaatactatcacaatttaaatcgaaaattatccttcaaaacgaatatcaatatgtattcattgagagattttaaaacttagggattcatttgttggtactagcgtttaagttttcataattaagaactacggatgtatacatagatatatgataattttattttcgtagtaattgttatgataatctttgttcttttgaagtcaacaacatatattatgcgaatttttaaactacattatatgtttagctcactattttattttgaatatctcataagtatgtatatatacttacacattgttatagtgagtgtaaaaaagagagagacagtttagtaatgattgagtatgcagctcgtgggcacattattaaattgaatggtatgatggatatgcgcagacactgtcttgtgtgaactcaagaatcgatacagaacgacggcattaaaaaaaaagaaaaaattcaatataagacgaaaatgatgatggaaaaaaattcttttatttttaccaacgaaatgtatgcgatatgaactagtagtatttaattcactgtgtgaattagtagtaatatttaagcatgtgaatatgtttgtgtacgtattgtattgccacaacaaaacagcatgtcgcagcattgatttcattatcacctaaccgttaaatacgtcatggccctagacttaatgtattttagacttaatgtattttataccttattttgatatgtgtacggtcgaccccctcacaaaattgaaatattacgactatgcattgaaaaactatacacaactacattgtcaaatactgataagatcttaacacagaaacacatattatcactaataatgtaacgtgacaacattacattgctttacacacattttttttaatctatttaagatgattggatgatattgtcatttttctctataaatctaagatttttattgtctttataatctaaattcgcaattattacaacaaaaaattatcaaatctaaatttatttttaaaatccacgataattattctcattctatttcattggaaacaccaaccaattattttaaaaaacagaaaacatattaattaaaaaattgaattcaaattctatttaccattctaaaaaaaaaattatgcactgattctgtaaacgttgacaccgttaacgtagtcgtagatatgcactgattctgtaaacgttgacaccgttaatgtaatcacatcgaataaaagacatatgttgatcgtgtaaaggtataagatactcgatctataacatcgttgtcaaattccatgttgcatatacattatattgctttacacacatttttttatctatttgatcgtctgtgaattaatatgataatttgatggtattattgttatctttataatataaattcgtaattattataacaaaaaataaacagttttatcttaatatccacaataattattttcattctcgttgatttattggaaaagccagccaattatattaaaataaataaaaacaacatattaattcaaaaaaatttgaattcaaaaaaatttatcattctaaagtaactagatatgcactaattgcactgattttgtaaactttgaaactattaatgtaatcgtaacgaataaaagacacgtatcaatcgtgtaaggtataaaatactcgatttttaacggcgccgtcaaattctccgttacatattaaaagaattactattcctacttcacacgaggctttatatgaaaatgacaagagttaatcgtggccgttaacaaattacgatcaaaacgaagatcgtcaccatcttataacagaataacccaaatggtacgcgagctagagactctctagtagagagaaagagagagaaacacaaacacgcacacataacgagtgattttagagagagatagagatctggaaggtgacgtcgtaggagattatggcggcggttaggagaagagaacgagatgtggttgaagagaatggagttacgacgacgacggtgaaacgaaggaagatggaggaggaagtggatttagtggaatctaggataattctgtctccgtgtgtacaggcgacgaatcgcggtggaattgtggcgagaaattcagcaggagcgtcggagacgagtgttgttatagtacgacggcgagattctcctccggttgaagaacagtgtcaaatcgaagaagaagattcgtcggtttcgtgttgttctacatcggaagagaaatcgaaacggagaatcgaatttgtagatcttgaggtgacaacgaaagcattatttatcgaaactgaattttgatttacagattttgaaatttttgaattcgtttttccaggaaaataacggtgacgatcgtgaaacagaaacgtcgtggatttacgatgatttgaataagaggtttgtttaatttgttacagatattaaaattttgaatcagtaacaaacatttctataaaatgtctttgatttttttgtgtatagtgaggaatcgatgaacatggattcttcttcggtggctgttgaagatgtagagtctcgccgcaggttaaggaagagtctccatgagacggtgaaggaagctgagttagaagacttttttcaggtggcggagaaagatcttcggaataagttgttggaatgttctatgaagtaagttttttttttttgattcaaatcttttaatcgaatttttgaaactgataatgaatttgttgttaggtataacttcgatttcgagaaagatgagccacttggtggaggaagatacgagtgggttaaattgaatccatgaagaagacgatgatgataatgatgatcattgttttcaccaaagtacttattatttctcttctgtaataatctttgctttgatttttcttttaacaaaatccaaatgtagatatctttctctcgaataatcaataacatgtaattcaacttttgtttgtacttccttgaggtaattaattagattcgtgtttttctcgattaataaactataagtttataactctaagagtaattataattgttactgaaaactaaatagcttctattatttctatgtatcaattatcatacagtatttgattttttttttttaacaatgaaaagagagtgtagagcagaacaaaaaagggtcacggctgacgtggtaaaggaatataactgtttattgatcaggctttttcagtaaaaaagttactattttattctcacttggattggattgtaggtgctactctagtgattaactacgaacttgtttgtgctttacaagttattaaactaaaatattgtactatctccttgcattttacaaatttagctatttgaaattatatattttttaaaaataaaatagcttaaatatacacttccagtttttccctctcaatttctttcaacaaagtaactattttgagttgtattattttattttcctaatttatctatctaatataacatggatattagatatggttggtgtacctaacgcctataatttatactcgattagcaacaaccaaaaaaaagaagaagaagaagaagaagttgagtcatttaaatctctgtaagagaaatgatttacggtctttaaaaactagtcctggaccaaaaaatggacctaaagatcagaacttatttgtttagaaaaatgaagttagaatgaagttgagtcatttaaatctctgtaagaaaaatgatttacatagttaaagctactcctggaccaaaaaatggatctaaagatcagaattatttgttaaaaaaataaaaaatacagatagatatgattggtgtttatttccgggtcgctttctacgagtaaagaaatggtcaatcacaaatcttttcataccaaactctgccattattacataactctcttaatttcctaaaccaagaatggctttattattaactttttcctcctttaattttggtctctccttttctacggagtacttttttttgtttgtcattattatcactcttactttaaaaatactagaactcaagattcaacgagaaaattcagaggttatgattaaaatgtttaaaactgtcgtactgtactgatcggttaaagaaactgacacaacacaaagatgcgagaatgtacactaaaacccacgaggcaaagattttactcttttcttgtttcttcttttttgtttttgtcaataagtggtaaagagagctggagtctttttctccacttgttcgtttttatgagttggactctacgggcccaatatagagattcctttgtcaatcttgtgttccacagaacaacaagtccctttaaaattattctgagcccattcatatgatcatatatcttccttacattattatttatatacaaaatttcgagaaactgaattctattagaattggatctttctttgcttgttcacaattgacaaaagcttgtttctaataccatacgcatcttttattgattaagtaattaaacagaaaatttataagtattgttcttttcgaaatatggtgatgaactgatgatgatatacattttgatcttagtacatttgttcaaacaatgcagtacatttttttgactcaggtcctatatgtttcattacctatttaaagtgcatcatcatatacatcaccaatgataagttgataactacttataacgagagtagtcactgtgttagtaattaagtaccatgtttctatatactttgatcatctgataaacaagtgttcacaatcaggtttctattcctccggttatcatcttcaagggcatagatcgagtaacaagaaacataatcactgcaagacataagcgcaaacgattccgcaacttgatgcaactttggatacgatgaatctctttcatccattttcctaattattttgtctccttgttttatcttttttgccaaggatacaaatttaagggctcctactttgtaaagccaaaccttttcatttttaatgatattaacattcataacaaaaaaaacaagtgttcttcaacttcattttcaacgaatgagaggaataaatacttcagaacaagtcctcacgcacatactattttgattatgctaaatacactaaaccatcaaattaaagtgggaaaagaagtttaattggtcgatatgaatatatgataataagtggtacgtgagacaagtgcatgcagacaacttataactaaaagtgaataaaaagaaaaagtattacacacaaatcttcactggcattaaaaaatagagatgttccacaaaatgattgattccacaaacaaaacaaaaacttacaagaacaacaaaacacgtgagcgagaagagttgttgtaacttggaaccatctttgtccaaagaccttttagatacagtcaatctagattatcataaataatctaaattaatttctagaaaccaaagtgggagctctaaactttcttcatcttgtatctgcaacttgacactccctcgttgcaacatttcctgatcagtccaaaagattttcactagctcatattagtattggtttgggaatctccggttatccaaagaagaataaaaatttcaaaacagaggattgtttttgtttgtatacctgagattattttgtgatcttgacttaacacttcctcattgactttatcagtcttcttagatctaacatgggtcctcttaagtcccaaaagctccctccacgtgccctttgtggaaaaggatgaagaagacaacaatattggcctgagggagaaagtgttaccatcgaccatagaaccctcctcttcagtaagaagctcttctcctaaggtcctatggacgtgactggtctccttaaaaggtaaaatctttcctttgaggaagatttcatcggcgggaatcatcgagtaatcggtgactgagaaagcgaaatcagctgagggcatggagaaagagcttctcgagttgatgttgttgctcttagcattactcttctccgatctgatctcgacaaactcgttagaaaaagagattctagcagcaccattcatggagttgtgcatttctaagcgtgccatttatgtttttactcaatggcatatagaatgagagatctaagccattgagttatatataggataagaagttggaatgagattattaatgtccaactcatagatccatcaagcttgatctatatgactatattctatatacgaatatttgaccgagagattctagcaaaaagtgttttataatagaaccaaaaaaaataatgttgtagattatcattcattggcaaaatgttgttgatcttcgtatcttgaaggagttaaagatcacatggaggcacgtgagaaactatccatttgtcctctgttatttcttgttctattgcttaccatcaaacatactactaactcagtgatatgtcgacaaatatgggcataaaatgttgtattaatatctatttacatatgaggtaacgtgcagtcaaaggaccaaggttgtcaatcatgtgcttggaagttccattgaacattgtttatcccacacgtcgtcgtgatgcgactccgctcatgaatgattggtcaaaaaaacagtttcatctcattataggaaaatatcaacgcatcattgcttgaaccttttttcttagagaaaccggtaaacattatttcatggcttgcaatttcatcgtctaagttgaatttcatatcatacatagtctgctcgatatccaaaggtgttagtttccaccaatactttagttatttgtaaatgaaacgatttacttttaattttatgatgtatgtgaagtttagaagtttctaactcaaaatcaattagttataaatggattgatctatatattactttatagtctatatcattttcgatttctaattcaaaagcacttaaaatgagtggattagatcattttttttttaatttttatttcaggtatcatcacacttatagatgttggattcctaaccatgattttctaaaaaatgaaaaatcaagctggcaaattgtaagcaattagctgtgaagagtcaagacttggttgggttatttgcaaaatacttctatgtattgtttttgtttgtggctaatataaataaaggaatgggacagagattaggcctgtttattttgggccaagcataaacagagtgggcttttatcttcgttagggaagtaaaatttactatcagactcacagacagagtcagagtagtggctgagagatataggaaatggggaccaaaagaccactgaagaagaaattcgagagttgacgtcatagtggcacgtttgaagttcgaacaaagagaaacaagactgacacagaaagattgaaatacttgtcagtgcgccttcgtatttttggcttttacttcactgacaaataattatgctcctattttattattcagtgaatggtacagaaaacattggtatataattttcatgaagtaaacaaaactatattaggcaagaaaaagtggagacaaaatgatgaaaagggagaagaaatggtgtgttagtgaaagatcttagtgcaattcaaatttcagtctcttttatgggaccataatactctcatttcaaaatcaaacttcatcacctcctttcctcaatttcaggggttaattctagtgtttttttcattcacatgaatttggtttagcttctttcgtttataccaaagaaatctagtcaaatgttacatacaatatatattacaaatgaacataaacgacaaaccatcatcactccaagcactagataaaaaagagtaagagaataggctagagactaattaaacatccaaatctaaccccaaacaattcaattctaaaagctaactcaaaatactagattaacttatcggaccaagtagtcaacgccaagaggaaacggtgaggagaggcacattgttccaagccaaggagatgaaacctggctccgattcaacaagtgaatacaatgtactataattgtagttccatagtagcagcttcgcttggctaaccgcgtaattactcggtttaaccggctcaaatccagctttctccatcaacactctccattgttctttctcctccattaacccaaaccgggttcccggtttattattatcatcatctgatcggaccaaatccataatcctcctaccgaacaacactctctccactctcagcctttctttcgaatctcgatccaaattcggttcaagcgattcaaaaaccgcggaataaaaccggagagagttcttaacccggttagcaaattcaacccggtttaaactgacttcgtattctccaagcgtcacaatcctcgggtttaacgatctagctaaccggagcgccgtaccaacagtcgtcgctgtttcatctagaagcttataaagctcaagcataaaattcacaaccaaaacctcatccgggtcaacccgaaaacttgacccgtttagtaattgaatcggagtcagaaccggataaaactcgaaattgagatccaaaatcgccgcgaaatcacggagacggtttcccgtagcgatcagagacggtcccggtgagtctcctagagacggagcgggtatacccgaaatccggatccgggtgggtttaccagaagaacgggtcgctaaagcttgtaacagagcagaccattgaataccttgaaaaatcccgaaatcgactatgtgaatgttgtttgattgattcgtagcttcgagaattgcttgattcgctgttaaatgagcgaactttgaatatggacatgcgtcgtttaaggttttgtatgagagaatgaaatcttctagggatgacgacgacgatgacgacggagactctgtttctttatgagacagagcttctgcgaagtaatacccgactcgttgtatcgggtcgcctgattcggacacggattctttgatccgaattagtgtgtccggtttagtttccggtttacgtgcataatcgtggatagctttaaaaatcggctggtttagatcaaaatccggctgcggcgggggaggaggaggatgttgtggtgatggcggagatggagaccatatagcggtggaagctggtggcggagggagttgttgactcgctgagtcatctttgttgactcggttgagatatgaaggagcactgagtcgactcgggaatgagacgaatggatcatggccgtagattgggaagtctggattggtttgtgacgcatctccaccgttgatcaaactctccatccactcgtcggagtcaaactcctcggaagcgacggctgcgttttgatgatgctccaggtgtggaaagtgaaaacctgggtcgttggttacttgaaacgggtcggagaaacccgaaccgggaagagtaaacccgaaggatggattgggccaggggttgggttcttgttcttgttcttcttgttgttgatgttgtgattgttgttgctgcttctgtttgatgagttgttgtgctatagccattaagtttccgctgtcggtgcacatatacgccattctccgactcactttcgccggcgatgaaggcgtttttttgtctgttatttggtggtgattgagtaaggcccagagagagagagggatatgaatgaaaccggagagattttagtaggaagaaaaaagtaagaaagtgagtattttcattttgatttatcattttctttttttttgtcatccgatttatcattttcgagtactgtatttttaatcaattaccactttagtttaaaagtacaaaattacgttattaactgcaagaaatgaagaaactataaaaccaacaacaacaacaaaaaatgaagaaactaactaacatagtttactaaaaaactcagttttgtatttaattattttcaagaatttaataatagaaatgtaatttatcaaaatatcaattgaataatttctatatctcatgaatttgtagtttcgtataatcttacaaatttattcagaaaccttttgaccaaaaaataaaaaatacataggtttttttttgttaaataattattaccactctgttaatatgggtaaaaaaaagagttgacgttatgaaaaaaaagagagagtaaaacgatatctcacttatgggacccacagacacgatgacgtcatgtatcggcagttacgtatcgaagagtgtgacctcatctccaccgtctagaatcagatcaatggctttggctgaaatggtgaatgtgacacgtcgacaactgtcttctgctacttgtcacctgcatgtcgcctgcaacttttctgtcttttttcattttaactaacagtattataaaggtaaaaagattgatgtaagaaaagtaaaaagaattaggttattatcttctgctttcaagccgcaaaggtcaaggtttttcaaagctgtttcttatcaactaaaagggtcgttaaattggactttggttaacaaatttcagtgacttcattggtttagtttcagttacttttgtaaaaaaacctttcgacaagttaagctaacatcttgaatatgacttgagcaagcaaaaattaaacaatagacatgttttatttgtatacgcatgtcttttttatctcaacgttagtgttgtggaggacggcttgtgggtccgtaagtaggcccatatacaatggagcaaaagcgatttgtggcgggctctactagtatctgttgttggtggacgaactttgacgaagaaaatgtagtagccattagccaaaagctaaaaattacacaaaaataccaaaaaaaaaacacaagcaaagaagaaacaagaaaagagtccaaagaggattatagaatttaaaagtctttcaataacaaaccaagttttatgaattatcattcatacacgacgcatagttcgagaatttgcttatttgaggtttgagtgtggaagctctttgtgactttgcaatttctaaaaacctaaagcgaatgaaatagaaaagagcaatagcgaacaaaaagcacatgggaacgacacttgactctttgagacatcactcttttcatttcatcgttgtatccgcgtcaaaaggcctacttctccactacttataacttaaatatctaaattacattactaaacatggtatatggtccctggcccaagtctacttttgattttcacttttgacattttttactacaaagtgccatggactgttctaaattggtaatgatttcaacaaggagaatgaagaagatgatatttttgaaaaggacttgtctttgaaaatggcaatcccactttagtgtttaaccattgcacctatctgcaagtggacttggagaaaatagatagagagagagagagaatgagtggtgtatgaaaaggacatgagtaagaatgaaagggtttgatttgtcttttctttctatccaagtcatcggtggggtttcttatgtatgaacaaagagtggcattgagtcatccccaagaaagtctctctatatatttaccatttttgtcacattctttgcttttttttttaaatactaatttttagtttcaactcttaccaactaaaatttacctatttttgtctcctccttagctttttacacttattttcgtttgaacctttaattaaccaaaatatatttactatttgaatcagttaaacagaaattattaagtcagtaagaaaaatatatatttggtgacgattatctcatacaaaacagaaagagacttttcaaatgacaagtggcctgtccaaacactaaacttttgtaccttttattgaccagctaactcactttctcatccaaattttagttagttaaaacaaaaaaatctcaatgcttttcctcgttttctgaatattattcggctaaccagaaaagaaaaaaaatacttgcgggccaaaccacgaaaatcaataaacaagggcttttggttggtaagtctcgatttcatcaccgagggtgttcatgtgaataaacctatacttcaaaatatcgaaccatttcgtctttccaatatctgcaaaattagagacaatcaatcaaattcaaagccatattgttgttaacaaaagagcagtatgatgaacaattgaacatcaatataatttatgaattatctaaatcttctcatttggatgatttcagatcaagtaaaaactttatgggccgtaattatccaacaatatgatgggccgacctaatcgaggaacacggggactagttggcgtaatcagcctccaaatatttggaggcttctgtttttgttttatttaatcatattttatttcactgtaaataaatggataatacagtgtgttaatcaaccatatgtctatctgcactgtttttttttttcttttttcttggcattttaattaattacaattatataatttttggtaaagtacaattagataatttaacgtgtcacctgattacgtatttaaaccctaactcaaccacagatttttttttatcactctctaattgtctcgatcaatccgtcaaaaccatgtattacgagggagaagatttcagcggtaagatatcattatctatctttagggccgattggtaacgactgttaattttggttgtagagactttcgctgtaggaactttgacggtaaaaactttgattataaaaattttgactttaaaaattttaacagtatagactttaacggttaaaatctgataggtaacaccaaaactgtagaaattgtaactgtaaaacttataattttaaataatataaattatagcaaatataactcgaactgtgatataacaactacattcacacaaaaaaactttatggtaaattttttatacattcatatttctttgcttttgcatcaaatgtaatatttgatgttctttaatatacataagtggatcttaaaagaatataaattaaacagtaattataaacatttatcaatgaattccataggaaattttgtataaattacgattttaaaataactaccaaatatataggaaaatagattttaaaagaacaagaaaaaaatcaattataaatcaattagattttttcaaaaaataatttatttgtgaaatgttatgagagtttatatacatattagaaagaagaagaaaaaaactataaactttttatttctttatttctaaagtcacctatacgtgattttcaaaaaatattgaaaacaaagagtttaagaaaaaaagactttaaaggctttaaaatttatgaaaaccaaaaatgtttgattgggttaaaaaaacttttaaaacttctaaaaacttcttaaagtcttaaaagtctaatccaatcaccccgtctatctttcttttctccaaattgtttgttaaaatttcaagattcttgccttcaacaatcatcggaaagaaaaaaagattattttccctcatattttctacccaatagtacaatgacacgtatgagtctcttacaaactctaaaaactttaatttaaggatcgtcccttacattaattatcagttttgatttattttttaactttttcgtaagaattttatgcttaaagactcctatagaaatattattggaggtggtcttaggttcttagcacgcacaatcaaaaacaaacaaatccaaatgagaaagtttatttgtctctaaatttgttgaaaaccatgtttcgaccctccaagaaagaccaaggtaattaaggatattgagtttatatttctctatagtttcactaattactataaaatcttagtattcatccatctcgttttctatattgcagaagcgaagacgacattgttatgggacattgacgattgcccgagtccagatgttatccaatttggtgctattcatgcacattttatgattctcttcgttttcatggttcacactctattattgcttatggtgatgcgaaaaggcttttagatgatgcaagaccaaacataattgagttcaatcaagtacctttaggtaaattttattccacactctcttgatcgttctagtactttgtgtcttgaatcttaactctgtttatacgtatatactagcaagttgtccacaatgagtgaattatatatattcagttttatttttgaatatggaatgatatttacataaaattatatatataatttatctataattgttaatataacgctcgaaaataattaaaaatattaattttgaagtttataaattatgatgtgtttaaaaaagacactttagttgcgcaaaagtctgcaatgcactaaaattgtttttattttatttttgttaaaatggtttgtttcactctataaaaaacttaaaattttcagtattactttttattttaattttgttaaaatgatttttcctccaaagttgtgtatatatatttcttatagtgtaatttcttctgtttactattttaaccgagctaacattagttgatgcattgcattgagaaaaaaaatatagaagagaagatgaaaaccttcatgaaatttgagaatttgcaatatcatactttattaaaagagttttttgtttatttttttttatttttttttatttcaactttttctaatcgactaaccaaatggggacgtggtagtaaaagagatatgatatggagagtctctttcatttgatacaaaacacatctgtgtaaacaacttaaaccgtagtttatcttttacttatgttttagttgtattttcccttttttttgctcaattttattgttaattgtatttttcatataaaaaacaataagacgtaaattcaaaatcatgttattaaaactgatgaaaacaattaagtcaatccctttttttgtaagttttcaaatcatgatcttaagttttagagagtctccttcatacagatcaataccgctacatccttctgtaagtaccgaagctttggcctgaactaggacttggaaaagaccctgtcttcaaaagaggagacccattgcttggtaacgaggattactttactcgtctagaagaggatcctaaagatgatgagatagaagaagtaaaaacgaaaccctctcatttaaaggaataggacccaagaaacagtaaaagctcctctctctttcttctcaaaataaagaaaccattttatgaaccttcttatcctgagagctattgttattcatttagtccttttgacacctaactctttgtgtcaatgtaacacgataagaatcaagataaagtttggaaaccgtcataggaggtgtatccataattgacaggtttcttgtgttctgatgttcagtctccagcccaatgatttcccactagacacacacgagtgtttacataattcttgtgtttggtatttgacaatttgttattgcttcggatcaaaaacgaggtaaaagttgtcactttgttataatcgtaatataattgggccttatagaaagcccatttaaggtttaatagtgtcgacactaataatcaacaacatccaatacaaatgtccaaagactcaacctagctcccaatctatatacatcgtccactttcgaaagtcgaaacccttttctcaaacccgaactaaaaaacgaatatccaataatattatttatccaaatttttatatatcattgggcaaaaaaaatgatttaaaattatcaaaaaaaaaagaagagaataaaaatactttcatctttttttttttttacagaatacgagaaaccctaataggcaaaccgttaggaaaatcaacaaaaggaaaagcaaatggtttatcatcttctgctaattcccaattgaatttaagaactagatgatgaataaacactgccatttctaacttggctagctctgaaccagcacatagccttggccctcctccaaacggcatgtagttgtttccccacgtcgaaaaactaccacttcctgaggatgacgctccgttgttttgctgctcgtcacaaaaaaaaacgacaaaccgattttatagatcacaataaacccccaaaaaaagaagttggaagaaaaaaggaagaagaacacgtgcttgttggcaccacaccacgtgggtcattaatcatctctcaccacctcttaccttccccactcactataacatcatgactaccattattatcttatttcataaagtattatctcataataatcataataatactatatagtatatttctctaattcgccgatttgatagttgttataattaatagagttataaatctaagtattaaaaccagtcaacgtggcagaatctaacgcacgtacaagtcatcgggcgtgtgagatccgtcaaagccgtggtaccatcgtccgtcaaatcttaaattgtatcaaagccgtgactaataataaatcaacggtcacgattataagaatatttaggcagctcctacgtcattaaagacataccatcctactaattaattgtcttcacgtacacttacaccaacacgtctctttctctctcttatttttaatttatatgctttcatgtgatcaatgatccatgacgtgttaagatctaacttgaaagataataataataaaaagtttttgccagattaatagttctcgtatagtatctatagataggtaaatcacgtaggacgtatctattcatgcaatagatgaaaaaactatacactaattttcgatagttaacgagagaaactttttatttacctgttgccatctccaaggattaaagagattaggttggtcataacgagaattatccaaatgtacggctgagatcaccggtaacactttccacccactagggatatcgtatcctttttttccaacattaagaaatgtaaattattttaatatttttcatccaataagatttcaatattccggatttcattatttaaaaattttgtacgtaaagttttacctttgtaccgaacatctttgagtgctttgcgatgcaaaaacctaactacatttcccaatcgaagagtttcatttataaccttcacacacaccaaaaaaaaaatcaataattttggtttcatcataaatcatatgaacatagaataaataatgagaatgatagtaacatacacattgagtaaagtccattttcttgtaatcatcccaatttaattctgactctcctagttccttcttggccctcgcgatctcaagatgctcttccttcaaaagtataaatcaataaacataaaattagtgacaattaaatatacatacttttttcatcgtatattctaatagaataattctataataacttatataatacgtaacaatttggtagtaattaacttgtgctgttataattatcttaccctaagctcttcaacggctttagggcaagcttgcaagaagaagatagcgagagcaatggctacagaagaagtctcatgtccggcaaataacaaactaagaatgagatcgagaatttgctccgtcgataaattcgaatgtttcaaaacccatcccaaaagatcatcgtctgttctttgtttcctaacatgatcactcttactcatctctgcttcatcctctgttttcacttcttcttcttcttgatcttcttccttgatatccaattttctctcttccattttcctctcaatgaacttcaatatcgttgctcgtgactacacaaccattttagatattttatttaacacataaaataaaattaaaaacctataatgagagtttgtgactttacagcaaaaaaaaataaatgtacctgaagagctttatgataagcagttcctggtagatttagaggagcagagacaactcctttcatgaaagttacatactctttctttaattgctctgtttcttcttctccaggatccatactcattatatgcttcgccattagattaaacgtaaactgttcaattaaaaaaaaaaaagttagaaactcaaaagattcataaacaaaaaaatttagcaaaataaaagataaaaataaaaacctttttggcctcgtcttgagcagagaaaatagagttttgttgccaagaatcaagaacaaacaaagtatgtctctcaacatctttaagtagaatagttctaagacgtgcgtgacttaagaagttaagcgagatacttctcatatctctatgcatgtcaccaacaagaacaagcatcgaccatttcccaagaatcccacctatacttctaggataactacattcaaagagccttccttcgttttgtaatatgaatctattaagtccagcatcagctgatacgatcgttggttctccaaacaagttcgatctatatatcttaccatacctgtaaaataaacaacattagtcaaatttcaaaaacagaggatttatttttttgagtttttggaagatgttgttgtttacttggagacatgttgttgcatgaagtcaccgagtgttgtggcggtgtacggtttaagataaccgatggtttcaccaagaaatggccaaccggatttacccggaggtagattgaatctggtttttctatttcttctcttcaagagaatcaagaagagaagaagagacaaaagcgatgggagaagaagaagaggtaagagagtatgatgctctgtttcgaacatggagctagtttctctctctctctcactcactttctctttctaatggctttgtctttaagattgggaatcggacttctactgaaaaagggagcttctgtttgtaagagggggttttaaagaagtcagaaaatataattgttatcatcgtcattaaaatttaataaaatcttcttattaagcttaaacctaaccaatgagcttcatggcttttgtttctccgtgttcattacttttgttgcctcgttatgctccttttaatacttttatttattaaactcttaaattaaaaacaaaagttgcagaaagctgcgatgctgaaatagtttaacagctatttatatcataaatatcatggattaatggatatatctataatcaattgtctctggctaatagtactataactttcatccaccgtggtagaaaaaaaaaagtcattagatagatcgtacgaatccatcgtaaaagtgtttatgaaattttatctgatcaagttgtgagtttttaaattaataaacccattcgtgctaataatttttgataaatgctccagcagaatcccaggaagtccggtacggtctcaatcggtttaaattgggatttccaaaattacccttaggatatgggaaaagggtgggctcacgagtaggggtagaacagtgaaaatgtcagaaggacccctacacgagcgtgcggtcaaagacagagttattagattattaccgaactggacagtcaaacccgtagacttttggcattgtcttttttttgcccctcaatagtcagaaaacacatttactcaaatttttatttattttaaagttaatattttaattccgttttcattgttgtcccaattctgaatcgcaccatgcattattaattacacctactagataacatactttgagcgcgtataggcttatataattttttaaaatttgcttaatgtatattactacttccattccacaacaaaatagttttctatctgttatttcttgttccataaaaaaaaaaaatttggaagtttctgttaacaaaattttttttggaactttctatgcattgttattgactaaatattaataatttgtagatttcaaaaaatattaatggagatatttgaattcaccaactattattggttcataatgtatttataactaaatataaaaaaaaatattttaagaacataggaaatacattataggcatcatattttaataatattgttagaaattataacatttttcaaaaattttgtctttaaattaaaatgtaatactcagctgtttcttctattgatagtagcattgaattcctaatttaatatttgcagaaaaaattgactatcacagttgtagaggctgtcattatggcaacaaaaacatacggtaattaatctatgagtaaaagggttacattttcaaaaaattaaagtcattaggtttatccttcatgcatcgcgaaaataagacaaaactttttttacctcgatgattaatatttatacgtaggaagaaacaagattaagtttaaacatccaaagtatgtatttggaataatcacatactagtatctaatataaatattgtaatgttacaagttcgctcttattaaattccaactaacaataaatatgttaaagatgcattaaagaaagcaatttaatagttgcagatggttacacgcttgtagaggacttcgaaactgtaacccaaaagatctatgcattttagatcattgaatggaatccaagaaaaatcgttttctttttttcttgtttttgtttttattgttgaccaaccaagaatgatatttgcagtgatcgtaacatacggtcccataattattaccacgcgtgtgaatttcatttatcgacatcacataactattctttagtctctagtatagcatacgtgaaaggtatagcatacccatatatggatatgttaacttctcttaagtttgttttttctgtaaggaattatgtatatgttgaccactaattgattaacatatttgtttaccactaaatctatatttacataacaaccggtaattccaaaattttctaaaggatttcaagctatattcagtttgtaactttgtataaatagcttgaacgggtcctttatgctttatgctagtaatctcaactagtgacgctgtaaaatcgtatttaaggttcgagtccagtgtcccgtaatgtttgagaaaaagtttattcaaaatggtcccagacaattgttttgtgatatatcattgttatcatatatccgcgataatatatagttaagagaaacgaaacaaaaagaaagacaaaatatgctttaaacagaagattatgcaaatacctggaacataatattgagatcagctaacaaataaaatatttttcacaatcgttatcgcaaattttaacgaatatccagaaaatccaaatagggtcgatattgattgtgagagaaagctggcagggaccattattccacaaccttttggttgtcatctcttattctctttgataattattcacatactccatgggtcactactctttcccttttcttattttcgtttttttctcaatactcttgttaataatttgctggattagcacaagaatcataatcatgattggagtgatcgataaacggatattcacactcgtatttaatttaataatcaagagatatgaattcgaaattttaattggtaagaaaatcttcatagtaatcaaagaaatgatgcatgtaattatgatcaaataaacctaatccagaaccaaaaactatatcgaaaattgttttgtttgtttgttttttttttttttgggggggtcataacgaaatatgtttacacttcaatcaattgtctttttgatttactcatatacatataacaaaagaaacacaaaaacttaactgtgtaatccaaccaaatggaatcgattatttcctttattattataaattccaaactccatattttctcatataccaaagatagatattttgttataacaatacaatgtaaagataattaattacttgtaaatattttaaatgaattttaatatttaattatcttggaatccaaattgagaaccaaactcaaatcatgtgaacagaataaccagaaacacgaaatttatattgtagctcaaaccgaacccaacaatataatacccacatctatgtgactacgtcccgcctaaatcaatctcgtacgatctcaaacaacatggcaaaagtcacaaagctactatcaaaatttttgttgcgttaaaccaagtatttttgtctccggtttcgtaataagttgcgaatacatgtgttcgtaatttatgcatacgtgttaataaacgcatgtaatctatacgtacatgttcgtaaaaaaaatctatacgtacatgaatgcatggatcatgctgtgttgacttcatcgtttcaagccgtattgacttgtaacctttttttttgtcggcgacttgtaacttaattgaggacaattgtaaaataaaaatttgaggaatattaaagcgacgttgttttatatttgccactaccttccactatttgtggtatacgggtatgcctaaactatatgcatatatatgttcataactcttgaatactattttatatttatttataacgtccattaagttgaatttaaaaatcatgtggtgagacaccaataagctacaaaaccgataggataataattgtatgtatagaatatatttttttgtgtgcaaattgtatgtatagaatttgatcatcatgaaatgaattcaagtgttacctgaaaatccttttttttttttgggtcgacttatttggaaatcgatagaattataattatttggaaatatatagagagaatgataatgggggatactttgggcacgtccatgtgttcgcattattgcagttcacgtgcagttgctcgtccaccagctttctcccaatttcacatgccgttttctcgttatattttgttcttgtgcaaataagaaaacaataccataataattttattttaaattccgttttcctttacaaggatttatatgcaaccaactgtactagttttacgagtttcttcttaacatgtgctaattaccaaaacgaaaaacatgtgtgttttgcatatagaaattcgttaaaatttgcgataacgagtgtcaaaaatattttatttgttagctgatctcaatattattttccaagtatttcataacattctgtttaaagtatacatttttctatctttttgtttcatttctcttaacttgataatattgcggatatatgaaaaacatgtcttagttacaaaaaaaaagcagtaggtcaatttttttccctattagtaccaatctataaacgattcgtttataaataaaaacggttgaaagttactatgccaattaaacataatgtgtagtaattatgaaattttcaacttgttttgtacgttgaaaatattttgtattaatttttatatattattttctttacttttaaaaatttatatagtgtttacaatgttcattaatcaacttggcataaaaatgctgacataatggtacaatttcttgtttttcgaacaagaaaaccaccctttacagtcctatacatatttttaacgtattcgttttaaggtaatgctaaattttataaaataaaatatactgaattttattattcaaaaccgatttcaaatactgtatattgtagagatagaaaagagaaaataaaatagaaaagaagcactcgtgcgggtgcggggggacgtaacggcggcccaatgattgccggaatggggcatgcaggcggtgggagagagacacgtggcaagtcacacgtgtggtatagtgaaagtgacatgacgagacgagagtgggctgtcatataaatgctctcacccaccgtttgctttagcattttatttttgtgtgatctgacttcactcttgtctctctccttaaaacccaccaccacctgtctctcatcagaaaagtcaaacccttcttttatttattcctttaatacaaattttcggaaaatttcacaaactttaagaagttttttttttttttacaaacctttatgattcttctttcttattttaaggacactttttgttgaagttgttaaatcgaaaaatcaaaatcataaacataaatttctatgttccaaaagttatttacatcttgtagaaatttacgattttattatgcagtatgtagctagttaccaaaaaatcttagtttcttttgttttatagctacgttgttaaaagagttttaattttattgttaaattatatttaataaacgtttatacaaatgaatatttaataaaccttctatttacgttgtcttgatgttgtcttgatgtaaaccatatttaaattgcatctgcatatttctcgaaatctcctttccttagagtgtttaaacggttttgaaaattcttatcaatcaattgaacaaaattgctctccatgtctcctgtcatttcttttcctctaaatactttttaatcgacaataaacagttttttcagtcaacatgaccacacctgaatagtttacattacattaaagataataatacaatttttagagcttttaacaaatttgaagtcatgaaatacaataatctgcgctgtttgaaagcttggaattcgaatatacagttttagttttataataccagatcaaattcaaatatgtttccatagtttttttttttttatgtgcaccgtttccatagttttcttcaaattagttttctctaatgttttttttttgtcaattactagcatataattcgatatataattatcttttttgttgttgtatgtctgtttcatttgattctctaaactcggaaaaagacaaagaaagtgaccaaccaagttatagaccgacttgatttaaatggcgcgatctagtggcgcacgtagctagtatattaatcttggattcaattatttttgtcgacgatccataaatttgatatgacttaacaaaagtcaaattttgttgactgaactaaaaggtttagtcggatcgagagagatagagatggctagaaacaaatgggatcatcactatctctatcaaatcaatgtgacaaaaatctcaatcatacatatacttgttaggtacgtttctttattttaattcttgtctttgttctctctagagattagatcgattccaatcactttggcttttcttcgtatctctcgagttctcgaccgacaaatatacctttaaattaatgcaacattttatttttacgatctctgtcatatcagattcttcccttttctctccttcgtgcacacgaatggatagtatgtataaaccagttctctacctatcaaagacaaattttgttttggtaaagcgtagttcgtccaaatatgatattttctttcgtatttcaggataacaaaacaagtggacaatcgacttactcaacatggaattattttactctagtttagtttctttttaacatattttttgtttgtttgtttggtgtaaaaaaagagtaaatcggagtaatgaatttttgtttaatatggttcagccatattagaaatttaaaccaatcacacccataattaaatgatcgaaatagcaaatgttataagaaaatcgaataatataactaaataaaaatcttaacactaaaataatgacttgaccgtcaaaaaatgataactgcaattagtagtttgataaattttattagtgatcaccatattagatcacattcaaaattaaaaaaaaaaatatgtgacgtaagttgtaaaatacaaaccaaaagatactctttgaacataaatgggaatcgtgtatattagataacattagaaaaaacagtgaactcaaaaactattcatgtactctatggtaagtagcttcagtctattaccactcatacttcttatggatgaaattacttcatgatcacttacacataaatacgataatggcaagtttaaatctgattacaaaaatagaaatttaggtgaagatatgaagaagggtgcatgggggttcccccacatccacctgcaaaagttatgattgcatttcaatcattgcccacgagcgcaaccaacacgtcgctctctttcccttcaatttcatttttttatttcatctctatcggttttactttgctcgatatataagtttatatgtattacaaatttctcatgctttgaatcatatcgtcccactactttttggaattagtcattgctcacaatgtttgactcttttccttctattctttttgtctttaccttctccgtttcagaaagggttttgctagttatgctaaatgaatgattaaatcgaaatgatacggctagattttttcttttctacttcgaaatttttcttgtaggctttttaaaaatggaaaattgtataatttctgaaaattgtattgagctaacaatttttatggaatgatttgcgataaagcacatcacaatgcagagtttattttgcgtataatatataattttacactagttgtttgcatgaaagtatatattttcttgagattttcttttcccgcagtaaccatttactcgctctttatagacaaaacataattatgtaattagcaaaacaaaacataattatgtggagaaaaaacctaagaaatggaaagaggaggctaaacttaagataaagccccatgaagcaaatgattttgaagtaaaagaaacaaaagttatgtgtatgtttggttaatggcaaacattagtaagacaaattctagattgtttataaagaaacaatttaaaatcatggcttgcatttgactgtagtaaaaaaagactttacaaactacaatatacataaataaacgacaagcattattataatcaaaagaagaaaaaaaagttgagaaagaagagaagagaagagtgttgagttgttgcttgttggatcctctttaagttttcgcatggggttaacattatagcaaattctccttttactttcggctctggtccctttccagatttcatttttgttattatcataattagtgtttttatccaccgatcttattcttatattttatttgtcattgttttttataagcatttctgagatataaagccagttgggctgagatgtgttagcgattgttacgtactgctcatgaatgtggatgggtcattaaaccaaaaaaaataaaaaaatgttgatgggtcgtcactcaaatattcaaattcatcttatgtgttgttacttgctattttctttcatcataagcaaatttttgtttgaacgttgcctaatattgcttacaaagaaaatgaaagatgtgtaaacattcatatgtatattatattatatgtctacacattaatgacgttttaaaagaaaatccacatgttaatacataaattattcggtctctagatgtatgaaaatggcattgacactcccaaaagaaaagagaaacattcaaagcgctaacattgagtaactacgtcaatcagaacgatcattaaccaaacaaaagtgtaaagatctaagaaatcatatggcttgctttttatatttagaaataattgcaaatctattttacaattccatcacgaatacgacccctgagcatgtgtcccaacctaagtaacaagagtcgtgttgtatttgtatataataataattctaaaaatagatacagatatgtgtatataaaatactcaaacgtacgaagtgtttgaccttggattttagtaatgttttctagcaaatgtgaaaccaaaatattcaacaataatgtcataatgaaaaccattaacaaattccattgtcgtccagcggttaggatatctggctttcacccaggagacccgggttcgattcccggcaatggagccttttttttcctcaaattatctcaaaaattcacgactatcaatatatcctctctctaaacatatcaatctattatatgctaaataaaataacatttcaatcatgttttcaccaataagtttaataattgaccgtttctaggcacataaatcatcacatgtatagtagtactgcataagaaataatcaataaaacatcacaactttaaagttggtttgattttgattaataatatgacaaacttcaaaagagaaaaaatagcaatcaagttcagaggtaacaaacagaattgcatcaagttttgatttagaataaacaaaaaggattcttaagtttttagagttttaaacagccgaatgaaacatcaacgaacatactctcgcgattctgatctcttagaccgcttgtactcacgttcatatctgaagtcatcttcctccattttatcgtagcgatgactgtaccggtctgtgtccccttgatcgtcttcatagtagccacgagtttcttctggctcgccacggtactctgcatctctctcacgggaccgaccaccaccctcatgctcatattcacctccttcataatcccgctccttctttctactgcggtctcggtcatgatcccttgaagtacgatcccgtcccctgtcacggtcacggcggtctctgtctcctctgtcacgggtccggtcacgatcacgtctgctgtccctatccctgtctctgcctccttggtctcggtctctgtggtgcttatcctctctcggtctgtcacgagacctctctcgaggttgttcgtgagacagctcacgagacctttccctttcttttcccttttcccgagatttctcactggagacaaggtaacaacattatcagcacaatattagtcacaaggcaaaagagtttggtacgaatgaaaatatctttaccgctcttcccgtggtctcgatggctcctctgactgggaggttcttccttgcggttgttgttccccaacaatttcttcaccaccacccactcttgaggtcccaagtccaccaccaagcctgcgtggacgccagtttgggacggttctacctctctccacatcaaccaaaactcttctgccgtcaatcttttgtccatcagcttgcttatatgcagctgtaggaagagtagcaaaacacaatgcaacatcagtataaagagcaaacatctcagggagataaaagagggttgaaagaaaagagatgtgagggcacctttcatgtcacgggtgtgcatgtactcaatgaaagcatatcctttgggtttattggtcagctgatcagtcaccaaatgaacctgagaagtttcagaagaagacaattaacaaatcaaatctgtgagaacaaaatcagattcaagataaaagtgtttcatatcaaacaaacatgcagctctataaggcaggcaacctttatgttgtgtccaaatccgagaatgtcaccacccacatcaagaattggcagaaaaatggatgtattgcagcaaaattaccatttttgaagagtctaataaaccaccccttaccagggtatagaaacttagataactaaaaatgtattaaaaagtgaaccagatcaccttcatagtagcccaagtcccagatactgaatatatatagatgttaagataggaaaagagagaagggttttcgataatccaaccttggttgcttgaaaataaagcatttgaatggctttgggatatgggcagataatattttataagttgcttaccagcaggatgagttgagctcattatagattcagaaaacaactaattgattaggtaaaccgtgtgcctataaccactatatgatatatcattgtaaaagtatttgctctctgaagggacaaggaaataaaaataccaggccaaatttaccgaaaacatctcaaacaaacaccatggagagaggagctgtgtcattatatgagaagcacttatgcatctatatattcagttattgagaaaggtctaagagacttgatggctttacacagtctaaagaaggcatgcaaaacaaagcaaatgtagaatggccttttggtctagcagaaaagatgcaaatttataagggactgaaaaattctaaccttggaagacttttgtagataaaataaaacaaattgagcaaagagctctagagagggaagccattacacaaattcttaccgaaccagcaagggaatgctcagaataacctacccgtttaattggtccataagattcaaactcccttttaatcttactctctgaggattcgtagttctgcaagacaagaacagaccaaagttaagcacaacataactcagatgtctaacaaaagtcattcaacagtaagaaaaaaagaaacacagcttacaagtcttgaaacgaacaatgtcttgtatggatctccagtagcatttggatcattattggggtcatctgcatataaaaaaaaaacaaattaactaagaattctcaaacctaagagggcattaaaaggaacacaaataacatatagtagattacatttctttaagtcctcagcagccttttcaacacctttctccagtcgcaatttatgaattctttcccttttctgcgactggacaatgaaacaaaacaaagctataagccactgatttagggttaaaatatggcaataatcgaaagagttaaaggtgcatcatcatacaggtaattcaacttctggcttaggtggagcgtattctggatccccaggctcagcaaagttacttacaaactgagccatacctatattcaatacacaagacaaaatcaaatccaaagcaaagaaaacataatcagatatacaagttgatacctgtataaggcgggcactttctcttctctggtggtggtttgtactccaatggcggacgtggctcaaaaagcttcaagagattgtttgttaagccagtagggtggctctgacccatctgcatatcagatagatccattatatcagctttaaagcaacaagatatcaatcaaactgattcaaaactataaaacaagctcaagaatcaagaccaatataatcaaatcatatgacctaaaatcggaatctcaattcaatttagaactagctgatgagtgttacaacgcaatcgaaaatagaaccgaagcaagtatcaaacgacttaagagtattccaattcattagctagaaacctaatagacaacgaaactaaaatctagagagtaatcacgaattcagcgaatttagagagaagagacgaaccagcttaagctgaagaacattggctctgttctgaactttagcgcgagcttgaacagcggcgtttggattacgcaagaaaggatcgccggagtctcccatggcgacaaaagggatctcggagctgtgctagggtttttcgtgaggaagcggatggaggatttttgcagagagaagaagcaaaactaacaaaacccaaattcaatctctaaccggattctgattattaagaaaaccgagttgagatccaacagatcacgatacgtaaaacgatgccgtgctcgtatatctcggtcacactttaacccactcgctgaacaagagggttatcagcttcaattacctttttttttggattttacaattttttgttaacatgtcaaattattggttttgtaggcattcgttgatctttggctcccatatttttctaaaatccattaacaaaaaacataattaaaatagattccaattttatttatttttacaataacaggctctaaatttttaaatattttaaagtaaccataataagaaaaattaagcatttccaaatgaccatcactgattcacttccataggatgtggctctccatccaatgattttgttaagtatgatggaaccgaggttggagatctattgaacttgacgggcacaccttttaccattggtctcgtgcgctaacagcgtaattgttgttggttgcaacatcaaagccttttgagaaaaaatgagccaagaatagttggttgcgtctccatttgtgcactacagcaccagaagcgagaatggataaaaaaaggttgcaatggctatagatgctgcagaaagaaagaaccttatgtgatcgggcatgtaactggtctcttagtatacaaggggatagtagaaacacaacaataggcgagggtgcaaagtggcaattttaacagacgagtttgacatatacccttcctcaaaaattagtgatactcgatggatttatgcgatgaaacgtacgatagtccacctacaatggtcaattcaaactgtgaatctctcatctgtcgggtgctcacatcaccgttgcaagtgccatatataacctgacggattatgagtacgagattggatattcagtttgtgcatgttccagtggttacaatgtaacccataagatcttttaggtggatgcaaagtgagaaactgactcgttctgttttcttgtattgtggaaaatgcttgcttattataattatgtggtttttcatctacagatatggacgagtgtagaatactcaacaataatggacgtcacaaatattgttgcgaaggtagcatgtgtgttaacactcggggagggtaccattgcgtgttccacaagaagaagacgttgccaattatcatagattcataggtatgcaattttatcattcagatttatgtattcatataatgggactgatgactccccttggtaactgcgtttggccatcgtagtagaaattgttggagccttgtcgcacctgaacttaggcgccttattggggatatatgttatccgattaggattagtacaatatctttgatgatagagtttctaacctatattttagggatttatgtttatctcttgatagagatcattgtatataaataccatagtttgtgaatcaataaaatcaagtcagttcaataccttattctacatggtatcagagcagtcgatctttgtggatcataattaaagcttccgcattatagattttgtaatcaagaaaagattatgaagatggtgatcactgaaggagaagacggtgcctccgacggtggaaatgaaaacgacgaagatgtcggcatgttaagggatggaggttacgtgattgtttcttaatcacatgggtattatttttccaaaactttaagtcgttggttttctatgtttttagtaggattggttttggtttttctttttctttttatgttactggaattattcttgagttaagaaattttcagagtttttgtgttcttagtaagagagtttggtaatagttttaccgttacgggggagtttggttatggtttagccattagtagagtttgtggaacattcatgtttttaggtcatgtttagtcccgagttatagaccgtccaagataaagatgattgtttgtggagcagcataatttgcgtacacgggatgtattcccttttaccaagaccgaagacatgatgaagttccaccccaagaatgaagtttataccctaagatgtttatttacatgatttgtccgtcctcgacatattgtccacgacatacgtgttccgctttgtgattgcaaagtttgtgttttgcgtaccacgtttgtcgtgcgggggagtattggggatatatgttatccgattaggattagtacaatatctttgatgatagagtttctaacctatattttagggatttatgtttatctcttgatagagatcattgtatataaataccatagtttgtgaatcaataaaatcaagtcagttcaataccttattctacacgcctctatcaaaatctatcacatagacataaagagatctaaatatggatggtagtattttcgttgtgaagaagtctacatgaattcttaaaaatgatatcaatcttcttcgtgtcataaatgtaccatggcccatcgtcaatccaatacttagtcgcgacaggaccgctcatccccgaatctggattatccgcgatggctatattctcgctgtagggtccttcggagagggccacggcgcagtcatcaatacatttgttagcgatgctttgtgcataggctgcaagaaaacagttgtgtttggtcgatttgtatcatactcgtttttcttgccaaaagaaaacagttgtgtcaacaatatctagagatttcattttacattgatatccaaaatttgtctgttttgatccttcaatttgattttctcctaccttttcaaaagttgtttagccttaactgttgccttgtgtgttatcatgtaaccacatctatcgctaaggcaaggaactaggagaatttgctgtcagaatgtatcattgtgtgtgtgtgtgtgttttatacttaatacttgtatatacacaatttataaagtattcaagcacatgtataaaaacaatcgtaacttgaaaatttcactaataaacttatgtagttttttgtttgtgtaagaagaaagcacaaagataagtaactaatgcttgagattcattatcgtaaacatcaataggaaagttgaccagggatattctccggaggaggatcattctgacacctcacctaatcacgtttcacgatctgagtatagtcatcgcacacaaacatgcacgaattggtgtcatagcttaccatatccaatacttggttgccgcaggaccactcatcccagaatccagattttctccgaagaacactacgacgcagtcatcgatacatttgttagcgattctctgtgcataggctgcaagagtctcgttccaatccttgacgtattctacgttgtgagcggcgagcatttcttgctgttcgatatcgactcctgggcttccctttggcggttgagcgagggtaccacgagccaggagggacaataatgcgactaagagaagggtataaccaaaaaaactccttattctccatttttttgctcttttgagaatattttttatttcttggctagtatatatagaagttgggttcggtgggctaaaaaaacaagcttggaaacttcaaatctttcgttaatttactaaatagaaaagttaaataatatcctttactctaatgtgtcgatattaacattaatccacatttttttttgaaaaaaatgttaaattatatctttagaaaaataacgttgttacaactagtgcatcaggcgtttgataaagaaagtattgaaacttagattgagtttgctaaatcttaggatcggctttgaagtcaagcttggaagcatgcttcataacgacagtccttctacctttgtttggttgtgatctgatttctcatttatatatcaatccatttgattagttggcctgcagtattcggtgtttcactgtgtctccgtccatttctttccctccaataatgtatgcagtgatttggaagatatacttgataataaactctcgattcgacaatgatgattcttggatacatgagtgagaatctgagaccagccgttggagtagtgtgtcttaaagacgcctttggcaagcgctgcttagacttccgaagcatagcagcaagagaaaaagagatggtcccgtgttttaatgcagtggctacataaaaatgcattccctcaatgctcctctgtcccacttaagcttacgagcaccagtggcgagacggtcgtgggctgccagccatatcaacactttttcttatacgacattacactttttcttacgagtgtttatattttattgatctgcaatgtatctgttcgtccatgccaaatcaaatctatatctatcatgtaacgaagcatatataatcataatttcaaatcttcattaataaacttattcgtttgttattataacttgtcatagatttgtttttggtccaacatgaaaagcacaaaccgatgtcggattgttataaccgggtcacacttaaaccctcttactgaacaagagagtttatagagctcacagtttaccattttgccgactagttgttgtattgtacgttatgtagagattgttttttttttttttgtcgtaggttatgattaccaaatgttctcattaaattttataatccctggctaaattgcgaatatggtcaatgaaagcaattattaatttgacactttatttatacgacattacacgtggttaaccaaaacactggtcactaggaagtggacctggaaccgacccattatccaagaactgaataccaaacaccacaagaatggctagaaccgacagatacgataaaccctcgaccgcacccaacaaaccaaatggcccatttggcagacctgacccagtttttgttttagtgtacaaagaccagcccacgatgccaaccaccaccaagtagctcacaccttccaacgctccgattaaaccggccggtccgggaggtaagccacatcccgtggtcttcaaagtgtagagtgaccatccaataaccggcgtcgacactaaactaccggctatagctgccgtctccagaaatccaccagtgtcggtgttgtccttggcctttgcaacaaccctacctaacggcttaattgatcgccggatcaaattaccccggtgaaacgacggtggaagagaggcagagatcggagatagaagaagcattttaagagtgtgagagataaaagatagagagagagagagaaagattggatgttgaactctctcaccagttaattaccacacaaaatagcaaaaaacctctcggcataagcttttaaggagagccttgacgaccgtttgatcttagtgcatcacacacactacgacaatcctagcaaaaccatcctgaccaataatgatacgacatgtgtaagtgtaatggatgtaaaacaaaagacgatataactcaaaagatttatccacataagcattcttacaagaccctctaacagagaaacaaggtctcgaaactcttcctttgtgtttttttgtgtttttctttccctccataaagtggggtttctaaaagggcggtaaatccaagctgagtaaccgtcatttgaaaatctaccagcctgaccataactgacatttgaacattcagatatagccgcctgaatcaagaaggagccgagcttcttttccatctaaaactcatcaaactagagattctgatctgtatgttcaacgttcctcatcatcatcgtcatcatcctcaccgtcatcatcgtcatctcgttttctctttgggcgagatgatgaagccaaggactggtcaggaattggcaggtcatcttcgacttcttcttcttcatctggatcattgtcctcattgatcggctcgatgtcattacccacagcatcatgatcttccacttgagaaactggctgaacaaggtacccttcaccagattcttcatcctatcaaattcatcaaatactaggttagcactaaacacaaagcaacaatttgacaaatcataacttcacgcatggaagcattccatcacaaaaaaaaaaaaagagagtcaagtttggctttggttgtctaacatgataccttatggttaacacgacagggtacttcgtaaatctaacctgatattttatgcagcaaacaaaacaatgcaagaccagactagtattctaaaccggtagcaaaattagagacgatactaaagtcccctcttatatgtcctccatcaatcaccaaagttctaatatcgatctctgaatagcagcaagacagtgaacttaggcacaaaaatttatcaaaatgaagtagtaagtctatcaccacctatctgccgcaactacaaaccagtgaaaaaaacaagaaaattagtgaaacccaagcacaacattcatatctcaaaacataatgtttgaagtacaaagtgtcacctcctcttcaacatcatcatcttcatccgcaaactctccatcatcctcaaccccttggtcatcttccccagtctcgccatcaccatcttcatcgtcatctccttgttcatgcccatcaatctctcctgcgttcatcaacctgcttgtgctccctgacccaccaagaccacgatcagcattatcaacttcctcttcctcctcatcctcttcatcatcttcttcatcatcaaccccatcttcctcattctcactatcttcaatctcatgaacctcaaccacatcattatcttcccctacttcctcctcaccagactcactatcatccccatcatcttcccttacttcttccccattaacagcttcaagacggaatccattagcccgataactcgtcccgttcactccagtagcctgctctgactcatcatcctcagcatcactctcttcatcctcatcaacatcaacaacaccatctaccctttcactatggccattactcatccgaggagcctctgctctttcatctccatcaatctccccacttccaggatcctcctcatcaccttcctcttcttcttcttcatcctcttcatcttcctcatcatcttcatcatcagactcaggcctctcattcccttcagcatcagtcttatctaaatacttcaaagttttaatcaacccaaaaaccctagatcgataatccttaagcctagtcacaggacactcatacagatcaagagacacaagcttcaactccgccaaaggagctagatcctcaacaaactggatccggttattagataaatccaaatcacagaacgaatcaagcccagcttcaacaagaaactctaaaccaacagtgatccgattatcagataagattagcttctgtaaattaccaagtctaggaaactgttccagagaagaaacaccgatgttagctacagaaagatgctgaagattctgaaacttctcgagaacactaggtggtggtaaacgtccctgaacgcatttcacagcaccatcaagtgttagcgttcgtgtagctaacctatctgtttgaccatctagagccgcttctacagctctttcccaaatctcatccatcaaaaccaaacccaccttaaagctcacaacacaccttctctctgaaaacagagaacagcttcgaaactcgctgagaagaaggtatcacaacagagcgaagaaaggggaaaaagagggttaaaacagaagaaattgatgaatatcgatgaagggtaagagatgatttgaagaacccagaatcaaaaactctctcttttgaaaaatttctctaccggaaaaacctaatttgtacggtcaccaccagtcgccactaaaacctcgtgaggaagacgaaaacctaacattgttttgttctttgttgggctcttaattgattggggaaattcggttcgggtcgggttaaaaagtggggacgggtgggttgttttggagaattttgtgtgaattatttaacgtgttgataaaccgttggattaaagtgtttaggatcgatgacgtggcgtaatggaaggtgttgattgaattgttttgttttggttgtgtagaaggacgtaaggaggatttggatctggacaatttcgacacgtctctgttgtgtgcaactaatagtggacccctttgtttgacatatttaccaaaaacgccattatcggccttttttttttttttgtcaaagatgaattatcaaatctacaaaaacattagtggatcattagaaattgaaacacatataattctcccaaattgtatgtttggtaaaaagtaattcaacatggttcactaagctctttttttttgttacaagtctagatcattttaacgtgttaaaccatttgagtcaatatgtgatttaaagctctattgggaaatttgactcgaaatagtttttgtcgatcgaatatagagaatcattgtaacttatgtatacatctacatttgtatattaaaagagaaaaataaataattaaaagaaacaagaaaaaaaagaggaatcaagaaagagttttacgtagtcaacattagaaatttatatctacatgtgttcgaaacttggcaattgataattgagattctaggtaaacgttgccagtagaatgattttaactctcttggcatatataaattattgcacttgtattgtttttaagaaacaatatagccgtttttgtcagtaagaaaccatataaaaatgttaagtctcatggctgcttaaaatgtttcgaaacttttaaagttattaatagtcaactgcaagcagtagatggttggaattggatctactagtccatgataaataaataaataaagtaattccggttttcaaattggtttggaatagaaagttaattaatcaatataaaatccccaaaccttgaaaatcaacctcgttgacccatctttatttcacccgtcgatggtaatttgtcgcgtatcggttatagacaacaattactaatattcttccaccatatgcaatgtcaacaaagttactatgaatgattgatttagcgttagttttttttaaatcgtcgtcgtattcatcggtttggcatagacactatatgattctcgaaccaatgaactcgttatgtaatgtatatttgtctcgattatgattatctaatttttgttcaaatcaacaaagtactagtctattgttagaagcgttagttacgttagttgatatcatagccatgttaagctagtatcatcctcgacaaaagtaatattatcatcgatgttcccgttacattagactcttaatacatgttaattatgaatatccatatattaatatgattgtatgcttcaagaaaataaaaagatcatgatttgataattgatactacacttaaagtaattatagttttttttatttttttttattttcacatttccaaacatatgtgatcgaatacgaatggcgatgtttaagatgctaaatcaacaagatccttacacaaaatcgaagcaatttttgaggagtatgtaaacagtgaccgacttgaataccttcagtgccacgtttttcctcacttggacaaacttgttcttcatttttatttgtttggaccaagataactcgttattcattacgagggctttccacggaagaaaatgcactacctacaaaagaaatggaataatataaacttgaatgggccctgcttgggatatcaagacttcggcccagcaatgtccgtgcatgcaaatattttgttaatcactttttaaagtagcatttggattatcgcttagtatatttgcattcccatctattactaatactacaatactaggagcaaaagttattagttctttaatttgattgctagatagtgctggaaactttatttcaggaaatggaatttctaggctggctaaatagtgttctggattcttgagggaccctgttacgcctaaaaataatgttgtttttttgaaggtcatcaaaataaacattttataagacagtaaaaaaagaaataagacaattatatttatgtagtcaaacgcttgtttttgctggatatataattacataaaagttgcatttatcctttaatcaattgccaaaaagcaagaaataatatcaatccaatcttataaacaactatattatgaaaaagatgataattattgtacgcaagatgttatacgacacacgtaatttgtagatacacaaaaaggtcaaggtcaacaaataacacgatcaattgcattaaatgtgtactagcatggttatcagaaatttttattgataccatggaatcgatagacgacaaaaccaaccgtaatttcaaaatttccgtaattgtttctcttctcttttcttgttttatcgacgattatggaaattttttttttttaacggagatgtttggtccgacaacgtgacggtaaatcctccactgtcttcgcttaaagacaaacgacaattaatctttttaactcctcgtttcacttgcaaagttatttcatcattttagtagtttactctcattctactaaatttgtatttttattgtaacataacggtcatatcagtatttggttagttgattatgtgacatgactatggataataagacttgatatgaattcccatatataagaaatcgtcgatgacataaaactactttatctactaacttcataaggcaaaaatgagtagataattagattattagaaagagagagacaatgagattgatattttttatatgggagtccaaaatcaagatagatatacttgaaaacactcgaaccccacaaggatcgacaaaatatttctttttaaatagctcaaaaaaattatttaaaaaaattcaaaatctttttaaaatatccaaaatgttgaaaagttgtaaatcgataaaagagaaaaataataataattgtgccaatagagagaaagagagagacagaagaagaaagaaaggttcctttgtctcggaacaaccaaagagccaccacccaaaaaaaaaaaggttcttagctttttttctttctttcacacgaaatctcacgagacgccttatttcttcttctctgtctctttccgacggcgtaactctccggtggaatctcagctctcttatcagtagaagaagttttggtctttaaatgtaatttttttggttttgctttaaatttcaatcgttgttatcagaaaaagtaggtagcaaaaaaagagattttttacgaaaagcagattgactggtagctgaaacaacggaggagaattatagaaacgagtaaaaaacaaaaccctaaaggttgaaacttggttgacgaaaaaaatgagctgatttttttttcttcatttatttcattcttaactctttttcacatatttaagaatcagtaagaaacaaaaaaaaacagagtgagactaaaaaaaaagatgccggtagatttagataactcctccacagtttccggtgaagcaagtgtttcaatctcatccaccggaaaccaaaacccacttccaaactccaccggaaagaagaaacgtaacctccctggcatgcctggtaaacttcaaaaatccaaactttattataactcaaaatttctcaatttttgttaaagttttgtcctttttatacagatccagagtcagaagttatagctttatcaccaaaaacattactagcaacaaacagatttgtttgtgaaatctgtaacaaagggtttcaaagagaccagaatcttcaacttcatcgtcgtggacacaatttaccatggaagcttcgtcagaaatcaaacaaagaagtgaagaaaaaagtctatgtttgtcctgaagttagttgtgttcatcacgacccttcacgtgctttaggagatctaactggaatcaagaaacacttttgtcggaaacatggtgagaagaagtggaaatgtgataaatgttctaagaaatacgctgttcaatctgattggaaagctcattccaagatttgtggtactaaagagtataaatgtgattgtggtactctgttttctaggtaaagtgtttgccttttttgatcatacataagaaaaaattcaaaattcaacaatctaagttttgagtgatttttgtttgcaggagggatagttttataacgcatagagctttttgtgatgctttggctgaagaaaatgcgagaagtcatcatagtcagagtaagaaacagaatcctgaaattttgacccggaaaaacccggtacccaacccggttcctgctccggtggatactgagtctgctaaaatcaaatcctcctcgactttaacaattaagcaatcaggtaaagagtctcttgtagtgttctagattgggaattttttggtgtttttggattcatttttgtcgctatatttctttgttttaagctgaaaatgaagatggctaaggtaatctctgttaatggtcggtggtgttcttggagtttagttagatgttttgtccgtagtgtcgtattattttatctgttacttgattaagaacataattcgtttggtaagtttaatagttgttcaatggctgattggttctttatgataaacaaatcaaagatatgattgatttgctttttgtttgtttacagtttattttttcaattcaaaaagtatcaaactttatgtaaacgactaatgactcttatgatctacagaatctccaaaaacccctcctgaaatcgttcaagaagctccaaaaccgaccagtttaaatgttgttacaagcaacggtgttttcgcaggcttattcgaatcttcctcggcttctccaagtatatacacaacatcgtcttcttcgaagagtcttttcgcgtcatcttcgtccattgaacctatctctttgggtctttcaacaagtcatggatcatcctttcttgggtcaaaccggttccacgctcagcccgcgatgtcagcaaccgctttacttcaaaaagcagctcaaatgggagcagcttcttcaggaggttcattgcttcacgggttagggatagtttcatccacttcaacttctatagacgcaatagtccctcatggactaggattaggactgccttgtggtggcgaaagcagctcgggtttaaaagagcttatgatggggaattcatcggtgtttggtccgaaacaaacgacattagacttcctcggtttaggtagagcggttggtaacggaaatggtccaagtaacggactatctactctagtcggaggaggaaccggcatcgatatggcaacaacatttggatcaggagagttttcagggaaagacattagtagaagaaaatcataagtagagtaaatgaatgtgtttgagagggttttagatgttcttgttcaataggttagtgtgagaatttgaaaacttccctttgaaagaaagggttcactatttaatatatatgcaattagttaattattctgatttacctaatttcgatttcttaaacgcaaagaaatctttagtgacgagtgatgatgatttactcttcttatctaataaattccttcacaaatgcaataaatggaattgttttgctttcgtttccttaatcggaataggtaaagagagtgagatttacttctttatatagaaactctttccaaatcttgaataatagggtcccatttgtttttttgttaaaattttcggtggaatattgaaattttttacctttcgaatttgacatttgatttgattagatattcgatagacaaaaagaagaaagagattcggacaatagatttttttgctgtgccaatcgtatcgtaggaccattattgataatcgatatagtgacgtgttattatcacgacaggacaacactaagccgtttacaatctcctaatacgacccattacgttaatgaaaataggccatcgttacttgggggcttaggccataatttataagcccatttatctcagtttaggcccaaagtttctcaatatatctaaatatactaaatcagcagtcacttttccagtaagtgatgcatttagtgattgacacatcagcttattactatttttttattctttcattttcacgcaggatttttatgtgtcgtttttatttaactttgtttttttctcaaacgattttctctttcatccccacgatctccacatctccactttctctcttccaaaaactccatgactactgtgtaaaatctcaaagatgggtttctcaacatcattaatcgattactcagaaatcaggtactttgttcatctcaatgaatcaatttaccatcttctatttctgtttgtaattttgttttatatatatagaattctccatagatccgaaaatcatatatccttcttctagatttctatggcttttttttttgtttttgctttgtttctgctttatttgactgaattcgatttctctcatacatctccttttttccataggattattctttaatacaatcaatgcctatgattctcccgtctcacaaacactcaaggaacaacgacaaattttggtttctcatctgaacagttgccttaaaacaagggtgagtttaatatcttaatcgaagctcaaatgtttttttaatggtaaattaattctcatactttttactattcttctttcatctcttattttacttctttatatctacaatttcttttttgtattaatacaaatacttcaattttaaagtcatctcttattttacttctttatatctgcaatatctttgatattgtttcaaaggtagcgtctgcgtcatgtacttacttacttgttcacattttacatttttttttagacttccaagctttgggtgtcaacgaatgtttgtaaactgaattactgatgatgagaagaagaacacattacaattggttggagctaatgatgaaataagcggacatgtatatacccagcataattttcgtatttatactctcttatatttctaaactcttgatttgttagttactgtctatcgcaattgattcattgggtagaaaagttgtaccttctttatatatttttcttaatctttgtatattcttcagtcaatgataataaatttattgtatatttatgttgtctgctttattttaaaaatcttagttaagagttataacaaatataatttaaaacaatgttgtccctgtatagcaggagtcaaatgctagtagtttactgaattagatgatacgaagaacgattattataatagttgttttatttttgacaatcacttgttaaatttcgaagctttttagtgattgtaactttgaaaaccaaataccctctaattacaaaatctaatgttgtccattaacaaagttttatatattgtggtcgattagtctagacttcggcctaatcagcttataaggtaatccgataataggcgctccgactatctcttgagtccttatatttgttagaaagccatttcaaactcggattaggcaatgtgatggtcttctgggaagaatttcactacgcatttagcactctgatgatggtcgaatcatctaatagagtatataaaaagaaaatttagtaaaaaaagataaaagcaaaagcaataagagttttccaacacatccaactttcaaaccaaatgcttctagttttctttgaagcacatgtacaggcaagaagactactacattattttctcaatccaatagaagctgacatgagcttgaagctctagccatataaaccaactcattgagttcccgcgaacgctcttccttcggatacaaatatgaagcggcagagaaagttgcagtctttaactgtcttgcattctttagaatgtacgccactacttttttctcttcatctcctgcgttgtaatatttccactcgaaaatattgagatggaacaacaaacattgaggaactgaacttggttcttcccaatgttcttctattggatcgtctaagtaatcatgttcctcacacttgcactaaaagaacaacaaattataatctattagaaccttaaattaataacttaagaaagtgagacaatccaataaagaaacagaatgtattaggtcatgtaaaatgtttacttcgtagatcttgagaacttgtagtttaggagaactttggagcatccaagtaagtagatcccaccacattagagcgtctccacataactccaaatgaacaagctgatagaactccatatggttatgaagctgcatagagattctcggaaacataagcacaatacaaatgtcgtgtatcacaagaaaacataggtttggttttggttacgtaccgtcgtcgaaggagataaacataaagagagacgcttgactgatttaagaggtcccaatagcttcttgggatttctgtaaatgactttaatattcacatcaaccacctcaggcatattatctctcaagcacaagtcgccatagaagtctacaaagttgaagtacttcaaagctggggcattgaccacaaacgtaaagtcaccgtacagttctccagatgtatcaagaatagataagctctgtaaagtaggtatttctacatagaaagaccgcacatggaaactgttataagatttgtccaacaccaactcttcaagaacaggacaacccgacaaaagcctgcggtgagactttttggttttgtactctacacacacaaggtgtaatgatttcaaggatggaaaacaaacatcgataggaacattcagaactaccgtggaagcgagtttcaagacctcgagtttttcatatgtataaagactctttggtagtttgattgacctatgttccctgaaatatccttcacaatgtgatatttcaagttcacgcatattgcgaaccattccgattctgatccatgttgctatatcttcagagctacaacaaggaccaacgttgaacttcactgtttctagaacctgagctctattcaacaccattgatttgtctacatacttgagaaatctcccgtaataggaaggctcaagttcaaactcatcatcaaaacgaagctttggaaccatcatccaaagaaacttccaacgttttgacaaaagcattgtgacgacaacatctttggtaggaagtgatgaaacaatcttcaaaagcaaatcatcagacagattactaatcctatccatatatggaaacaacttctatagactgaaaaacctttcagattcaaacaaagatgtatatgtgatgattactacaaaaccaacaataatacaaatacccatcgaagcaaacacaaccctataacaaactcaaagagtaaccatgaagagaagaaaaaccaaaagctaacgcatgaagcagaataaaaaagacagatagattaaagtgagattctgcttcgatttcataccaaacggtgatgatgagtgtagatttggaagtttgactttgaagagaaggtggtgaaagtgtatttgctccgtacgtcattaaattaaaacaaaccaaaaaaaggggaattgggctcaacggtaatggcccaaatttagtatatatataaggctcaaacgaattttataaaatggatacgtaattaaaagattgaagttattgagaattaatgtgtagtctttctttgaatcgaaaaatccttgtataaatttattatatcttgaaaaatattaatgagagatttgaaagagtctttcaccaatggaatgctctaaatgtatatatttacagatttctatgtatgtacttttatctggttataaaattaaatcactagatatggggaatttatttaaaaaatttcaatagatctctcaccaacgaaaatggtcttatcggatagtttactacaacgatattacataaaatatagttgaagtttccatgaaaagatcattaaagaaggatgagaatgcatttattaaaacaacaaaaacaacaagaaaatagaacaaacagtcttttcttaaatctgtcaactttctatgggtaagcacaaaaagtgatcatatgcatctcaccactttgaagaaatgaacttcttgaagaaaggaagtatcttcttcatcacgttctgcttgatcttcttaggtttcttcagcttgatatagcgctttggaagcagccaagtggtctccaattcctctatctcatcatcataagcttcatcttcggtgatcgttatctcattattacttctctctgagcagaatctttttagcaagctttccagtgagattgtaatatctttgaattcgagacgagtctttgagtccgctgcccaacaacattctaatatggggacgacctcatcaggaatattcgataggcttggtctcttgccctgaaagaaaaaaaaagattcatcatgttaaaatcttctccattaagtaaaaattgttgatatgtatataacttttacctggttcacaaaatagggaatagaaatgctaggtatctcactgaaaggtgttttgtttgtgagcaaggaccagaaaatcagtgcgaagctatacacatcgattttctggtcgtagtgttttttctccccaattcggagtggctcacggctgcatacctgtggatacaaaacatacaatcattaatcatgatatgttctagtcaaatatttagtctagaaagaatcattacctctggagccatccaacggtacgtgcccgcctcacaagtcatgccaccaagagtcttttctcttgcaagtccaaaatcagccaacttcacatgtttcatatcaccagttaccaaaacattccctactcaaacacggataacaaacaattaatttgtttcactatctacaagacatgatgctacaagacatgatgatgtgtaaaatggagtatatttacttggatttaggtcacggtgaatgatgccttttgagtgcaaatactccatggctcgagaaatgtccaaagcaaagcttagtgacaccttgagatcaagaggactcgggcgagagttcaacatgaacctctgaagagtaccacctcttacgagttcggtaactatcatcaattgtggctctatgcaagctccaacaaactgtacaattaatgttgaaaacaccaaaatatttattactcattatcgtaacattaatattataaaacaccaaattatttatttttgtttgaaacatcaaatgatttattattttcatttttaccctgacaatgttttcatgtttcatcgaggatagtaccagaacctccttttgaaactgttgtttgtcctgaatgcttacagcagatgttttacccggctgcactatcttcaccgccacaggaacaatgtttttgagtctataaatcattagagaaaatatatgaaacttttgattagcacaaaagccaaaaacacttcatcttatgagattaattccgatttttctattaatggtttctatgcaacatcagattaattaattcactcaaaaataaactatggagtagatgtagatctaatgattgcctttttacatagatttctattaagttaggttgcctcaccaaaacttcacatatagttattgcctgaataaagttttacagttgtttcggatattaagaattaaaaaaaaaaactgaaatgaaactagaaatcagcaaattttatttggacaaaacctaatgatttttttttcaaaagatttataagaaacataaatacataaaatcttaaaaagagagagagagtgatgaaacacaccggcctttgtaaacgatggagttgcctccttctccaatcatctctcccctcatgatgtctttagggttgagaagcaactctctgctgatattgaaatcgaactggttatcagactcatcattattgtcatctgagccaaacgctgacatgaaaaaagggtagttcgcattaagcatcatcgtcggagaaatggccatggttggagctcgcttgtacttttgatgagtagaaatcatagtgctgagtgaggaagatgagtgaggaagactgtgaaagtgtttgggttatatagaaatagcagtgctgagtttggggctacttaagtaatttcaagaattgtattttagagggcataaacaaagaaagatattgttatgtattaattgacaattataacttgaatgggaaaatataggaaaaatctaaaagtaattcttatctcttaaatgtaatttatttatttattcaccaccacatgtaatgggtttctcagaatcttatcttttaagtaattttttgcatatatgtttaacagctcatttttcctttttgtatttaaccatactatataaatatggactctatacggaaactaaacttatctaaaatttgaaaaatatatattctattttgcttctaacactatttaggagtttttttcacaaataatacttaagagttaggacttcagtttctatccaatttgttaaataaaaatgggtaagacaaagataaaatgatatatatatttagtgcaatgtaaaattatagtcaaccaaaaaactgttttatcataaatgtttctggaagatataccaacagaattctatggcctagttggcagttgccatgagtttgaaaccaatagtagagaccactttcataggtactttgcgtttgaatgattttgagcttgtttcatacacttttgtcaataatgtgggtgagcttttgagctgagatgggaggtctctgcatattcatccatttctttccctccatatactacgcaaagtgagatcaaacgtatacctaagaagggacttggggagaattgggtgggtggaaccttgtagttggatgatgatgggcgtcccaacttattgtgaatcggctttgaagaatatctcggggaaaatatgattagatttgagctgagtagctacaggtcaatacctcggaaaaaattgtatatatatattaagaaaaaatatattttcatcgccaataatttttgtgagaaaatataaagtagcgaacttaaattgaaaaagatcgctaccaaataaaaataaataatatttaacgatcgatgacataaatagaaaaaatactaaacgatctacttactaatggttttattcaatattcagttaacataccttttataatataatttttgaaatataacggtctcaatatcataaattaaattattatacattaaacgatatatataatcatatcgtactattttctattttattaaaatgtcaatattacgactaccacaataaaaatcaacctttttagttcttaactaaactttaattacgttaataatagaaaaaaaaacttgttctttataaaagtctcaatcaaaactgcattcaatcttttattcaacatcattttttctttcctaaaacttttaagtagaatgcaatacatgaactttctgaagatcacccatttaagtattattctcgtccaaatatgtttaaatccaaagttttgatgtaatatgtgcattagtgctggtatgatgatcgcattcaaatttaacatcggcaaaaaccaaaaagtagaactaaaatttggtttcaacaaatatcactataattatcataaatgtagggttttcgaatagacatatctgtatatacctacacaatgtgcaccctcctttaaatgttagacatttcaactagaaaatgttagagaatgttaaaggagggtgcacattcagaaaacgttacatttcaactatgattatcatttctaatagaaaatgttacatttaccaaaaccaacttgagatttagtcagtacatactctatatagttacaacaaggatatattttctgtataaacaaaaatagttgaaatgtccatgaaaagaagaacgagaattcattgctttaggaaaaatttcctcacaaaaaaaaaaacagaaaaaataacaagaaaacacaaagaagaaagaaagaacaaacactaacagaatcttcagtcttgtctttccttaaatccaccaactttccattttttatttttatggaaagacacaaaaaataatcatggcttgtagttgtacaaccaaaccttgaacttcttaaagaaaggaaatctcatcttcaccagtttcttcttcttcttcttctccttaggtttcttcaccttgcaaaaatgctcttgaagaagaggagagttctctgattcctccatctcaccttcataagcttccccatccggtagtgttgtgccaatgctactgtctgagctcattcttcttagcaagtttgtcagcataaccgaaatctctttaaattccggacgcgcatccgggtcttgtgcccaacatgattcaacgattgggacaaacacgtcgggagtcttcgtaagtattggtctccgaccctgtaataaaaagatatccaacattttaaaaccttattccttttaagttaaaaaggatgatgtgtttttatcaaaaaaaagttgatgtttgactttacttggctaacaagatagggaacaaagaggctattaggcacgtcagggaatggttcttcgttcgtaaccagctgccataatactatggcaaagctgtaaatatcagccttatggtcatattccttcttctccccaactctcagcggctcagggctatacacctgtggttacggaacagaaaatatttagtttatatgtttcgaaatagaaaactaagctcaaaatgatcactacctcaggagccatccatttagaggtgccagcctcacaggtcatgccacctctagtttcttctcttgcaattccaaagtcagccaatttcacatgtttcagatcaccggttaccaacaaattccctacacaaaacacaccaaattatcaaattttgtttctctgtttacaagaaatactgagtaaaaattggcgcatgtttattgtttacttggatttaaatcacggtgaatgatgccatttgagtgcacaaactccatggctcgtgaaatatccaaagcaaagcttagtgacatctttaggtcaagaggacccggacgagagtgcatgaacctctgtagagtgccgccttcaacgagttcggtaactataatcaattgtggttctatgcaagctccaacaaactatatatacatcatcaataatcatgtttatttattttactttacttttcaaaaaaaaaaaacatgtttaatatgtcattattataacattaatattgaaaccaccaatataaatatatatttctcaattttcaccttcacaatgttgtcatgtttcatcttggatagtaacagaacttccttttgaaacgtttttttgtgcgctttggttacagcggaagttgtactcggatccatgatcttcaccgccacgggaaattggtttcttagcctataaatcatgatagagaacatatgaaaacttagtgatgattaaactgattaaacgcatttgaattcatcaatataatatagcgagagatgaaacacacaatcctttgtagacgatggagtaagctccttctccaatcatctctcccactacgacatcgtttcggtcgagaagcaattctctgctgatactgaaatggaatggctcgtcgtcggactcattgtgagaaggatagtttctgaaaatcattcgagatatcattttgaagaatggaagtgagtgaggactaaggatgatgagtgaaagaggaagagttgtacctatttatagtactacaaatgtgggtggtaattctgtaattctgtatgtagtctaaaactggatggttatgtgggagaggaaaaactgaattttgtttcatgtatattaattgacaattaatggtaaaagaagggaaagtattgtttacccaattagcatgaattgcatgacatggttttgttactaaccttatctctttaagtaacttttttttttataatttattcaccaccatatgtcatgattttcttgtaatcttatctttaagtaaattttttcataaatatgtttaacacctttctttttaatttttcatataaccgttactctatactgactatacatatacattgtggacccgatatgtaaatatgcaactcttttagaagaaaaaaaactttatgcatgacgtgcacaaatgtataccacgagaaaaaatggtaaaattggaaaaactacattatttttcaatttctatttttttattttataaaatatatatatatatatattaatgtatttatttgtatcgccaataattttaatgataaaatagaaggtgacacagttagaatgaaggcgataaatatttatttttttaaagtgttctatgatcataagtattaaaaataatagattcactaatagtttttgttttctttagttagctaagaaattatgtgccgatacatcttgtaagtctagcccctacctaatactttataatgtatgtagtgaattttcttctatttttattattaaagattggataaaataatcattcaagcatcatagtccatagtaatcttgctttgtttcgcaaccaagtaagacatctcaattgcgatatcatggcgaaatgttttcaaactttcacgtctatgttgtatcacatatccaatttatgccatagacttggtggagtgcatatctaaatcccacaatgtacgtctaggatatagaagagctcatgcagtcatgctaatacaagttggatatgtgtattgtgtatatatgaaagaattgtgattttagggaagagacacaaccctgcgtattgaagaagagaggacttcaaaattataaagatgagtactaaaattttctaccttaagaaataagaactcaaacgaaaaatacatttagacttctttcctcctaattttaaatactattcgatcgttgtaacggaaacaagacttaatagttaataacttaatatgggttagtttgggtcaagatttagaaacccatcagtattgtatattactttcacccacaaaaactagtttttcaaagcattagttgttcagtaaaaaggagactagtgttttacaatatacaaaagctgtgaaaatatgttttacaatttaaggctggtcctgttccttatttcctttgttacgttttaaattcttataatttttacgaagattgtaacgagttttttttttttttttttttgtaatgtttcaacagaaaaacgacggtttacaacagttagagtttgacccccccaaaaaaaggacggtttacacatatatagaaatactctgaaaaaatgagaagaactggaataacaaatagtggaaaaagaattgaaaaaaaaaatgattgaattaaaaagttatagtcgaagatcactttagctgcgtgttccaaaccaagtcaataagagagaatcatatatacaatttgaatttcctaaggagattagtaatgattagctaattaaaaaaatcttcatatataactaatgcaatttttttggtgagaatataactaatgcgattatcatcatcataatgattttgtatatcatcagattcctatactcatgaatcatgattttaattcaccgtttcatattgacgtcaagtattaaatattaatcatatacaaccatatttgttaccgttaaataaccgaagacttagcaattaaaaaaggagctacttattatacaaattaaacactaattatttattttacattgtaaaatacattactgatagggactagcattgaccaaaacaaaaccacgtgataccatgtggcaaccaagactcggaaactatataatacaagatacccaaaagggtaaaacgacacgcagtttataagtaacatactataaacggtaagcgttcctaggcaccacgtgccatgcacctgacacgctccaaaagatgctcgctctcgtcggcgattcttgacaacgattcatgcgccactccaccgtcgcaactcagcgattcggcagcggtctctttcagcttctttatcttctttctcatctcagcaccttcctcctccaccatgatctttctcaccaacgcctcgatctccgccctcgtaatcactccctccgacggtagtttcttagagcggacggcaacgccaagctcttcgttgaggagtgtcgcgttcatcatctgctccgcaaaaagtggccacgcgatcatcggaacgccaccaacgacgctctcgagaatcgaattccaaccgcagtgagttagaaacccacctacggcttggtgggccaagatctccgcttggggagcccaagaagagaccataaagcctctctcatgagtccggctaacaaaaccttccgggagataatcaggtgtaccgtctcgtattttaccactgttagcggataaatatgcactgcaagctgaaccgtccaccgggggtcgaaccacccaaacgaaccgttgctgactcatctcaagtccccaagccaattcggttagttgtttagccgagagagagccaccgcttccaaatgaaatgtaaagtaccgactcgtccggctgtttgtttaaccaatccaaaaccggatgattagttttagatggatcaaccggtctagacaaaggaccaattggataaaccggtacaccagcaattcgacccaagagctttgggtcttgaagagatttcaaagttttgggctccatatcatcccatgtattcacaataataccatcacacgttgggaaaaccgaaccgaaaggaacaaattcccggtagagttggctgtttgggtcaaggaatgtttcaagtgtatcttcaaaccgaaccggttcacatccaggcataaccataggttgcttcttgattatgtgctcttcttccatgtctttgtccaacgttgggaaaaacaaagccaccgcgagaaaacgtgcgtttgaagcgatgaagatataagtcaacatgttgaactcaccaccgagcggtatcgcgtccaaaccaaacaagtctacgatcagagccgttggtttgtgttgcatctcctctatctttgaccggatggtaggaatggtctcacgcatcatgaccaagagcttgatcccaaaaaaggctgatgggtcgactaaaccggagatatcgggcgttgggaggccaacgatatcaacaagggccgcgtcgcagcctggtgagttaaggaattgagattgagctgaggctgcgtcggtttcaaggacgaaaatggtgacatcgaagccgtgggaaccagctaagcgttttccgagctcgatcaccgggatgatgtggcccattccggggctagcgaacatggccacatgtggttttgtaatcttcatagcctagatcactgaacgttggccttttttttttttttttttgttgttgttgttgttgttattgtgtcggtttactctctcatagttgcaagtgagttgaatatatagaaccaaaagactttataactcatttgtaagtatctttaaagtcttatctatatatcactttcattttttttgttttatttttgatatcatataccagctttaatcgttttacaagaaaagtaaatataaacatggaagtgtaaatgtatctaagttaattgcatccatatcgtgtatttatttatatagaaaagaattgaccacataagttgtcgcgtgaatgataaaaatgttgaatgcgtcgaccagaagataataatggtaagcttccgacttgtatatgtatatatgtgaattactagctcataggccataatgcatcatatatagtatgtcatgtcatgtatacataaagattcttagatgagtttcttgtacttattaaactgacaaacacatcgctaaacaaattcgaaacaggccatcatcgatacgagttatgagataaaaatgttagataaatactgaagtactgtacaagaagctaaatctttgtattattatctttttaaaaaaaaaatatgcacttgatgtaaaaacgttggtttttggggttgaataaattgtatattcagttcagaaaaagaaaaaaaaaaagagaaagagagttttctacatgcttgatcacattctcaaataaacgtctctttatgaatttcataaatgatgtaatagttatatctttattaagtatagaattcaaaaaaaaaaggttgagttttataaatttcgtgaattatgtcagcaaaatgtattactatatacttagatgcttgaaccatgccactgctgtaacgttgaaatttgctaaaatgatgttgcaatttgctcaaacatttaatgttatttgacttatcgcagtctaggtcctcgtcatcttgatattttccctcattttaaaataataagtcatctctagttttgaattagttttcgggataaatagtattttctctattttttaatatttatgtttttttagagaaaacatacatactaaaaaaatatatatcaaaaactgattattaatatattattttttgtaatttatattttttattaattctaaaccaataatattaaattatttattttgaaggttgatattcatcattaataaccaattaatattgcatacaaaatttaaaaaattaattttcttaaaacaatttttttctaaataataaaataataagaaatagagagagtatatatctcattcatgttttcatttttgaaaaacgtgattgcgattcattcagcttttacggtttagtgttttgaaaacgtaataactagacaaaacaaattaaaactaactttacaacgttttataatttattctacaaaatctatatctaattcagtttgttcctctaacaattattcaattatttcctaccaaaaaatcttcattctagatatatttctattaaagaacaaaacactgagtttaccccaattgaatctttacatctaagattgctagtttgctacacagcataatttgattaaactcgaatgaaaaaaatatctcctatttattctttgaagtgtacaattagttaaaaacttaaaatagttgacatatcgcaaccacattaatgctcaagttcttttttttcttttttcttaacatgcatgacatcgttttgtaagatgctatgagatttgagtttagaaacaataaaattacataaaaatatgtcgtagaaaattgtattgcagaatattattagctagtgtatattgtttcttaatgcaaatctcatatcatccttacaaaaagatgagactatgcccatccgagtacaacatgcttgcgaaattaaagaagttatcaccactttccctgacaccattgactaactttttaacatttttctcaatatgttccgatttcaaattcatgtaaaagatctatacatttttttttcaaaactaaaaatacatttcagcatacgacggaaacatgcaacctagtgatttatactgtaaaacggttgtcatgtatcataacttgagttcaaactcgacgacagtgttgtcaacaatttaaaagctacattttagtatgacatgccttgttcacatgttttgtaagcggaattattcaactaaatttatatgatggacaattagcctctcttaatacatatacataaattttatataacacatcaataaatcatagttttagtttgaacagattaatggacttcctttttccaaaaaaaacagattaatggacttccgatacgctcatttttatgaactaataaaagtacttctacattacatagactgataaacctgaactcatgtcatgtttatggggcaatgcatcttagagatcagacaaatattatcttagcatcaagcgtccccagcctcataataaaaatggtttctatcaacacttagttgacttgtatagttggagaattattcaacatttgattttttcaaacaaaatcaatcagcaatggaatacgtgagcagtgccgtattgagacagaaatatcagcttctcgtcatgggccagttgaatattggcctactaaatgccggattacataacgacaccgtgtcggatgctaatagcagccgaaaattttacgattttttttctttttttgcctgatgaaattaacggtatttctctggagttacgtaatatattttctataacctcaagtagtggttatatataaaagtcataatcaaaaaaaaaaaaaagtcattatcaaacattacatggtccaaaaagcattccatattgatagagcatttatgaaatagtttcggccccatatgaagattttgataatttcttttgacataacaatttggatcaatactttcattaactggactaactcaagctgctaaatgcgtcattgtcttattgattatctagtgcaattttgacgaatagtttcggcccattatagtctactaaatgacatgtttgagcccactgagatggcgaaaaaaactaacatactcctttttttttcttttgtaaactatgtatttattattttatatgcaagaaatgtggatatccaaaaccaaatggtatgtggaaccaaatttgataataaaaaagagggtatatgcactagatgaccatgaaattcataatattatagaaactaaccatggacgtatagtacctgtcggaaaccaactttaaattactctcatatccttataatagggttttggttgaggggacaaataactttataggcaaatagctttactactaaagctttcataacctcctcttcccttacaacaataaccaccactagatctgtaacaccaccgcctcctccgtatttagtattactagatctgtaaacactaccgcctccgtattcaccaccatcatatccataacaccaccgcctcttccgtattcatcaccatcgccgtttacttttgttgacatgtatttttattttaaaacattgtatttttcaaaatttcttttaaataatacttgttctttactaaaattacaatgatctgtgtgtctcaattcaaacgatagcatgtaatttttgaataattcatgctatttttctatttgatatgtatattttcctaaaacgtttgtattttttgataagataatattttttaaagataatgtgcattttactaataatccatgttttctactaaaatcacaagtaagttactgattcatgattcatgtttttttttataatcacatgcaaatttgtacaatcacatgtaatttataaataacacatatgtggtttgcttatctctgttgaaaccatttaccatattgtcaaaacaataaacctacgttctaatgtaataaaaataaatagcatgtccttaaatatcttatgcaacacttctatactcaatcacaactgtttctaaatggctatcttttaactaagtttttttttacgtatacatttttaaggtataagagatattgcatgtgattttaataaatagtggtctaatattgcatgattttttaagaagtagcggtgtaatcattacttcatattgtcttttgttccctacatgtagcagctattgtcggaaagaaagagtttctctcatctgtaaaggttaaaatagttattttgcaggctcaaaaaagttatttacccaacttttctgtacaaaaactattttcttaataatgctgtcaaatttggtcatcctctaatattaccctaaaaaaaataacatgaaaatgacccgaaaaataaatagtgtgagttgtcgccgaagacaaaaaacacattcgtttcaattcgtattagagtgtatatagttggtttagttatggtttagattggttagtatctttggtttagtttactatgtatttaagtttaatcatgtatcacattacgtttaatgaagatttcacgattattgaaaattcgtacaaatataaaacacaattgttgacaaatatatataaaccaagtgaactaaaaccagtcaaccaaaacgtaacaaaccaaaactaaaaattaaatcttcgtaaacctatgaaaaagctaaaataaaatcagtatttatgactgaaaaataaataaaatgtgaaaattagatttaagcccgaatcaacaactaaaaaggacgatgcatcatacacaaacaatctacgaaaaaacaaaaaggttaatgatactgccttttacaaatatatcagtctcattcaaacttttataaatttccttttaaacgtgtataaggacagaagtctcaaaccacatgaaccaaccaacttgtcatgtttatagcaaaacagaattgtccaacaataagatcaagtcacgcaacgatagattcatatagtttttttgtgtgtttctcattcaatttctcaaaagataatatcaaaattacaggtccactaaaaatggtgtgtttatatagataggcacattgaaaaatcatgcgtggttagagatcacattcacatgaccccatcatcacatggggagtggttactctcactttcacacacttgcatttttcattatccaccattacatataaaaaaaaaaatactagattttgtgaaatgaagcattgataaatgataatgactgtacaaaatagtcatgaagacaaagaccaatctattagctacgatttaaccggaaccaatctcgtaccggacccgactaaatagttaaaccacgatattaacctagccgcgtcctttggtgttgtgacctagcgtcagctccaagtcatcgataccaacatcgtgaatcttctcaccttcccacggcttcaccgacacatctactccgacggagctaacgctttttccgaccaggttaaatgtcggcgacggaggacatgtctgagaaacgttaaccgattggaaatttccccatcgacaagaatcaaccgtcgaaacatccgattcatcgcattctggaatcgatgtgtagtgatggagacgccgtgttgggcttgacggagctgagactgggaaattactgctttgccatctcggaagtctcggatttgatcttctaggtgaagaaatcggcggtgtaacaggggcactattggaaattcgtagaggagcgaggtttccagacgaagctaggttttggagatagggaatgagataagtcgaggattgattcgggtcaaaccgggtcggacttgggtaagatgacgatgaagggctagcttgatacgaaggaattgggctttgaaaggccgatgattgtggactaagttggattgacgaacacggcactgttgtttctgttggtcgagaaccctgacggaaaaaaaagtcaattcaatgtctgaaaattgtttaaaaagaatcaaaatttggatgaatctgaagttaaagttgaaacctttcgataagtggtgccatcttcatgaacgatccaaccagcttcaagacaaagagctttgaggacttcattgttgtcacagtgtttaggaagtttataattgccttgagatctaagtccggtgaagattttagctgctattgctcttcttcttctttctctcttcttgttgttctctctttccttccacgtcggcatcctccccgtcgccgccgttgatcctcctcctgatgccgtcatcttctatctcccactttctctgtttttgttttttacttttcaatgtctgggtttttgttgtgtttgcgtaattctcgaggagagaaaaaatgactaaagaattttccttcacgaggagaaaagagaggcaaaagttaaataattttaatagagaaagtttcgtatttatatgatttgttacgtatattatggactaaccatattagtcaaaataaattttgatgtgattgtatgtttgtaactaatttggcataataaggaaaacaaaaggtgaaaaggaggtgagaatctatgacctcacgtactgattttgaagttgggaagttttattattaaaaaaaaaaaaaactactttgttcatctgacaatgttcggtggaaaagggataataatgtctttgagtttggtttcttcgccgtaagatcacaatctgtgtggtttaatccaacggacaaaacatgtcgaagaagaaaatggttgatgaatgattggttaaaaaaaaaaagatgccatttgggtttctctggtaattgtggttcataaaatgtgacgatgaggttaaaagtttgaacggctcagattcaatggtccacactacacagcaccttctgctccagtcaggtcaacatgggaatcatgtatatgttacgtaccagagatttgtgtgccctggtgtgtgtgccacacacgtgcgacacagaaacctcgagccggaccggagctatgggacccattaagccttcgagccctacaatgcacgtgactgtggggatcaaaaattttagtatctttttgtatttgtcatgaattctgtctactacgatagtatttctgtaactccctccggttcgaaaactgtgatccttattcttaattctcggtttagaattagttcattgttcataatcatttatctgaaataattcgatgagacatgtggcaatttgtattcagataagaaaataatgtgataataatgttagagttagttgaccaaaaaaaaataaaaaaaaatgttagagttagatccagagtttaaaatgggccgggatcttaggcccaatggacatttgatttgtataaaatttctctaaaacccctaatatccagataaatctctagcaagattcagatgtgtatgcaagcagtagaacacgcaacttatgaggagacctttcttgcgcaacactcgtctcgtatattaatatatagagatgtagaattgatataagtctcttttagcttatgttattcactactctcatgtaactataaatacatcttgtatgtttcttttatctcattctctcattcttttccaggaaaatcataacaaaaacatttctgggaaaatcatcatcaattttcaacaatttcttcgattcatcttcatatcttcatcttcatcatcatatcttctccaaaattcatcatccttattgtacgatgagagaatcaagccattgatgctccattttcttcatcatttctttcatccaccaaatcgaagaaattgttactttcgctatcatcttcatcttcgttttcttcaattcaatcatctattgatacttcggttcttcgattctttgattcatcattgattctatcatcattcatcgattctttcgttcaacatcatctttggttcaaaattacaacaatgtcgacagatcaatatgataattcgttctttcttcatagctcggatcatgctgggttggttcttgtatcagatcgtctcaacactggagctgaatttcattcttggcaactctctgatttcttggaagtcaaagaagcagaatgtggcaagtagtagtagtacagaagctgagtacagagccatggcagtggcatctgatgaaatggtttggttgaatcagcttcttcaagatctacatattacaatcacaactcaagccaagttgatgtgtgacaacaaatctgctatgcatattgcaaataatccagtctttcatgaaaggaccaagtacatagagatagattgtcacaagacgcatgatcgtataaagctaggttttcacaaggtttttcatgtttcaacagctaaccagcttgcggatatcctgaagaaacctctgcccccaggtccttttcattcattgcttggacgaatgtcagtgtcaactctcttcactccacaagaaggttttgattctaagagttgaggggggtgtattaataatatatagagatgtagaattgatataagtctcctttagcttatgttattcactactctcatgtaactataaatacatcttgtatgtttcttttataattaatgagaaattcactttcatcaagtgttaatatcgtatgcacaactatagtggtgacgatcggattcttggtgacaatcagattataatcaaagatgatcgtaataggatcaattccgtggccattctttaaaaatcgaggaccttaccctgaaaatagaaaaaaaaattcatgagtttggttgtagaataagagtgtacaagattgttcactgcactgtgtcatggagaaccagcttttgatatggacccatatttgaaagtaacacgatggatcaaatgcaaagtattttagttgataacaacagacaagtataaaaaaaaataatacattgtaatataattattgctcatacgggccaccaaaatggaacccagcccacccaatacaatctgtataatctattcgagttatcaactaaaatattaagacgaagagccttttagtttatacgttatgccattgtaatgttggttttaaccggtttttgggccacaaaaacgggaagaaaatttgcttcaagttcaaaatagacaatgtagtctgaaaaaggatgtgataaagacataaagtaaatgtctcattgtgcacaagcgtggtaaagggtcagtcctaggctatgatgtaaactcgcacataacttaggacgtctggtttttccattctcgccttacaaaatagcgcttggatggagagttagggcagggtttcttcaggacttgaccaggtttccgtttgggttatttacctggtttgctattgttcagctatgtagaagtcctccgggattagccaaacactcgttgatcaggatacctagtgctaactctacaaaaaacttcacattatatataattagtgtcgagtgtcgacaattggaagtatcttatccaaatacagtatatatggttaattaatctaaccatctttgataaattaatatccaatttttttaaatagcacaattcaaatgaaaccccacgttaaacgcacatgcatggcacatcgtcatttgggatcattaattaatgacggttttgaattagaacaaaggtcgtaattaaccgaaaacacggctcgttttgttagttgcaaatcaactagagtagtccacacatcattttcaaacgagtctgttactttcccatcgacgtctacacattaaggaaaaaaacataaatacaaatccaacggaacgcttttgatgcaaagcataaaattaattaaaaaaaatatggtagattaaatcgtaatgagtagagaccataatcatatgttttcttgtagaagcatctttcaacaagttttaactgattattacatttgtcatttcagtatatcttttcaattgaaactgcatcatatcaaattatcaatcaccatatttacaaaacaaagtcaatttctttgttagattaccatttttctcctagttttggtaaaactctcctaatggggtggtaggtcaggtgccactcagagtaatacaatgatacgtggcaaagcctaagcatgtgttctcaactcccgccaattaattacgggtcgaacggaccggaaaatcagttcatcgctttaacctcagaattttcagacaaaaacaaataaatagctttacttttgtaactaccacgttcatttacctctcggagacacgttaaattataaagaacaaaaaatgagaagagaaaattacgtaggtaatagcatcccaaaaaacgttttataaggttttaaaaggtaacaatttgaataattcacgggagagaaaagggtgataaagtgtttaatacaataagactgagtactcctcttaatttattaagctttaacacgtaaggcatcccatattaaatgtgatagtgctaatacgaccactcaaaatgtgtcacgtacaaacattgacaacaactttattaaccagggaacacacccatatgtacctatgtagagatcttaattattctcaaatgtatatgttatctgaggagacaaataaatattttctctaaacataccatattatattaaaactcaagagcaattacatagtttctccaaaatccaccattggttgcaaccgaagtggtgcatgaagatataaattttgcaattgcatccacacgtttatttccatatctttaattttataaacatatgtttagagaggttttgcaaaatatacatcgcagcatatacagaatcatacctaataaaatatctaataataatatatacatatggcttattcattcaggcgtggaagagagtgttaaagaggagttaatactgtttaagaatgatggtaaataaagactgaatcggtccaaaacatttgatagattttgcgagttacccaaacttaaaccttaactcatataaatacatatctttttcctttacgggggacaacacgccaaaactgaaatctcgaggaaacaaatcaacatttaataatgttttttttttctttcttcatggctaaaagataaaataatttccttacataaacgaataatatctcgccgacaaatttcattcaataacattgactttctcgtcacctcctttctattcaaactcactgaaaaaaatttcctaaagagtaaagaaacttctctcctgtcttttctccttctctatctctctccctcaaagctaataaatacaacatttgcatctaacgtttctctagcacaaaaatatgcactcgaagtttatattatatctcagcatcctcgccgtattcaccgtctctttcgccggcggcgagagattcaaagaagctccaaagttcttcaactccccggagtgtctaaccatcgaaaacgatgaagatttcgtttgttcagacaaagccatccacgtggcaatgaccttagacacagcttacctccgtggctcaatggccgtgattctctccgtcctccaacactcttcttgtcctcaaaacattgttttccacttcgtcacttcaaaacaaagccaccgactccaaaactacgtcgttgcttcttttccctacttgaaattccgaatttacccttacgacgtagccgccatctccggcctcatctcaacctccatccgctccgcgctagactctccgctaaactacgcaagaaactacctcgccgacattcttcccacgtgcctctcacgtgtcgtatacctagactcagatctcatactcgtcgatgacatctccaagctcttctccactcacatccctaccgacgtcgttttagccgcgcctgagtactgcaacgcaaacttcacgacttactttactccgacgttttggtcaaacccttctctctccatcacactatccctcaaccgccgtgctacaccgtgttacttcaacaccggagtgatggtcatcgagttaaagaaatggcgagaaggagattacacgaggaagatcatagagtggatggagttacaaaaacggataagaatctacgagttaggctctttaccaccgtttttacttgtcttcgccggaaacatagctccggtagatcaccggtggaaccaacacggtttaggaggagataattttagaggactgtgtcgagatttgcatccaggtccagtgagtttgttgcattggagtgggaaagggaagccatgggtaaggttagatgatggtcgaccttgcccgcttgatgcactttgggttccatatgatttgttagagtcacggttcgaccttatcgagagttaaattttagatgttagttttcttttttggggggtaaaagtatatttttgactgaatgtgtaatataggaagatgaataataatacttgaataaaatgataggaaggataggatagtcgaatgtgtaattagtttggtgatggtagttacttactctcgtaacgcattgcctacttctaaaataattaattcgatacctataaggtaataattgtgaatatgtatatctactctaccgaatgtactacggcgagtaattacaaagaaatatactacagctttttttattgatgaatttccaaatatatatgttttgttttttttgcttttacagttgaatttaaacacatcatcttccattgattatagtatgaaagtttaatattgaatttgagatttgagattttagcagaatatagtcatccacttggttttttccaattataaatctttgttttcctccatgcatacttctgtagtttaagttacaaaagaataccatcagaaaatcgtccactagttaaattatttacaaaaatacacactgattcgtaggcttctaaacattatatgaaaaagtaagtttgcttagtctaaattccttagacttgccaccgtgtttgtgtcttatacattcggctaaacaacttaacagatgtaattgtaaagaaattaaattagaaacatcattagctttgttaaccaaaaaaaaaaaaatcagaatatgatggtgtgttaacgttaattttttactaatcttttagatgaagcatttcaatgtagcatcattgaaggttttctagtgaacaagattgacaatgttaatgattttattatgttttataatgtgatcttttgtatatttttctatatatcttaaaattttgcgtagatttatataaatagtcaaataatttgtgattgtatgggctttttttttctcttcaaaatattagtcaaagttgtaaagaatttatcttcgataatgtaacatctaaaagtttttttttttttttttgtcgtgtgaattgagactttgatagttaatttaataatactttctatattaaaactatatacaagtcatgcagaataaatatgatttggcagatagtgattctaatgacgatattgtcatatggtagttgcagttttttttgttcgattccataattttgagctgtatcctgtctagtcaataataccataatagttgctttgatcattgtacttaatattcatatagtacaaatagtatccagtaatttggttgttttttccttgcgtaaatgaaataaactcgccggccaagaattacgaggttgtcttgtagttaattactacacatcaaaagtcaacaagtcagcgcgttgtcgactacttgattaaacaaggaagcaactacaagtcttagtctatatatgattcttctatttctgtcactcaataatgttcaaaacttcaaatggatcttaggtttgatatgtctaatttggtaaacagaactcacgtagacttattgatcgctgagaatagaactcacgtagacttatatacaatttgttttatatattttgatatttagacttacacattatcttacgatttctactggatttatggacatgtcatatatatagatacgtgaaggtatatatgtaaatctataaatctatgtcatatatacgtgcgattataagattaaatcacataattgaatgattgataagcacatgctataactacattatacatggctatgtatttttcacgaatatagaaaatgatgcgtgtgggtcaactcaatagagattacgtctggatctcgacggattaatatgcaatagtgtagtataccaatgaacatgcatgttatttagatcctttcgttaggtcaactcaaggattatatataacatgttaacatgatctatatagatatagtattagtctatttgatatcgaaaagtgctattttaatactcaacgtacaccgaaaaatgctttaactattctatttaaattttaaagaccaaacatttagttaacaaataccaaataaattaaaaccccaagttatctggttaaaaatgacactaaagctgaaaaaatcccaaatatataagcgttaatcccttaacttctactcggtgcattctctctaaatttttcctttgattcatcgaactcagttgcgattaaagagatattgatggctttgaaaaagaagtgtgagggattgagtcaagtaggtttaggggtttgagttcttaaaggaggtaacttaagagtagttttaccaaatttgtcgtgcaagaagaatatttttgacacttcgtggaagttgggaatggaaatagcattaacttatgatgtctcctttcccatctttattcaaagagacctaaacacatttggtatcgtctttcttaagggtgtcccattaccaacgagactaaaatctccgtttccaccacgttcccacttttctctcagttttttatttctcctctttgttttcctctccaaatgcatatatgaaacaaatcacatatatgaacgttaaaattcatgcatagacttgttgatgactatatatttatcgtagatttcaaattaacagacaattaataaagtatcttctataagatttttcattaaaaagatctgatcactactaaaacgttgaaaagtcaaatatgcatattacatatgagtgacatattaggccggtgaacaatatgccaaagatcagcctaaccaactctcatggcctaatcgggtcacaaacaaaatttgacagacgaagattattacgtttttttgttttagtcaaaatcggacagacgttttttttgttccctagttttcgtgtacgacatcaagactttaacgcgcaaggaaacgcacgttttctgagtgcaagcttcggcatacgagagaggccatacattgacatgaatatacaaagcccacaacttatccatcccatcattaaagaaattttattttattttagtggtttaggtttttcaccttagacattccaaaattgatgataacttaaaattttcaaataagttaactgaactttgtgataccttgtaaagtgaaataacaaatctaaaagttttcgttttttttgtcaatgtgataacgatgttaaagcaaactactacactaacgcattcatattaaaatgtatgtaaaactccaactaatttgtcacaaatttacaagatatcgaggcttgataaggggtgaagctt

SEQ ID NO: 95 - DNA, 129516 bp, Arabidopsis thaliana
gaattcctatccaaaatgaaatttgcatctctataaaagtatcattcaagagatcattaatcttcatcgatcaaagtcttgaatatttcatctatatatacctaagaaagaaaagagttaaagaagtatattttcgattcaaagaagaaaaatgaattctcaccagaatcaaaccggagtgcaaaagaagggaataacggagaaaatcatggagaagctaccaggtcatcatggacctactaacactggtgttgttcaccacgagaagaaagggatgacggagaaagttatggagcagctgccaggtcatcatggtgctactggtaccggtggtgttcaccacgagaagaaaggaatgacggaaaaagttatggagcagctgccaggtcatcatggatcacaccaaactggaaccaacacaacttatggtactactaacactggtggtgttcaccacgagaaaaaaagtgtgaccgaaaaagttatggagaaactaccaggtcatcatgggtcacatcaaactgggactaacacggcttatggtactaacactaatgtcgttcaccatgagaaaaaaggtatagcagaaaagattaaagagcaactgccaggtcatcatggaactcacaaaactggaaccaccacaagttatggtaatactggcgttgttcaccatgaaaataaaagtacgatggataagattaaagagaagcttcccggtggtcatcactagattgattaacaacttgtttaagcttattttaagtatttgtgtggtgtaataatatgatgatgtggctttctttcattgagtcgctaaataatatatgtaagtgatggatctttgaattaatataaaatatctacttctggtttcgtttatttatctttctatcgcttcaactattccatgttattaaaatacttgtgagttgtgacacatacaaccacgtataattcacatgtaattatttggtaattcaattctttacaagtttatatgttcttttgcatacaagttatcagggaaacgaccgcagttgtttggcaatgtatattactcaggttttcaattcaggcccatacggcccaaataagttgtttttacggatatcgagttaaaagaggtgtgtcgattataacggacatgtgtcacactaaccacaaaaccaacgtcttacgtaatcgccacgtgtgtcacttcaacgcaatttgataataatcataatactatatgtgattatgatccctatccaaagttgcggttctataaaaataccattcaagagcgtatacatctttatccatcagtgtcttaattttgtctatagctaaaaaaaggttcaattgtaaaaggaatatggagtcttaccaaaaccagtccggagcgcagcagactcaccaacagcttgaccaatttggaaatccatttccagccaccaccggagcctatggaactgccggtggagctccagccgtggctgaaggtggtggtttaagtggcatgcttcaccgttctgggagtagctctagctctagctcggtatgcttctgttttacgcaattgcttttgcaatatttagtgtactctttctatatcaccaaatacaagaagtttcatttaatttgacttcacctaactagaaaaaatcaggaaaccatattttagatttaactctacatattttttataaaccattttttgtgttcaaatgataagtttttgtttgtaatttgaattatattcaaggtataccatatatttaaaattactaaataaaatatggaaagtgttgcaaatacatatagctttttaatttttctgacgattttcatgcatgaaggaggatgatggactaggtggaaggaggaggaagaagaagggaataacggagaagattaaagagaagctgccgggtcatcacgactccaacaagacttcttctttaggttctacaacgacggcctatgataccggcaccgttcaccacgagaagaaaggcatgatggagaagatcaaagagaagcttccgggtggtcatcattagtttcattttaattaacttgtttggtgtgggtcgttacgcttatggtcgttgcatggaataaattataaaccctctctttttcgtaacatttatggctcaggctctattgttttgagtgatacaaattaaggtaatgttagcacacgggtgggttcacgattctaatcgacatcttcccatttaaaataacaaagggattttgacgttttctattcccaacacaaaggaagacaaaagaaggagtgaaaatcggtaactatatatagatgtaacgaatcttatatccaaaccaacactcacaattaatgtatccccccatccaacaaattaaaagccacgttgacgtgacaaatcatacttggtgacgccttcctctataaattatccaaccatgcattcatcgtcattcccacaataatcgctgagagtccaaatgaatacaaaaacggtgaagtcaatggcgggcattgttctctctcaaatctcacttgttgcgctgtttcctctatgtatttgttatcaaacacatcaaagcacgagctctgtagcctctctatcccctcagttttacgagaactcgtgcccaaacgcacaagccatcgttcaatcttacgtcgccaatgcatacttcaatgaccctcgcatggctgcctcaattcttaggctccatttccacgactgtttcgtcaatgtttgacaaaatctagtctattcttcagatatataatgttttgatttaaataaggagaaatgttgtttgatatatatatactctggttggtgcagggatgtgatgcttccgtactattggacagtagtggaaccatggaaagcgagaaacgatcaaatgcaaatcgagactctgctcgagggttcgaagtcattgacgagatcaagtctgccttggaaaatgaatgtcctgaaacagtttcttgcgccgatctattggctctcgttgctagagactctattgttattgtaagtcaattctctaacacaatcattaggattgatatataattgatacaaacactcgttacttttgtaattatctacagtgtggtggacctagttgggaagtatatcttggaagaagagatgcaagagaagcaagcttgattggttccatggaaaacattccttctcccgagtccacgttacaaacaattctcactatgttcaactttcaaggacttgatctcaccgatcttgttgccctcttaggtatatatactacactcgtccaagatattaatgtggttgaatttaaaggggtcttaaagcaattgtgattttatggaagaaactaattaaaagtataaataaatgttaataacgatgtttgtgattggataagaaaagttatcttatctctctattaaagattaaatgccctaaaaactaacacattgataaatttaattatcatttctaaattgaactaataaccatgattcaaatgtagggagtcacacgataggaaactcaaggtgtattggtttccgacaaaggttatacaaccatactggaaacaacgatcccgaccagactttgaatcaagactacgcctctatgttgcagcagggatgtccgatttcgggcaacgaccagaacctctttaatcttgactatgtgacgccgactaagtttgacaattactactacaagaatcttgtgaactttagaggactcttgagttctgatgagatattgttcacgcaaagcatagagactatggagatggtcaagtattacgcggagaatgagggagcgttctttgagcagtttgcgaagtcgatggtgaagatggggaacatctcaccgttgacggggacggatggtgagatccggaggatatgccggagggttaaccatgatgtttgagagagtttccattattggatagttaaaagtcctaagcgtttggttaacgacttaacgttaatctttttttttttttgttaaatttgatttctgttgccattgtgtttaatttatttttatttgttctaattaatttatgagtttggtgattgtatggtataccaaaacgtcaaaaacataacgatttttatggcaactgaaattgctaatgaatttggaatgtgatgtgcctatactcaacaatacaaattttgacgtgacaactccattaggtgaaatatctttctcgaaattatggatgtaacttaaacatctaaactagaagtatcggaatgtttttaagaggccctagaaacataaggagtgatgttgtaaaggagttttgttttgttgttagaaaatttcaaagtggaagtgagacacatgaacaaatttgtcgcacttttacaagttgtgttctggagtaaactttacactcttggcttttgttcaaagaagcacataaaaaagctttagacctttctttactttaagaaccattattattgccgagatcacactcgggtttcgttcttgaatacacattattagtagtttaattaagactagagcatcatggttcttctataaggccacagagaacggtatgattttactctgttttgcttaacttgtttaagaaagagagaatctcttgagagacttgttcagacttctcctgctggataaaatgatgaccaccttcaataacaactatctcaagattaggcacaacaatcttgaacacctctcctttcacatactccattgttccattaggtccttcatatccgatatctttgtctcccgctataaacttagtaggaacgacgattttggagtcttgccacggcgccaatatctcccaattcctgtcacattgcacattttcaatacttgtttttgtaacaacaaagactggagataaagtgagagagggaagtgaacaacttacatatccatggatctgtagtaattcaaagggccagtgaatccagatctttgaaacttttccgcatacacttgaatctcttcttctgttatccaatctggaatcgtcgacggtatctcaagatgatctatgatctctgtgtcaggaggagccactaagtagtctgttcttgttattagcaagaacttcttcattaccgataaacaatcatgcttggcaaatgcagcctcagctcttccgggtttcttgtaaaaaacagaaccgagaaatcgaatcaacgacaacaatgagtaccataatagtaacactaacatcataaatcttgaaagtaaatttgggttttacctgaaactgagtgatgtataaaccatctccaaaaattttgaaaaaatctgaaggtttgagttttggatctcttgggaaatatggaacagagagacttatgaaacctttgactcggtctggtctaaacaagcatagacaccaacctatgattgctccccagtcatgcccagccacaaaagcctaccacagtaaaaatgtaaactttcttctccacaaatctatctatctaaatctaaacgctggattctcaagaagatcatttttcacctgagtagtgccgtagtgatcgagtaaaccgatgacatcagcgactaggtgactcacagtgtaagactcgtggctcggtagagaatcggagtcaccgtagcctctgagatctggagcgaccacgtggtaaccatggctagacaagaaatcgatctggtgacgccaagagtaccatgtctcagggaaaccatggagtaacagaaccaaaggcccttcttcgtctcctttctcagcaacgtttaaccaaatcccgttggtcttgatcttcttctctctaacagagctcgtcatgattcttgttggtgatagttgtgagagagaggaggaaaatcagcgaccaaggtgaagactttatcacaagagttgagaaatggatgcacacatgacgtggcggaatatgaaatcaggcctctagttagattacacgtggcggtaactggtcctgattcagtttcatgggttgccgtaagtaaaagaatgtcagccaaattcatgaaacaagaaacacatgactggatataaagaacacaaacgtcaagtaactctcagttcttcagacaacatagcgagttaactctcaagagaacatgccaaacacaacaaagaagagtaattctctaactcaagacaagaaaagagattgtcatttaggattatttctatgtttgatctcaagaagacattgatttcttcttctcttcttccagctgttgaagctcaatcagtctttcagcccatgctcggtccctagcgacagcagccatcttacgttccacttgcttaattctcttcttcctcttcgcctcttgcaccagcgcttgcctcttcttcttctcagactgcgaaaaaaatatatacacgagaactccatcttattagtaaactaaaaaagaacattgcagattgttttgtaaatggaaacagaacggagaagctaagagagatacagccttttatcatcccataggttacttatgatttctcagctttcaaacttatttctcatttgtacaatctattgattcaacattccaacatttctcatctaacaatgtagagctatgcaaagatcaaaaagctatcaaagttcttaaaacaagctagaaagaaatcagacaaaccagtataaaagcacgacgctgccctatgcgcttcttcgcatttcttctcttcacacttccctcattaggattgtttgaagaaattggctggccaggtgtatattgaacgtatgcataaggccctgcattatcctcaaatcttttaattcatctaaacaatcccaccgtagattatctctggctatatcaacttctcagtaacaacacccaaaattgagattcaaaacaatcactttccacttaagattacacaagatcaatactatacccaccaaatgctaatttgaaaacagcataaacaacacccgcctaagaagattacactaactccattctgaatcacacaacattcatctctaatttcacaaacaaagcatcaatttttacaaccccagactaaaaatgaagctcaaaatcaaccatcaaacacaaaatagcgaacctggaggtttcaatttggatcttttcctcttgggatgagtcatgggtcgtctcttcgggagccgagtatcagtcaagcttaagctatgaaaatggttagccattggaatccatggtaacctcaaatgagtcatcgatccaccgaagaaggaacataactcgggtttagcagccggaatcgtcgcattgaacggcgcagacgagtagttaacgacggcacgcgaaactaaggttctcgacaatggacgcaaaatcgatctaattgcaccgaaacccattttcaccaaagcatcagcgaacagattccgatccaaaagctcctggatttaccgatcaagcttcgaaattatcacttagccgattccaacaaagttcgagacttgaaacgaagaatttttcgctaaaccctgaatagtctagtaaacactaatgggccttatgggcctatagtgtaagggcttataattgaacattgggtctcaaagaaaagactcataataactaaaatcaataattcgtgcggatattattaattattgtctccaaatctcattaaatgttttggcgagaattacgtgatattccctaaagatcaacatatacatttttacagccatttatttacatgaaataaattttggagttgggatttatttacaatgcttgtcactgacattaattatttagttaaaaaaaattaaaaagatattaaccaaactatatcttgcctaatttgtttctaaaaatctctacacaatcttttcatatatctttttaaaaaaaaaaatcgtgaattttacttcaaaaaatatgcataaatccgatttatagcaaatatttatatcaacattttgcatagcaataaaaatactaatttataataattaaatattcacataaaaaaccatatacacatacaagaaaaaaaaactatatttatcatcatttaaaccgttcttttatttaaattaaaagcacaaaacttgaaatcatatactttatatgataaatttaaaatctatattagtaatataaattttaaatcattcaaggaacggtataccacgggtgagatcctaaattattggaattagaacaataataatttattttcttggattttataacactaatcatttagctaacgagataatatagacagatttatatgggatgacgggttttgatcaatattaataaacaaaggtatatcacagatgaaatcataaaattaacaatcaaaatacaatcatacaaccttaaacacaaaaacatacaatattaacaaaacaaatataacttaaaattttaaaaaatagctataaaaaatcgacatgcggtatactgcggataaaatattcaaaattttaaaatctaccatacattgttacttaaaaaaatatatgttttcatatctatacttcaaaatttgaaaccaaaataatagtaatcatatactaaataatacagagatagatatctatattttaaaatacaaattaatatgatatatcttcaattaatcttttaaaaaataattttacattttttaaaaaataatagctctgcagtgtaccgcgggttaaattctagtatagtgtaattatggaggtagaagagacttgcatcctaatttataacgattttagaatttggattagtgggtacactacataaggaaatacaatattataccattaacgacactaactcgaaatctggaatcattttagtaatatatagatagagttaccatataaaaataaattaaaaatccaaattgtaatcttcaaaccaatataaatatatatacaccatcctcgttcatttgcataaacatcttcatacttcttattttttcttcatacacaaacatgttttcgtcaagtcgtacatctacaagcctggtccgttttcaatctatcattacatactcataatcatattactcattttatcctttgctaattcgttacatattcgaatgttttcttgcagacttgtgggtttaaagtgaacactagctctcccgaatggcacaagagcatgaccaaaatcctcaagaaaatcaaaggttttttttctttctataagcatatatatatatcgcacatttttgtcgactcaatctcttattctttttatgataatggtttaggagggaatttttggatagacgtggacgaaggaatggcatacgtcacgggtcatggcgatccaaacaagctattgaaactaatgggttcaaagagaggaaaagatgctgaaatggcttttgtgaaaaccggaacgcaacatcatcaacatcatcatcatcatgatcccagtttttacagtcagagctcataccccggccaatggggagggtactaccctgttggctcgacgatgcaaccttaccatcaacaatatccatattccggcggatataataactacggttattattagagcccttatttatgatgcttatataataactatatcgagatcgagctaatcctatttatttttacctaaattagggttttcagcttgtatccgacaaaactgttttttttactagcgggatggatattctctctgcgttttataagcagaagagatattctcagtgtttctttttggtgttttttgtatgaatccgatggtattcattgatgctagggttcttaattataaaaaccataacataatggaatgtttcaaagctttgcattatttttgtgttaaggtgcattatttaccagatatctatggataaacaattgcttcggtagcatctttcaaaatgatttcgtggagggatttctctcttttcttagacgaaatgattttttttttatcagattgagtttccattaaacgttctgataatatttcttagtagcaaatggattttgtttttaatagcttattatttgtgtaaatccttttgcaatttaatactacatagaaagaaacagaatccttcatttgtacatatttgccatccgtatcgaaacattgccaatgatcaattcctagcttcacttgtccaatattcgaaccgttttcagaacacaaatgaccttctgaataagcatcacctttaagaaaatgctctctctttattcacgtccattgcataatattttttttttttttgaggacataatgtagaaattagttttcaaatatactttgaagtcacaaagtaattgatttactggataagcaaagcaattttcagcttcaaatagtcagatgagattatagaccggaaccataacaaaggggaacaagttataacatgtcaagagtaatagaacaattaatccaacatcttaagagatatataagagtggaaagcttaagccaagtgtttggcaatggtagactgaagctcatctttcttggctccaacaactttgtccaaaatcttcccttccttcaaaaacatgaaggttggcatcgcctgtatcgcccaatcacttgccaccgactgttccaacaaaaccataaaagagattgtgatcgaagaaaacaatatctctcaagaagaagggaaaaatgttggtgaatgtaccttcaattcatcagtatcaaccttgaggaaaagcacgttaggaagtttcttagccaaatcagcaaagaatggagcgatgaaacgacatggtccacaccaagaagccgtgaaatcaaccaccaccttcaacaatataaccaatcatgaatcattttcattgaaaaaccatttacactaaaaacatatcatatcgtaagaattgtgaacattacatctatcttcagcgtaaacatttttctagggatcccttagtttcatagaattatcaacatgactcgtaatataagtcattatgatctcctaccaatcctaggatctaatctatggtaatgcagatccaagaattgtcataaaattcaaacatgaattcatacaaaaaagaatcatatcattacattgcttaagtatgagagatcaaagactctatttaaaaacgcaacccaaaacaaaccaaatcaagaataataacaaatccatatctcatcaaaaacaaaatgaaatcaagaaatttgggagaagaagattacaagagttttggattcattagccttctgaagctgctcgttccatgtctcaacggtgtggcaggcgatcacttgtccttcttccgaagccatcttctctctttttcttctctgttctgtttcttctcctcttgtgttttttttttttcaattacttagcatgcgcgtcacctaccaatcccaattttgcccgtcaatagtttttctcttctactttattcgacgcgtgattttgtttcccataattacacccaccaattgctactttccttctttacccaaatcataaatattcacacttttactcctcaaagttttacttgtaacaaattaaccacacacaaagcaaagttgtaaatatccatcgtaaaaagtaaaaaacattttgtagacatcatttgtacattatgattcaaatctacagctgaatcagtttcttgaaacaatacgttccaatgatgaaccacccggtaagcaaaaccactagaatcgagcaggaggcaatgaaagtccaaccaccgagtaagattcctatagtgtagactatgagtggaggcaacaaggactttactatagccgttttgttcacccaacgtcccttgaaaagcactagtgtcgcgagattcaccacgttccatccgcctgactttatagatagacggttcaggttgttggctacaaaggaatgacagttgcatgtgagtatgttatatgagtgatgttggtactcttgcgtgctttttctcagtgcatcatcccatgttggctctttctcatgactatcttcttcttgctcatatctcctctcaccattgaacataccagaactggaagaacgagatgactcctgattcaaatccaaggccaatatgaataaattgttactttgtatcaaggttgaaaatgaaagccggcatcttgcaaacgttaccatttctttgttgatttgaatatatcgagaaacagctccaaatgcaaaattatcaacacagacaaaattaggtcctgcaaagtcgaggatgacaccgtcttctctgcagataccgacgtggccgatgaagggaaccagccatgaaatgaagggaagaggtgtccaaacaatgcagcatggaaaccggtctcttttgggatcaattttcataggatccgataatccgatcatcatgcgatgttctgaatctgttgctgtctctcccatatccaaatccagttgagctcaattatttgattctctgtaagcaaaaaacaacacgtccagtgatccccatgtaagtaagattcaataaagcacttggatttgatatgtaaaagttgttcttaatactcgaatagctgatgcatatcatttacatcgaacccaaaacataaatgcatatcatcccatcatggaagtccgagttgggactgagccttccagaagcgataagcagctccttctagccctgtgctgctttggatttttgcatataccaagctactaccaattcattgattactggataaacttgaaacaagagtcgtctaattgatattcaatcaacacattgtgctaaaacactacgaccactacatagaaaagctaagtaaacaattctcgtagttctacgaatcgcgagtcttaaacactaaacgatgaatccatacgaacatggcgaacgagggatccagaaaacgccattaaagatacataatccaactagcaacgagtcaacatcaaagcatcttcatagacattgattccgaaactttttcataaagaatagatcaaagcatacataccagttcaagcgaccaggaagacgattaatcggatctaatacaatcttcaatcactgcctttttcctgggaaatttttgtttctctctcggccccaattttacgaacgatgacactaaagaacgtgtttggctccttgtttaaactaatcctctctcggatatcttcaccgtttcaaggatagtagtataaacgacataacgttcggtcaaagagaacaaaaacgtcaggatgttattctattaaacgtctgatatatctatacggcgtagttttgaagttgtcgactattcttcatcgttctctctgctctggtaaggagattgctgctacctactgatgcaaatctgccattgatacatctgcttgcggttagggcaaagatgaggaaacgcgatttggctattttgatgctctctggatttgctatattcttcactcttcaggtgattttacacactaatcgtcttcttattctttcttagttcaatcaaattgtagctgaacatctagaatcattgatcgatctgttacttgagaaagctttgaattttcctttgtgggtagaacttagactgctaattcgatccgtaagtagtgtcatgttagcgaatttgtagaatttccagatggaaccaatggattcaattttcttattaatggtgcgtttacttgatatgtgggacttgatgacttttgcagcacgagggtgattttgcgttcaaagaagcatggtttcatttgtatgatgaatacccagtcaaatacgaagctgatcgtctcccaccacctattgtagctgatcttaatggtgatggaaagaaggaggttctcgttgctactaatgatgccaaaattcaggtatcatatgaaattttctaacttttgtaggtaaaaacatttctgatttcgatctttctcgccaatttttatagagtctatctggctatttcggtcgttagaacgaatgattgcagcttatagttcagtgcttatgcattgctctttattgttttagagcctttttgtcgaactaatgatgtgaggcttggtgattatgcatttctcttctatggtttgctgttctgtgttggattaagttctgaaactgttgatgttttgttggattaggttctggagcctcattccaggcgtgtggatgaaggttttagtgaagcacgtgttcttgcggaaatcactcttttgcctgacaagatccgtgttgcgtcagggagacgtgctgtggccatggccacaggtgttattgataggtactataaaaatggaactccccagaagcaggttgtggtcgttgttacctcaggttggtctgtgctctgctttgatcacaacctgaaaaagctgtgggaaacgaatctgcaggtttttatcttcttcgttctttgtctaacgttctgcataaaagtttgtcttggttcagtagtattgattctccttttgcttacctttgttggtggaatgacaggaggatttcccacataatgcacaccatagagagatagcaatttcgataagcaattacacattgaagcatggtgatacgggtttggttattgttggtggacggatggagatgcagccatatgtatgtaggatgaaaaattcctctgttgatttcctatgtatcttccatatgttaccaatagattattcttttcgttttagaatcacatggacccatttgaggaacttggcatgacagcacaaaatgctgatcaacacagaagaagtgctactgagaatcaggtacgactatatgatagtttccttggactgtttcgtagctgtgtatatttatagtttccttatacattttctctagaactgaacaattctgaagaaagagctattcgtttgtagttatacatgttccaatgtgcataagaactttgtttggacagtttagaagaattttaagcttcctttcaggcctctgaagattctggagccataaacttgcgtcacttttctgtctatgcatttgctggcaagactggccttcttcgatggagtaaaaagactgatgtcagttatttattcttttctgctcacttctttatctgcatattccttaactacattcgtacctgcaacaaatttggtggtcagattgatagatttttttcgttcttctcatctaggatgttgaagctcacacctcagatgcatcacaattaattccacaacacaattacaagcttgatgtgcatgctctaaatagccgtcacccaggagaggtaaaattaattcgttctccattgattattgagcgaaatagttaacctttccttcgttctttcggaagagatttctattgcactatcataatttgaaagctttgctggactgaagtttgagtgcagggaatttagagaatcaattcttagtgtcatgccccatcgctgggtaagtcttatgcctcctactacatgcttcgttagtgtaatatattagaaaaattgtttcaaagtacactgttgtctttgcatcaggaccgacgtgaagatacattattgaagcttgctcatttcaggcgacacaagaggaaaacattgaagaagcaggctggtagtaagtctacagcttatccgtttcacaaacctgaggaacacacacccgctggaaaggacttgtcaagaaagattccaaaattgattggaaaggctgcacgctatgctggctcggcaaaacccaagaaggtgaagctcttataaaacgtgaactacccacatcaaaaataccaatatttgtttatgatagcaaagcaacatgttgatgcagggtatgcaatacattccgacgataactaattacacgaagctttggtgggttcctaatgttgttgtggctcatcaaaaggaaggaattgaagctattcatttgcctactggtcgaacactttgcaaggttggtcctagtggctgttccttcagatcatgaacaaggttactatttcacgtacctattacttacttagtcagcgtttataaattcttcctgttcgcagctttctctacttgaaggtggacttcacgccgacataaacggagatggtgttctcgatcatgtccaggtacacacatcaaacactactcccgcttttggttcattagccttctcatggatcttcaatttttacgaccataaatattctctatccaccttagactgtcggaggcaatgttggagagagaactgtagtgagcgggtcaatggaagtgttgaagccttgctgggcagtggcaacctcaggcgttcccatccgggaacagctctttaacgtctcgatctgccatcactccccttttaacttcttgcactatggaggagattactcacgacacttcgcccaggcaagagacacctctactctggagatcgcaactcccattctcatccccagagatgatggacacaaacaccgcaaaggcagtcacggagatgtaatcttcttgacaaaccgtggagaggtacttttttcctttctatatatgccgatacaatctcttaatttcttcaactttgaatttcgtttaataatagctcatcactgctccgtatcaggtgacatcatacacgcctgatgtgcacggccacgacgcagtctggcaatggcagcttcagacagaagccacatggtcgaatctcccgtctccatcgggtttaactgaatcagggacggtggtcccaaccctgaaaccattctcgttgcgcattcatgataaccagcctatgatccttgccgggggagatcaagcagcggtcatcatctctccgggaggaagcatattggcttccatcgaattaccgtctcaaccgactcatgcacttatcactgatgacttctcgaacgatggtctaacggatgtgattgtgatgacctcaaatggggtttacgggtttgttcaaaccagacagccaggggctctgttcttcagttcgttggtgggttgtctcttagtagttatggcagttattttcgttactcagcacttaaactccattcaaggtaagcctcgaccatcatctagcttttaatagaaatctcgtagagttttcttcctctctacggaagttaaaccggcaggtccgctttagcagcttcacccacatcggttttggtaaaccggaaatattactgatataccagtgtagattcagtgccttatttcctggtttcagctgtataactttatactttgtagaattcaagtaaaaaatggtagaggcaaatagaggactttatgtttttgtcaattttgatgttttaatggaattatgtgacatttaatttataaaaaaaaaaaaaaaaaatacgttttctagaaatacttcgtagatatatatctcttcctcgatacaaagctacactttattcatgggactcatcgtacaatacgattttttgaacaaacaaaaaaagtactaaataggttaagtaaataaaataggcttagcttgccagtaataattgatgcagcgatgtggttaaaagttaaaagttttttggaccacgctaatagtaataatataatcctcaattctcaaatgggaatgtgggaggcatgagtggtgtaatgatttacacataataatatacatactacaaaaccatcgttataaagcaaaataatagtatcagacattgattgaagagtgaaaacaacgcatgatttgctaaagagcaatacttgggttacatttttcaaaaacctcaccaaagtaaattgatatcttaccaacattttcttggcaatggattagttagaccaacaactttccttttttggattttacaccaatatttatttatgctttatacgacaactgaattatctcgcatttaataatctatatataaactaaaaaattcatatgttaatatatgaacattattttatgatttaacctatacacagtcttctccttcttctttttttaacaaacatacactttttttttaagattgcaaatttcatctctaatgtttgtatatttagtagttttaaccgtgaacaaaagtgtatagcctgtgatttttttttcttttttttcctcacctgtgaattttatctttgattgaaatttgatttaatatggtataactacgacaatgacgattcaaaccaacgcgtacaaggttttaatttaattcatgtgaagtatgaatcttctatacttttatatggtaacccaaataaaagtgtcaattcttatatttcttgtacatttatttgttcgaataaatcctaacatcgttaattatttggataaatatttataaacaaattagtcataaaagaatgagaatgcaaatacatagactgaatgaggaatatagaaggtgacgggaaaagcatatttctaataaaagcatgcaaagaggatcacgagatcacttaatatgggcactactctatttccattctcttttttggccctttttatctcttatgaacgccagaatattttcctaaattaaactcaaattttcgagaaaaaaaacaacctcaattgtcatatagatggagagttcgtgacaatacgaccgactcccaaaatattacaagcttatatttgccaacgtttgtatgtatgcatatgtgtattgtaaaacaaaaatcttaaaacataacttaattcaattgtattgatttggaaaatcttcgaacccgttattcccatatatagtacgtactacggtactaattaatactatagaagtcttaaaaaaaaaaatactatacatgcctaactggagaagaaaataatcatcatagagttgtggtcaggaaacagttaaataaacaacatgtgttggaattattttatatgccctaataaatgatctagctagggttttgcaatttccttagaaggtacaataatagaatattgaagaaaattagtggtcctttctttgcagcctctatgtgtttttttttcaactttgatccacacccttagtttctagtgtggggacttgttatcagccacgatcagaaccgatccgatccactgtttggccatctttttcaacattccatggtccagccccttcaggtcgatcttaccggttggttaaccattgttgaccaaattgatttcgtttggtttggttcggtgttttctaacatagacgagtaaccatcactattaagcgtgtatatatgtacaacatgtacccattcctctagatacctaaacaacaagatgcaaacaaacattgccgtaaatgctctaaaaacatattggcaaaaaagcaaactcgtgttttgatttgaatcatgactataacaggatatgatatattcatcatgacattaagatcgttataacagaaaagtgtacattcatacatgtttgaaatgtcatgcatcaactattagttaagattgacaatgattgataagccgcataatcacataacaacataaataataaattttactaattacaatttcaataattaatcacgaatctacatttaacaatcctagcagttcgtaaagatataatacagaccaaacaattgtgtcaatttgcaaaacttttagttaaatcgataacttatttttatattcactcatatatgttttctcttcgatgatttcatagtgtttaaccaatcaaatattcctattgactttaattgatggaaagtttggaaactgataaggtgggtctagtaacgcgagttgaaaacccacgatatcttagaccaataacaagctaataagttcttttatcagtttaacagaagctgataattaagttgggtctaatgaaacgtaaaatcaaatgacacaacgttttgtaacgagtgtatacgtgtatgcatgtgcatgacatggtaagacgccataacttcaaaccttggggacccaaaaggaattccattggttgtatataagttgtataattgttattttcgtaaaatgatgaaaatatacatatagagagatacatgtacataaataaatgtatgtatacgaagtgaaagtgaagtgggggccaaatggaaacacaatccatgtgaagaagtttcagcttctgattagatatggaattgaaaagaaagcgaaagagagagagaagacagagaaacagaacataacagaaactaaaccaagtttgcaactttacattctccatcttctctctctctctctctctctctctctctctctctctctctctctctctacaataactactcttgcaccaaagagaatgtaagaagctaaaagctcatattttatgtattggcttttgccttggaaacaaaatatatataacaaaaaagtaactcacctaatattttttcatctttagtcgtttatttgtttctgtttgtttatttgggttttaaaggaatagaaaatggatatgagggagcaataaatgagatgacagtgaaagcatggctcgttgtagaaacactgttctctccctgtctctgtaagaaagatctgttaagtagcagtgatgagaagccaccaaacactatactccaaaatctctctcaacacttaaataaatgcttcaaaccaaaataataatcataattacataaattatctacaaaagcaaatgtatgccacttcatatttatacaactaggtttgctataattatttgaataatacgtaaccctaatttagattcacaaacatctcacaattaattagtaactttcgcgagtgaagcatattgtcaattatggttaaagtctcttggatggtttctacgacgtataaatgtcgtcgtatttgtaaacttatttgtgagaattaaatagggaactaataagaattaaaagacaaaaaagatagaaaaaaagaaagagaggaagacaagttacacatacacagggctcgagaagagacaagactctgcggcttctacccttttcttggggactcactcttcttatcattcactccctctctttttctcctccacgtcaactctgattcccaccttcctctatttatttaattataaattagtcttccttatttcttcttaattagtattctcttatttttattactcctgaattctaaattatattctgaattcctgctatgtcattttcttttattttgggtcgaatatctatctctcattggcaatggttttgagatcattggcctattggcaatggtttagaattccttagaattattgtaacaatgatttcagaattgaaaaaagctgtttactaactccatgcattttgaatttatttgagggaagaaaagctttcgttggattttggagtattgattgacagaaagcgcctagagaattgagtgataagcaattttgttttatataaacacttgcccccaaaataaaaatattttttctttaataataaaaataataaataacgacttagaaaaaaagaagagaatgttatggacaaaaaaagagactgtggttagactgaaaaacgcgtgcagagaggccgcgacagtcttatcatcaattaaatttcttcttaattagggtatcctaacttgcattttactctcagttacgttctacacagtattacttaattattcatattatacacgtataggtttttaatgcatacgtgcaacgttgacatgtagaacagattttgaaaagagaaattgtttagtataagtgttgtttcgataacatcctaagtttcgtcatagtccaaatctactccagattcataggcttctcagttccatccatctcttattcaaattccatacaaattaaaagtttttttttgtgaaactccgttataaattttgtgtgttggttgctggttggttctgcctgaaactattattccgaaatgatgcttatacttatttgacatttatatatttttgtaatgtagcaaataaagaatagactactggagaaaaaaggtcttttttttttttttgtcaaaagagaaaaaaggtcattgtctcgattgtaatgtatccatcacaaccccttgaattaattgattccctctattaatctagtatactcgaatattttgtggttttttacttacctctaaaactatatcgatatataatgaacaacctaactattgttttcaaattgagagcaataataatcattcgattattaacttaaattattggatttgtaaattaaatcaagaaccggtacggaagcgtagggcggcgaggcaatgcttttaccctgtctcaaactattcattattcccattttgaatcttaatacttttgaaatgtctcatttaaccccttctacattagtcaactctctctactcttttggcaaaatccttttaaacgtccccatcttttactttatttttatttcatgtcctaacttttttatttatatgacacccatacatacttctctagatttcggatttatcgggacatattttttcgtgccgttattctcaggcaattcaaaggataatacctaaaaaaatactcagctaattataatgattagttaaattaggatccatgatgctcacggcacgggcatagaggtgtgtttgtctgtatataaattctgtaaacatttagtagtactattatacaaaaagataatgcagtaacatagggcacctcaacaaaatcgtacgtttgtctctctacaagagagagtatgtttacgtgcatttttatttatatataaaatattactgtgatatactactagtatatacagaaatgtgtatatcataatgtttttcgtttcctcggaaacatggacaaaagcatctgcttttcagctacaaactttaaacacttaatttaagccacaggtgcacccaaattaatattttttaaaagaagattatgggctaatggatgattaatgcctataatttgcaaatcctccttactttaaagtaattagttagattatttaatccacatgtttatctatttgatgaggatttttgaaaccttgaagtaccttacattttttcaggcatttttagtttgctgatgctcctaactcgtagacaataatatatttgcagcatttgtcacaattagtctcatagtcactcatatatacacaaaatgaaataaaaatgaatggacctatggacttttgacaaggttttgtagtcagttctagatcatgattaggaggtctaattaataggtcccgaaatatatatagaactatcttaggataatcaaaaatagtattctgataccgtaatgatattatttttactcctttttaaggaaaattagttattcacattccaccatttatacatataaaaatttcatatatgtaagaaaaaaagaagaaagaaaaaaagcgggtttcccggaatgaaaaggaccaagagagaaaaatccattttatgctaacgtggcagcataataaccgcccgattatatatcaacgataagagatgaattgttttcattttgtaacaacaaaacatgagagaaacaaaattatatttttgcaaaatctggaaaaacaaaacaaagaaacaaacaaatgaagaagagatgagaggagacagagaattaaattagaggagcagaagagagagagagagagatatagagattaataaggtcatggcggcgttgcagagcgcaagaaagatgatttaaatctctcttcttcttcttccttcttacatatctctgtgtgtttcttaaatactctctctctcgtaccgacaaacaagttttgctttttcatcagagtctcaaaaagctattccaacttcaatacactacaaacccagagaatgaattcaacctaaaaaccctagaaatcctctaagatctagagtgagaaagttagagtgtatagaactacaaaacataggatctttggttttgggttttgttccattttcttgattggttagtgggtgagtggtggttatgggtggtggttgttgtcttggtgaatggcggggtttttctcgctagacggtggtggaggaggaggcggaggtggaggtaacaaccaagaagatcaccggagcaacacaaatcctcctccgcctgtatcagaagcttggctctggtatagaaaccctaacgttaacgcaaacgcaaacacaaacgttaacgcaaacgctccttcttcgtcaaacgctgctttaggaacacttgagttatggcaaaaccacaatcagcaagagatcatgtttcagcatcagcaacatcagcaaaggttggatctttactcttccgccgcaggtttaggtgttggaccaagtaatcataaccaattcgatatctccggcgaaacttcaaccgccggcgccggaagagctgcggcgatgatgatgattcgtagtggtggtagcggaggaggaagtggtggtgtgagctgtcaagactgtgggaatcaagcgaagaaagattgttctcacatgaggtgtagaacttgttgtaaaagccgtggcttcgagtgttctactcacgtgagaagcacgtgggtccctgctgctaaacgccgtgagagacaacagcaattagctacggtccagcctcaaactcagctgcctcgcggtgagagcgttcctaaacgccaccgtgaaaatttaccggcaacttcatcgtctcttgtctgcactcgcataccttctcattcaggtatatgtcactgtaatgtgaaatatttatttatgtgtatataaatatatatgtttattattatatggtcgtgagataatgaaatgcaagcagcattttttataatttatataagtaacgaattgggatcagcttctagagtaaaaaaagaaaaaccctattttgatttataagttttccaaaataagttttgttttttattttgtgatttaattgtgaaaatactgtgttggagtaaacactgactattggaatgacaggaacaagctgttctcacaaatcttgaaatctgtgttctttctctaattctcagctcctttttcataaccttaattttgaaagaaaaaatgaatatcaatgttttattctattacgtatctcttaaacttttttttcttactctaaattctagggctagaagttggcaatttcccggcggaggtgagttcatcggcggtgttaggtgcgtgcgtgtgagctcagtagaagatggagaagaagagtttgcttaccaaacagctgtaagcattggtggtcacattttcaaaggcattttatacgacctcggtcctggaagtagtggtggcggaggctacaacgttgttgccgccggtgagagctcctctggtggtggtggagctcaacagctgaatctcataacagctggctctgtaaccgttgctaccgcttcttcctctactccaaacctcggtggtattggcagctcatcagccgcggcagccacgtacattgatccagccgctctttatccaactccgatcaatacattcatggccggtacacaattctttcccaacccaagatcatgaggaaaatctgacataaaagcaacataactcttttgaattcttagaatagaattagggtttataaacgttaattgtcggatcatattatataaaagagtatgcagaagtggggaagtgaatctgtttatgcttcccctacttttagacactcaaagttgttgcaagttttaggggtttttaaatggaaattcaattcaaataataccattgtctttttatatggttttgtgaggatatagtgttgtgtatcatttaaatgttaggagcacaatatagctcttgttgtctgaatctttgtttcattaatgtgtctgtttcttgtttgtgaaacacgtaaccttagaatccggggaaaatgtttttcatctttatataacaccttttgtgtcttctttcttctattcaatataaagaagaattcattacatttgtaccatacattatagtacaatttcatatttttcaacccattttattttttatttttttcaaccatggtttccgttacgacagaatatggtctgcccatcccatgcatttaatggtttctaaagtgtattatttgttagttactagtaattgatgtatgccataattgacatgtgatagaatcagagaagatgactagaagagcgacatgtatagatgtgacatgagggtgcgttctacaatgtacgttaatcccaattagttacttctcccgccgttgcccacaccattagttctttcattactagtttactataatgatttagttaatttctactatcaggtttttgatttttctattctttcacattgactagaagtcttgaacaatactactaatctttctctattttaaaataagtcttttcatgatcttgagggaatgtttctgttttaaaaagggtttttaatgatttaaatgtaacgtttgtcaagaaatgatctcattgtctctttaaaattacttaaatagaaatttaatataaaatataatttaaaagttaacatcctttgtaagaatacaataggatattaaacttttcttatatgcatgatcagtgtcaaaaccatgtctaatttcaaatggacgcgatattatttttatttgtataactaaatcaatcataacttgtaaggtaacatggtcgaagaaaattaatgatcataaggagtttacctttcatgtaagcttacgtatatataaggcatccttgcatgagatgtatttttacaccctacacgatgatatacacacacatatatattaatagatagagattttgcagattctcatagtggatatatcatatatgtgaaacctatatatattacatactaagaaatatataaatatggaatgcaatgccatcaatttcagacgagtatgtttggctacagaaagctatttactcctccttcctctctttttcatcaatcatttcggttttgctcatttaaatacaaacaacccttaaaccaaaaaaaaaaaactaaatacaaacaaccccatcttcgtcttctcttctttcatactctcacatttaattttggtttagctttcttaaagtatgtaatatatcatacaaaaatatgtaatatatgatgtgaaagaggatatataagaaacaataatacaatgggaaaaacaaaactggatcccttatacaattgagatatattgcgtgacaacattacataatcggtaaatttggtacattcaaatagtgctgcggtccaatcggccgactcgttccgacttttactctctgccgtatcccacagcttgtcatatcccacaaaatttattcatttctaatctttatatgatgtttcttactagatccaccagtatagtgtcgtatcccttttgttgtgtgttctcatatagtttctatgtaaatttgatgtctcttatttggataatttaatattctgagaagaaagccaaaagagataaaatcataaaaatgctggctaaaatttccaagactaaaaatctaaaatttgtcattgtccgacatttataaatccaaagcttcaggttccactcaaagaaaataattatactatttggatgtcttttggaccttttggtgcattgatgacaataagcaaataatactatacacattttgcaaatttgcaggatgaatgttacaactggatatatagtagaccaataaagagaagacatgtgtgatgtttataccaatgattgacatttgagttatgtgagttttaattagggaaagaactgaaccaaacgtaggagaaactgatcttcatactaatgctcacactacacattttattagtatctcaaaagtaaaaagcaactttaaaataaaacatatagttttgtgaaagatgcaaaaattgagaaggtactaaactattattacttatattagtgaatcaaaactttttcttaatccatttggagttgtttagttcaaatgaacggaacatatgtaatccaatacaaacacaaatataaaaaaatacaagagaacaaacagagaattccagtcaaacatgtttttataaataataccataacaaccaaaaaatacactcaaattgaaatcaacatacttaatcaatcaaaattcaaattaaacagtcttcgaatacattataccaaaaaagcacaagcttgccatgtttaatatatccttgactaggcgttacaagttaacattggattacatggcactaatttttcatggacaacaaaatatgaaacacagagaccataactaaatttagagacacgaaattgaaagtcccatatccgactctataggatctttgatccagtcttgtctcttcacaacctctctttctcttctttttcttctatttttacttccttcaactcccattttactccttcatttttcttcttcttctttctccataactagtactatacgcaagaccgtaaagatggccttcgggaggggacgtggcaacaaacgcacttcgacgtcgtcctatgcgtcgaccattacaatggtcatctttgtggctctgtgtgtcttcggggtgtggatgctttcttccaattccgttattccaccgcagatcacacaaggctccactcgagcggctgtcgcagagacagagaggagtgatgtgtctgcctcttcaaacggtaatgatgagcccgaacccacgaaacaagagtctgatgagcaacaggcatttgaagacaatccgggaaagcttccagacgatgccgtaaagtctgaagacgagcaacggaagtcagcgaaagagaagagtgaaacgacgagctcaaagactcaaacacaagagacccaacaaaacaacgatgacaaaatttccgaggaaaaagagaaagataacggcaaggagaaccagacggtgcaagagagtgaggagggtcagatgaaaaaagtcgtcaaggagtttgaaaaggaacagaaacaacagcgggacgaggacgctgggactcagcccaaagggactcaagggcaagagcagggacaagggaaggaacagccggatgtggaacaaggaaataaacaagggcaagaacaggattcgaatacggatgtgacattcacagatgcgaccaaacaagaacaacctatggaaacggggcagggggaaacatcagagacctcaaagaatgaagaaaacggacaaccagaggaacaaaactcagggaatgaggaaaccggacaacaaaacgaggagaagacaacagctagtgaagaaaacgggaagggagagaagagcatgaaagatgagaatggccaacaggaagaacataccacagcagaggaagaaagcggaaacaaagaagaagagagcacatcaaaggacgaaaacatggagcaacaagaagagcggaaggatgagaaaaaacacgaacagggttcagaagccagtggttttggctctggaataccgaaagaatctgcagaatcacagaagtcatggaagagtcaggcaacagaatctaaggacgagaaacaaagacagacatctgaatcaaacaccgtagagaggattatggatggaaatgcatgggtgctgtgcaatgcaactgcaggaactgactatataccatgcctagacaacgaagaagctataatgaaactaaggagtagaagacattttgagcacagagagagacattgcccagaagacccaccaacgtgtctcgtccccctcccagaaggttataaggaggccatcaagtggcctgaaagcagagataaggtaaaaatttctataaaaaaaaaaaaaaatttccttgaggtgatataatgtaaaattggatagaagttaactcacatgtgatctagtagatatggtaccacaatgtcccacacacaaagctagctgaggtaaaaggacatcagaactgggtgaaggtcactggcgagttcttgacgtttcctggtggtggaacacagttcatccatggagctcttcattatatcgattttcttcagcaggtgaacactcatttcttgatttcagtatagtgttaaaactgcaacaagtaaaagatagaaattttatgcagaatataatggttccttttttctactatggcagtctttgaaaaacattgcgtggggtaaacgtactcgggtcatattggatgttggatgtggagtggcgagctttggcggtttcctctttgaaagagatgttatagcaatgtctcttgcaccaaaagatgaacacgaggctcaagtccagtttgctcttgaaagaaagattccagccatctcagcagttatgggctctaagcgactgccattcccgagcagagtgtttgatcttatccactgtgcacgttgtagagtcccatggcataatgagggtggtatgcttcttctggaacttaatcggatgcttaggcctggaggttattttgtctggtcagcaacaccagtctaccagaagcttgaagaagatgttcaaatctggaaaggtaatgactaaagtaaaatgcttgaacttaactagagttcctccttcttttgtttgtttcactgaacctgagatgttttgagtgatgtagaaatgtccgcgttgacaaaatccttgtgctgggaacttgtgacaatcaacaaggataaactcaatggtattggtgctgcaatctaccagaaacctgccaccaatgaatgttacgagaaaagaaagcacaacaagcctccactgtgcaaaaacaacgacgatgcaaatgcagcctggtatgattgtttccacaatttgcatagggaatgaataaccataaggttttaacagaacaaagaaagtcaaaacttgaatggaaatttcaggtatgtacccctacaagcatgtatgcataaagttcctaccaatgtggtcgagagaggaagcaagtggcccgtgaattggccccgtcggcttcaaacaccgccttactggttaaacagctctcaaatggggatatatgggaaaccagctcctcgagatttcactacagattatgaacactggaaacatgttgtaagcaaagtatacatgaatgaaataggaatcagctggtcaaatgtgaggaatgtaatggacatgcgagctgtctacggagggtgagcatcaacgaaaacaaatcaaactaaaatctcacttaccaaaactaaacctttttttactaactacgtaaaaatgcaggtttgcagcagctctgaaggacctacaggtgtgggtaatgaatgtagtaaacataaattcaccagatacactaccgataatctacgagagaggcctattcggaatatatcatgactggtgtgaatcatttagcacataccctcgaagctatgatctcttacatgcagatcatcttttctcaaagttgagaacaaggtataagcgtaactcataatatccacaccttttggtaacgtttcatcaacaataagtctcttgttttgttttgttttgaaaggtgcaatcttgttccagtaatggcagaagtggatagaatagtaagaccaggaggtaaactaatagttcgtgacgaatcaaatgtgataagagaagttgagaacatgttgaagtcactgcactgggatgttcacttaactttctccaaacaccaagaaggaatcttaagtgcacaaaaaggattctggagaccagaaacttctcaatgaaagacgctctgagaatctgcatttgaaagtagcagaagcatcattataatacaacacactactcatatctataatccccaaaagaatttgtcagtataagaaatagctttagtcttcttaaactatatagactaattagaacatttttgttttccttacttcatattgctttttttaacatggttatgatattctcttgtaaggctatgaatcatttcactgggaaaagtaaggcacaccaataaatgaaattttgttccaacaagtagaaacatagcagtaatgaagaagagattatgatgctttagcgataccacaagccaaattcaccataagctattgacaggtagcgaaaagtcaaattacaaaaggaataaagtagacatgaaatgaaaccaacaatcttaagcccacatatgaattcaaaagagaggttaagaaagaagagaatctgacatcatgggcagagtaggagctgaagaagatgggtttctgcaaatttgaagcttttaatcgcatatcgctgagtaatcatcacaaacagttttgaattgaagaagacgggaggagaaaagccattgttaatgagatacccaaatcgtaaaatttcagaaagcccagcccaacatagcccaatacagcccaaatatgtatgtgattgggtaacgaaaacgagaccgttcttttttcagtcatctctcgtttcacagtagcgcgtatgtacgctttgaatttacaaaaagtagacatttttatgaatttttgccggttgagtaaaaaggtaaaaaaaaatagttcccaccaaagcaaaatatttcaatttttatcttttttttttggttcttgggaaaataagagattgagaaagaataaagaagagaaactcacaacttttttagttttaggagaagagggctttggtctggagtcactatcatattcaatgctttaccaaactcacctcttcttctaaattctcaccactcttcttcttcttctcattcaccgacatatctcctctcttcactctctgtctcttctcatctcaggtaattccaattttagttttttttgaaggttacttactcgtcacattgtttgaaaaagattgaatttttatctgtggcttagtcaaatcatggttcgtttcaccaagttgtggttctgggttttcgtgatttttcttttgggtttttctgtttgaatttggaaaaataaaggaacgttttttttttcggggggagttttttttttaaagataatttttggagagtttttgataattctgaggaagccaaaagaaaagaagaaaacctaatttgtgttggtggggtttgataggaaataatggagagtgttgaattgacgttgaagaacagtaacatgaaagacaaaaccctaaccggcggcgctcaaaatggcgatgatttctccgtcgacgacttgcttgacttctcaaaagaagaagaagacgacgacgttttggttgaggatgaggctgaattgaaagtacaacgaaaaagaggagtctctgacgaaaatacccttcaccggagcaacgatttctccaccgctgatttccacactagcgggctttccgttccggtatgaatttgtgttttcattttcgcaaaatttataaaaattatcagtcattgcattgttaatttcttgcttttcatgttttgattgttagatggatgatatagcggaacttgaatggttatcaaatttcgtagatgattcttctttcacgccgtattctgctccgacgaataaaccggtttggttaaccggaaatcggagacatcttgtacaaccggttaaagaggagacctgcttcaaatcccaacatccggccgtcaaaaccagacccaaacgagccagaaccggagtcagagtctggtctcatggttcgcagtcgttaaccgactcatcttcaagctctacaacatcttcgtcgtcctctcctcgtccttcaagccctctatggctcgccagcggtcagtttcttgatgagccaatgactaaaacacaaaagaagaagaaagtttggaaaaacgctggtcagacgcaaacgcaaacgcagacgcagacgcggcagtgtggtcattgtggagttcagaaaacgccgcagtggagagcaggaccattaggagcgaagacgttgtgtaatgcgtgtggtgtgcgttacaaatcgggtcggttactacccgaatatagacccgcttgtagcccaacattttcgagtgagcttcactcaaaccaccacagtaaagtcattgagatgcgtaggaagaaagagacttctgacggtgctgaagaaaccggtttgaaccagccggttcagacggttcaggttgtctcgagtttttgaagaaattgtggaaggtttttaaaggagcagaattaggatccgacccggttcagatttatcaccagttagtatgttaacgggttatgtatgttttaaattacaaatttgattttttgtttgttagtcgtagtaggtttttagatttagtaactggttaaaacttttaaaactcttactattatatttgttttgtttcgcattaattttcagaattctttttttcttaacctcctctaacgttatatttacgttataatatatagtttttatattaattgatagagatggttcattttctagttagaatgtatgctcaataattattggtagactgatagttatcaagtgtataaaatatgagatcaatttataccaaattaggagtaggctttatttcagggttagtaactccaattttttgttgttacttatttatatccatcacattttctcttgtatttctaaaattgacataatataactgaaaaaaaaaacaaatttcacaaataaaaatatatacaataactgaaaaaagaaaaataaacgtactgggcacactctcttattgactaatttattactctgcgtatttttggagattgaatacgaccttagttgacgtgataatattatccatttttgcaatgtgataatattcgttgaccatatctttgagattatcacgaattaccaatttaccttgggactttattcctcgtatggttttagttgagttgactattaataatagcttttagtacgtgtttcgtaaatgctgcataatatgtaactaactaaacaattcgaatatatatatactagttttaacattcgtctcacacgcttagctttctccttcacaacgatgaaaacgtctcctgatttcaaaagtgagatcatactcttttttaatttgctaattttttaataacaaatcatatgtttttcttttggctatatttaagggaaaattacacaagaagcataaacattaaaagtttgagaaattactatttctacgttgaaggtatacattttggtttttactttatatatacacattacatttttgaccattcggattgtagacgttgtgcaatgcgtggtagagtttcgagtgggctccattctaatcaccactgttaaattcattgagatgtgtacaacggaattaagaagatgttcgacaaggctgataaacttgatttaaacccgctggttcaggttgtgccgagtttttgaagaaatagggaacataattaggatctgacccggttcagttttagcatcaagtactttctgattaattattttgaacttttagtttgtattaacttgattattgttcgtggtagtcgtagtttcagattttaataatgactggtcatatttagagctttaaaagtcatatgtcgttttgtttcgctgctttctctgaacctcctttaatgttgtatctacggtaaaacatataatctctttaaccttggagagaatatgaaaccgttcgaaattttaatacatgacactaagacatggccacatggggacattcgacatccatttgatctacttcattatttaagtttgttaatatttcaacgtcatgatcccgttggttccctttcgatagttattgaaaatgcgatagttattttttaaactccattttggtagactgatagatagcattgtcattaatcaataataataatttggtattcctcactatatattttgtgctagggttaataatttgttttaatgtcgttatcgcaccatatcactagtatctaagttcaaacttgcataatgtattcagttgataatactttttatatcaatacttcaaaggaaaacacaattattcaaaacgaggcatattttacaagcatggaagctacatgcatgaatatgcataacacatacatttgaaactatataggatcctctttgtaagagatacaaattttcgaattatgtcttacttatatatcaatttgttataaactcactttggataattattgccaaattgctatcctttaaacatccctttattattaaaaggcaagtacaaattgaaattttgtctaatttggcctcaattttgatttcaattttggattttgttctttgctattcaaaatcattaagggtaatttggtcttaacaatctcctaaactttatatgatctgattcaatctaaaccgttcaataaaattaaatctcttcaatctaaaccgttcaacaaaaataaggaatctatgtcgtttttgaaatcaaaatatgatcacattccatatctaaaaacactatattcaatcacgaaatcaataatcaataatatcaaaatcatatattagattcttcactaatcactaaaaatttatatttataagtttaaaatatcaaatttattcaaatatttagtataaaaatcaaataaaccgattgtccgcggtttaccgcgggttaaaacctagtaatactaattagtatacctaattgatgtagttgaaacttttaaaagagggaaaccgaagagaggcgtgggtggagtcacgtgatgagcatttctcacccgattcaatttcaactattttagcttttacataaatgtggtccattgtctaatttcttccatccccactaaaagtttcacgaaataagtttcattcttaactactatcacataaaattggtagatttttaaagctccgactacaaagataatatatagattggttccgtaccgttattctcgagttgtgtgcccaaattttttgggagatccttgagccaacaaccacttgtttacatgtgcttgtgccagtactttctctcatcttgacattatttctttggttctctttacgtttggtgactttcgtctattaaaattaacacaagacatatattgctagttagatataatattcattacatgtgtattttgaaaacataaaccttgaaatacctttaaaatacgagtgtgtttgatcactttcatgtaattaagtttttaccaaaaagaggaatagactagtagtctacacaacaccaaaactcgcctaatctattgacttaataaaaaggcagtactagtacacgcccttcctcaagcttaggctactttcatcatctcatcgcagcccttggctctaaagctctcgttaacgtcaacgtatgataccatcatgaggaataccctaacaacgtatatatctcacgggacttaagctatcccatacattaaagataacatttagtttgttgcctttgtcccttggagggatcttttaacctttttcccgtgaaagaacatcatcatattcatatacatgaagggttcaaatttactagactggttattctttatttctttcacataaaaaagggggaatacaattacattaaacatacgaatatataattaacatgaccaagattttcatcccgtaattaaaagacagggaagattgatgagttggtctttaaaaccggcaccgtcagatggagttacatgacgatccggaggacagcgagaccaacggctgagatggagacaagagtaccaatacagtacttgatcacctcatacttggctgcttctaactgagctctcaaagtgtgaatctcctgaaaatattgaaaacagaacaaagcataaacacttttgctaccaaaacgaataattcaaacagaagctagagatgagaatactaacacggtcaagtttgtttgtaaggttagaggtttctccgttttgattttgtaactcatctcttatcctcctgcgacatcattgaaacatatcacagacaatttcgaaagacataacctaagaacagagaaataaggtagctgtttctctgaccctttttcaagattcaggtccaaccgttgtcctgctgtgactttatcgatctcgtgtctgcaatgttattgcgatagtcagtgcaactgatcgagtctatagcaaatcaaaacttaaggtttattagggagctgaccttatatcagagcggattcgctctatgtcattgcggagtttctcattctcgtgttgcagcaaagagaaatggtggtcctatacataatacacttctttcaacaatctttcggaatcatggtgtcactataaaaggtcaaaagagtagcaacgctattcgttctatcggctttccaacaatttgacgtttgaaaacacaacttaccagtgaactattaatttcacttttgaacttggataagtttgattcctgcgtcatttcagcctaccagaagcaagaaaaccaaagttagactgctgctataaccgcatcctactctttggaatagatgaagcaacaaagacttgtcacaacagaaacttactttctgcatctctcccttggagacaactaactgtgaaacaactcctaagctatcgttaagaacttcagttatagcaccggttattgcctcggcttgctttgaaggcaggccttgtgcttctaagctcctaacctgaaaatcacataccaaattctcctttgaactatactcttaagactatatctaataatatagcatcctattgaattttatcaatccggtctagaataaaatcattctattgtctcatttcaaaatgcaagaagttccttgaatcaataccttgcctacggtttaagcaatcagataagacaattcaaagcaatgatggtgatacagaaaccaaaataatcattggaaaaagatttcagtagatcatcaggtaagtaaaaaaagaagagaacaaggaagggttattaccaaagctagtgtatcgacaagaaacaaacgtttcccattggttttgataagctgagatatgaatctggcgtggaattgtctgaacgaagaatatgatactaacgatgaagaagaggagcgaaactcttgagtcttgtcaaatgctggatttgaataaccgaatgatctgagagtcgacaggtttacacctgaacttgttcctccaagtcgtgcgagtcggagataattcgcgtaagcagccataaaaaaaagatgaaaactttcccgaaattggtttgtaaaaacggaaactttgaattcaatcaacccaaaatttggatcgggaaatcgccgttggaagaagatcaataaggataacaaagagtttcccaatcgggtaagcatgcaatggtggtcaaaagaagaaaaatttgaagatgggtttggtgaggattgttcttatgaaggtggtgtcatccatggaaatcgcttagacgtctccgcaccatcaaatgaaacagacggacgacgatgatagagaaagcgtgcgtctttgtctttccctaaatgggcacgtttcccaattcattttaattactctactccatgtgctaattatctctaaattcccaaacttgaccatgagtttcagatttttataattaatataattaagctctgtttcagtaagagaaacacaaatatctacaagtttgatatgttagcatttgtgtaaagaacagagaatctatgagtaaatgttgtaaagcagagttcatattttatgtttagtcttcaccatgaagaacaaagtcttagaaatgttttgatatttcatatgtaataaaagtgaacctcattgggatatgaatattatcagtaaaccagaactgaggaaggtgtacatattactttgggacatggcctgcttaaacaaatcatacagccattttttttgttgattttattattttgatgattcaagagaatccaaaaaagtgtcaaataagatttcatatcctgtcgtctgtcggtcattttttttgggtttgttgtctccacatctaatgtaaaaagtttctttattttggtcgcttgcgatatgggtccaaggaatcatccacagtttctttcacatagttaccaactctcttcatgttcttcatcacccctgctgcaaccaggtttgcgtttcttgtgaacctgatacattcccacggaatttaatattgtgtgttataaacaatgctcatttcatgactcacatacaacaatgcacgctttatggtagataagactgattagtttgactaaactactgcagatccaagagttgtacaaggatcaaactttaaggtttgtattcacgtacaatcaattaggcagtcaagtgaaataccaatgccattacccattaagctacaacaagtcaaatcttaaagctatctccagcgaaagcaaaagctctttgcttacctggttaagaagccgttttctgtgtttgtggcagtggcagtggcagaggctggtttattgttctggtgctgaggcacaggcacctcccgagaatctagagaataggaaaaaaaaatgatgagcacataagaggtaagactcgtttcattgttgtaaactggtgaatgagagcagcttcggtgtaccttttctattttggacacgggctggaacagatgaagtattgccagaagctgctcttctatctgctaatatctgcaatgaacataacaaagttcaatggagaaaatagagattgcagacagcaccaagtcgaccatattctttctttaatgccagtgaagtttatcaagttcttctagatatattccagtttttgcagaagttgataacgtcttctaaattatgcataaagcaaactaaaaagattgaccagactgcctcaccaaaccgattcaattgatagtaagcttaagatgaaagtccatgggcgtaatatgtaactttcaaagcaatgtaatggattttcgagaaaagtgttacgagcgacaaacctcaagaccgacacaaacgggaagttgagtctttgtatgttgcttaatggcagatgagtctttatcagtcatgtagacggaataacccaaacatccatagtaaaaatcagctaaggtccttccttctttagaagcttcagcttcagattgtccaacaacataatcaggaactacaaagttataaaacgtctttagcatatgcataaaccattgaagcagcaaagagaagaacaattgagttaccaaaaaaaaaagcaaacacacacatttctcttcagttatacagagcctatggtttcaattttgagataacttctgaattggaatctacctatcaaccattttcgttaatctaaaattgatttcgtggccaattttgcgataagataagattcaattacaataacagagagctacacggtggattttaaaaccctaatatagaagaagcggccattaaaatcatcaatcaaaggggaaattggagctttcgatgactcaaaaaagacgaataccttgacggagagtacgagggattccgacgcagcgagggttcttagacttggatttgagagtggaagagtaatataaatagcctttgcacgatcttcctttctccagagatcctctttgtttctgttctggtttctcttccattaccgtcctcgttacttcttcgctcgagccttcgttcatcgcggaacttgtctatctctctctctccctttcgtttcttcttcgaaatctctagctctaccttgccccgggaaagaaaccggaaccgattagtcgaattggtccgatccgaaaaatatccaaaccgaacccgaaccagtttttagaaataatcgaataggtcctaaaaatccctaccaaaaattccgtaaccgaaactgaacccagtatccatgagtagcggaatatatcggaagtaccgatatagatttaacaataagaaaaatgtcgttaaataattagttcatcatttttattggttttttattggtttaaagcatgaattctaaaattaataatttaattttttaattttatgttgatatttaatttaatcttgaatttttgttgagtaagccaattaaaaaacatagttaaaaatttcccaaatcataaactctagatccaaaaaccgatttatttaataaaaagtttcactgacattttaaaaaaaaagaagtctcttgtagctttggaataagagtaaaataaaaattaagacaaaattttcattttacaattaactcaccttttaattgatttatttatatagaaataatttctgtttaatactgaaatcgaccgttttttgtttaattcttcttctttattttttttctttttttcaatattttcatcaatttgatctttgtacacctccgttttaattctaaatttctcggcgcagaaaattaccggcaaatttcacggagaaacctcaccgacgaagcaaagttatgacgggcaaggctttccaatttttgtttagactaaatcttgtctttccaattttttcaggtgttgatcccaaaagcgaaactaattggttacacaagaactgatcctttccataaggaatgtatagaaacagcaacaagaattgtttggtttccgattctgaggtcagctaagttaaatgagcttgctagtgtcttgccagcaagactcgagattcaatggtacaaagaccgttgtgatgcatcagaagagcatgcagctaggttactacgatttcttcaaacgatattcgttgaagagagacttcaaagtgaacataagtcgcataagactagctaagttttgggacaaagtgattaaaatggtggagacgaatgagttaccttctgattttcatttaggaaagaatcaaagaaatgaatttacgcatctcaacattccttatgggaaaaagaactacttctgcaacaactatagttctcttcttatgttgggccttatacaaaaacacttcaacagtttgagccttgaacataaccgatggcccagttgacaaaatataaacccatttagcaaataaaaaaatggaaaacataatttacagaaaaaaagaatgagataatatcaaattgatttcggaaaaaggaaaaaggaaaattagcagattggtaattaagtttggctataaataataattagagaagaaagaaaattgagttgaaacgaagtaattagagaagaaagaaagagacgaagaagatgatgatgattccaaggatggttaagaacaaaacccctgctccggttcaaatcacggcggagcaggttttgaaggaggcgagagagagagaggacagtcgcatcctgcggccgcctaaacagaagatcacagattcggatgagcttgccgagtacagactccgacgtcggaaggagtttgaggaccagatccgcggcgcaaaaacgaactcacaagtttgggtgaggtatgctgattgggaagagtctcagaaggatcacgatcgtgctcggagcgtgtgggaacgagctttggaagacgagagttacaggaaccatacgctctggctcaaatacgcagagttcgagatgaggaacaaatccgtcaaccatgcgaggaacgtttgggatcgagccgtgaagattctacctcgcgtggaccagttttggtataagtatattcacatggaggagatacttggtaatatcgacggagctagaaagatttttgaacggtggatggattggtcaccagatcaacaagcttggctctgttttatcaaattcgaacttaggtataacgaaatcgaacggtcaagatcgatttacgagagatttgtgctttgccatcctaaagcttcttcctttattcgatacgcaaagtttgagatgaagaacagtcaagtttcgcttgcgaggattgtgtacgaacgcgccattgagatgcttaaagacgtcgaagaagaagctgagatgatctttgtggcctttgctgagtttgaagaactatgtaaagaagtggaacgggctaggtttctttacaagtatgctcttgatcatatccctaaaggaagagctgaggatttgtacaagaagtttgtggcgtttgagaagcagtatgggaataaggaaggtattgatgatgccattgttggcaggagaaagttacagtatgaaggtgaagtgaggaagaaccctttgaactacgattcttggttcgattacattagcttagaggagactttgggggataaagataggatcagagaagtctatgagagggctattgctaatgttccactcgctgaggagaaacgatactggcagagatatatctacttgtggattgattatgcactgtttgaagagattctagctgaagacgtggagcgtactcgagctgtgtacagagaatgcctcaatcttatcccctcactccaaattctcttttgccaagatatggttgctcgctgcacagtttgagatcaggcaattgaatctctcgggtgctcggcggatactaggaaacgccattggcaaagctccaaagcataagattttcaagaaatacattgagattgaactccacttgggaaacatagatagatgtagaaagctgtatgcgcggtatcttgaatggtctcctgagagttgctatgcttggaccaagtttgctgagtttgagaggtctcttgctgaaacagaacgagctagagctatttttgagcttgcaatatctcagcctgttcttgacacccccgagctgctatggggcatacattgactttgagatatcactaggggaattagagaggacacgagctttatatgagcgactcttggaccgtacaaagcattacaaggtgtggcttagttttgcaaagtttgaagcttctgctgctcaaggccaagaagatactattgaacatgccagagcagttttcgatagagccaacacatactacaaagagtcgaaaccggagctcaaggaagaacgagctaacctgttggaagattggctgaacatggaggctagctttggtgatgttagtgctgttcaatcgaagctccccaagaagctcaagaagagaatgccaatcactagagaagacggtgagacagagtatgaagagtacattgattacttcttccctgaagaatcacagacgatgaatctcaagattcttgaagctgctcataaatggaagaagcagaaggtcgatgctttctgaggagtattactattaacgtttccttagtgttgttatatatcaaaacttagataaacttttgttttcttacttctctctgtacattctcacttatctgtttgatttagcatttagcattcacttttattatccaagcaaattcaaatcgttatctgttttttgtttctgaggaatcgagctaaataacttgatagaagtgaaaacctagttgtttaattacttaaacatgccgcttatatgggtacagaaacttttgtgtaacaaaaaaggagattcgagatgtggtaaataaacaaataaatacaaaatacaagaaatgaaaattcaggggtgccaaaaactacaagatgcacctcttttgcagtatccactctcatagaatttacatattttcagccctttgggcggatgggctgcatacgaacctgatccatggtcatacccatggctattgctgtatggccattgccggttattatgactgttgttgaagctactgttgtgaccgttgttcaaccactgccggtctctgctgtgcccgctggatctctttggctggctcactcgtggacttcgctcggtgcttccacgggctgagcttgagtcatgagatgataatgatctagggcttggttccgaacttactcccaaaacagatttaggaagcctctcgaccgttccagcttcaactgtggtttctgatcctagtctgagagccgttgtcgttagagtcaggtcgtgacttattgcagttggcggtggcggtggcggtgcaaaaagcaggagctctggaccagcagttccgcagtggctgaagggagtattgtcttttgcttctgtaagcattgagcttttcccggcagagacattgtcgaggatactcgtctgagagacatccaatctacatgtttcaggtgtgagagacatgcgtgccacagggttaaagaaatctttttcgggccctttcaaatcatcgtcatcatcacagtgaaatgtcgaggtgggtgaagagggtaaaccgttctgctccattgcttcaacttcagctaatagatctgaaactgattcatcacactcgtcggggtcagccacaatggccggccacccagatgcttgagccacttgggtgttgtctgaagtctgagtagctgtggcgtgatcagctgccaactcaattggctttacagacggtgcagctaaaacaacagtattctgctgaattacttgaggaagctgtcctccagtaaccacaacacttgaagtggtagtagcagcatcggttgtacttgtggttgtggtgctccaagtgacaccagatggccctttgaccagaacacatgaagacagagactggatagtctccgccgcttgagcttccaagtcttcagggctcgacttaggtgtaggactagggaaatcaaggaaatgactttcttgattcaggtttggtgcatgaacagaaccgtttatggaaacagaaccaccatttgtttcatcctccagagtcttagttgtgttatggttaccatctgcccgcacagtattgtattgatcagttcctggagtttctcttacatcaggagtaacaacgtgtccaggaaccacagagatcgacgccggacaactaacttgaggctggggacgaacagaattaccatcctcaacttttccagagcaagctacaagagccacaacttgtttctctttaggatcgttagaatgggcagtgacagtagaggaggaagaggaggttgcactggtgttaactggcatctggttcttctgaagacagttcacatccgcgccagtgcggccagaatcgtgtggagacggttttagttcttggggaagcgaagaagaactcggcaaagtagttgctttatcaaaccgtccagcaagagcatcagtcagaagcacagactcgtcttggttctcatgcgctctccatatcctaagataagggggaaaatggccactaaatttccatctacggagctgcaccatagaaaacggtccctgggtctttcctgttggatctcgataatgccatatttcactctcctcgtcatctttaccagtttcctgcagtacgcagaaatttacatgacgtgaagtcaaaatagaaattatgaaaggttacgttgcaaatgtaggaggtatgtcaaacctggatatttgatgagttattgtggaccttagaacaatcatctttatcagcatgtacgttatttctgcttcgcaaaattggtgcatcatattttttctgcacattatttcccacgttgttcaagttaacccctttattctgtggacctttactttgtgcctttacgtgattatctgcaattaaaaaacgtagaagattgtaaatagcatccaacaatcaggaatcttcgataagataatgaacaagtagctgttcacatcctaggttaaggtgggagaccttgtttccttgtacccaaccctgcatcttctgataatgcatgacttggatccatgcttggatctgtatgaacttctgggacttcctgcagaagccgctgacgttcctcaggtgattttagaagctccagcttttctacacattctctaagcgtgggagatagttaagaaatagttgctaaatcaagtattaagtccacgcaatcaatgtcaaagtctaaatgggaagaccgaggtacactactcaatgtgaattattctttgcgcttatgagcagcatggtcacctcttcaatgaattatttcatcaacgactcattaaaattttctatatcaagcacatttgcagagagatatagtgtaagcgaagtgcaacaaatatagtatagcaatctcaaaaaggatattcctttctatgccccttctcacttgcccgatcacggagatggttgagctttaatatctcagcttccagagcctacatcaacaaaacatcaataagaaacacggtagagggcaataaagaactattataatgaggatcttagtatttctatgaaagatatttgctctttttaatgaacctacctcattgattctcatggcttgcagtgttgctgccgtcttcaagatgtcaacctaacacaaaaaaaaaaacatgtttccaaattaggtaacatatacaatttcaggacaagaagatatcatgtgcgcattcctaccacagtcaaacgtttattgaggccacattttatgctctggcgcagccgtttgcactcatcctgaaaccacggttatacgtacattaaaaataaaaactgaaacgtatttactagatcttacttattagctgatgggtttctaactctttcttcacaagcagagaatgagagaaaggtagagaaatcaatatttcagatagaactatactcacctctgtgatattctggtctgataattgatcaatcgagatgacttctctcttgtctaaattcagtatttcaagcataacatctgtagtctttgcgccaagttggtaggatgctattgccttgcttgtacctgttgaataaccacaaaatcagctgagatcttactattaaaacatttgggtaactaatattccattttcctttctatcctcaacaaagcactaatatgaccattaatcaagtacctacaacttgaacaagcctgtgaatatccagcttctggtcgctgccagataccttgattctcaaaattgtgcctaccaccttttcgtcaactttgttgatatcatcaagaagagactccaaaaatttacgtctcaaataaatcaggttgatattgtgaacatcaatggctgcgtatgcatccagattttcattttgtactctgccatcagttttcctacgcatcttccgtcttctatccctgaccattggatcatgaacactatcctcctctatttggctaggtacagcatgagtagtttcaccattcgtggtcttagcgcctttcggtttctcttgaataaggacatgagactctagaagcttaagcatttcaaagtgacccactcgctgttttccaaacaacttcacaagcatctggtcacaaagaacttgagacttctgaagaggatccctaagattttttttcttgatatagtcaagcagaagaccctgcacgtcaaactgagatagaacagatgtatcgccatttttcatgaacgacacaaactcgaggagttcttttgttgcccagctcgtatctccaggagccttctttaggatattacttggatttttgccatccaacttgttgggtaaggtaggggaatcactggtccttcttctttttgttccatttactgctacatctaaagctctgttattggtatgatcattttgtgactccactttgggagcagtgttaggaacctccttccaaggattatttgctctagtaagctcatcaacagttagagacagctcttccttcaggcaaagccaatataccttgaatagatactcccaactaagcttgtcatcgaaatccaccttaacctacaaaacaagaaaaacatttatgagctacatacattatgatagagtaaagaggataatttaaaagaacaacactcaactttcttaaaatactgaagatatacaagtttccctcccaaaacaagagtgacccttgtctttcagtttcacccgattgtttcaaaaacccaacataccctactgctcttgaattattacagaggaagctcatggctaacatctttggaaaactctcatcctttcacgtaatacatgaaatcaatcaaccccgaatctctaaatattcatgattttaacttgcgattgattgctatcatcttacctattgtgtcgagatcatagtgcatggcaacactacgagggattagaatcgggttaacataaatagaaacccttggttgcttaatatagaacaagcaaagagacgtaaagcccaaacaagactcaaatcaacaaactatattcttcttaaggaaactgtggcaggttggtaaaaataatcggcacccaagcaaattttgcggctaaaacagtactaaatgaaaactatagattgtgaaggattgtcttaccgcttcattatctccttgagcaatattctcaatcagcattataggcttaatacatgtgccacaaagacccatgttacctctcacaatcacatagtcagcatctttaatgcaccgcttacaaacagaaaaagtgcatgtataacacatgtaactggaagctttttggcatgtaccacatatgtgccaccctgaaatgaatgaacgaaacatcagatttcgaaggatgttcacgtcatcatgtaagagatgtgaaataacgacatgtcagaacaatcagcctctagattgctgacagcaacatagtaacatctatgatggactatacgacataccacaattccatttggccgttgttcgaaagaatgcctcatctctcttaatacaagctggatggtatgccttggggcaattcctgaatggacaaacaaagccatcaaaaacttatcaataactcgaacctcgattcttaaacctccatagatagctatttttaacattaccctcttgcttgtttagaaattgagtagctctaacctatgagcattaaccaacgcataatcgatacttagaatctcgataatgagatacagaacataatagaatatccaaaaaaaaactacgaaattaagctcttcttcgttgtgaaccaactaaaacatatggcaaggctctaatctcccactagagcatactatctaacagaattattatcactataagctaacaatcacttaccggcgatcacagagaacaaggtctccaccgtcgaagcaaataaagcaaacatcttcttccttgtcttccttcttcggcggcggtgggggtggacgaatatgcaacggcgtattagcctgtgcccttggaggcctcccccgttttcgttttattggggcagcttcatcaataactttaacctcttgctcattggacataggcacagcaaccgccccagcaaccgtggaggcaggtacagagagagcaggacttggttaacaccgatctcttcacattgatcaactctcataagatcgattcctctgacggaactctcttcgcgaccagccaaagaagccaactccggcacgccttgctggagttgcttctgttgattctccatgattagtgaagaatttgaaaaaattgtgagcagtacttgcagatcaactagtgaaatagaaaccctaatctgaggttctttggggattttggcgatgatgaatgatgatgatgatggagagaagtatgggtgatgtgtttagaaaacgaagactagtgggaagaaaaaatcatatggactttttttttcttcttctattcttttccacttctttagttcttactttgttatgaccaaatgtataacaaaaatgttgtcacttctttctgcttatagaatttttattatttcaaaaatactagtaccaatttctacagattccaaaaatactataatttctagatttcaaattcatttctaaaatcttatgttagatttcctagcttggttaaaccttcaaatatttatccaaaaataacatttgagttaagtagatatggaattccagcttattaggtagatagttattttcttaaaaaaacataggtagacatctatttgtggtgtccaatttagcaaaatatatggagcattttattttattatttaagaaaatatgatattatgtaatatacaatgttcatatacaataacgtaaaatttatcaacatcatttaaaaatcttacctacgtaaaattccttggccaaaaaatattatatagtattaaaaattccttggcatattcttgaatgttttgtaagaaaaacatgacaagaaaaaatgtaaatttggttacattccacgtaaaacttctacctacgtaaagttacttcacaaaaactaaaaatagaaaagttatttgtattcactatgaatattcttaaataccaacacacaacaaagaaatcatattcttgtatgttttaataagaaaactgtgatgcgaaaacaatgtaaattttgttaacagtccacctaaaaaccctatatttgtaaagttgcttagcaaaaaaaataaaaataaataataaaatagaaagttatttgcaaataaccttctacaatttgggtagttactatgatttttttgtttttttcaacttggtagttactatgaatattcttacatattaacaaacaacaaacaaacaaaaaaaaaaaaaaaaaaaagaatccaaccaagaaatcaagtgtggaggataatagaatttttttttgactcaatatgttctaagttttcacatcattttacgcatttcacacaattagtatcccaaggttgaagaaacaagtaccttaaaacatctatttactaaaataaaaacataaaattgtaacccaaaggagtgtaatctcatagaaatttcatgatttggtcatctatgcttgaataacttcattcgcgacactcacatggtattgtaggtaggctttgtacctttgttgggcattgttcacgtgcatgttagacttcacttttgttataaagttttgaactttgatctttttgtttatagtaatatattatccttttactatttctaataaaagtatacatcggtgatattcggagtcttacaaactttggaaaaaacacattttctgttaaaactacattttgtagatttatattttctttgaagttttcaaaattttgtagatgacatagctactgagattattgtagtcaaaattcaatttattttcttttaccttgaaggtactattcaatcgagtcaatatctttgatttatgatgatgctaagaagtaaaaaaagaaacgagctaacaaggaaaaaagagtacaatccaacgtgagggaatgatttcagatctcaaatttatttggttagagtgcttaaatatttgtcaccttacaaattaaagatttctaacacacaatcttctcaactaatgatgttaaccacaaaaccgtattaattaagtgtctgcagaacaacatcacataatttatgaattatttaacaaaacattaagtatatatctctaattatttttttgaaaaggtgtacatttttagtaaccagagaacaaaattgtaatggtaggcagctagagcatatttttcatatttgtacatttttacatggtcaattggtcattactcattagcttaattgaaattatttctgcctatatagcttaatttttcgtaaatttattagagggagtaggtgttaaattctgattggtggggaagtaccatcatatatggataggtcaaacaacaacccaaacccgacccgtgcagcaaaagtttgtaaaaagaggaactaaagtggacccgacttaattcagaacttcagaaatcagaaagcaaaaacagaattgtgtattattctcttctattcaggaaattgatccaacaaatgaaagattactcgaagatcggcgataaacttgtgatgcagagacctagacgacgtttggaaggcaccgccatgggcgccaccgtgttcgatctccgtcccggcgtcggcatcggacctttctctatcggtaattgcgattctctcaaatatcataatttctgctacttttcgttagtttctagaattcgagaaggagtatcatctacgctgcgtctatcggatttggaagattgcaaatcgatttgcgatcggagattgcgtgttgttttgggaattctttgaaaacatcgcgatgaagtttctcgagattgcgtggtttagataactgttggatcatctttagtaatagcaaatgctgtgttagttttttagttctttagcagactgtttcatcttccgatcagaaccgactaatcaagttgttgtgttgtttcaggaatgccgatttgtgaagcatttgctcaaatagagcagcagcctaacatatatgatgttgttcatgttaaatactacgacgaggtttgtactaggtcacggattgtattagatacttcttttatccaacttatcttcattgtttgttgagttttctatgattccgttgcctcatgcaggatcctttgaaactggatgttgttattagctttccagatcatgggtttcatcttcgatttgatccctggtctcaggtacaattctttcctagatgatactgtggacctatggcttttgcatgtgtatgattaaaccaacttcactgctttacaaacttttgttttcaactattcaagagtggaaagcaatttagtgtatcgctatataactagttttaactggaataaacttagcttttgttcttccaatttgtttgcagaggttacggcttgttgaaatatttgatgtcaagcggcttcagatgcgctacgccacttctatgattgggtgagtcgaatgggatcaatttttttggctttggtgtgtagtttactgttgtaacaactgtcttttgcttttacttcaggggtccatcaactctggcaacgtttgtggctgtttatgcactttttggaccaacctttcctgggatttatgataaagaaagagggatttattctctgttctacccggtgagcaagaaatagacagatggtcacattgttttaccattaatgtttgaatttgttctatcaatgtttaatctttttaactattgcaggggctatccttcgagtttccaattccaaaccagtacacggactgctgccatgatggagaaggtttgttcttctccggactccagtgaaattttgtttatattttttgtcttgtccgatatctaacttctcagatttttttttctcctttacaaagcggcactaccgttagagtttccagatggcaccacaccagtaacatgccgggtctctatatatgacaactcaagtgacaaaaaagttggtgtcggaaaattgatggatagagcttctgttcctcctctacctcctggcagtctgtatatggaagaagttcatgtcaaggtttggcttatcttcatttacactcgttcctctttgtgtattttaatatctcgtagcctaacttaattagcagttaaccggttccttactcttcgcatgacttaatttaatatttatgcagcctggcaaggaactatactttactgttggaggccagcatatgccttttggtgcatcaccacaggtaaagtctgtaccttgtcttattttgcttcttctttgatctttggaactaatcatttcgtgcttcgagcaggatgtatggactgaattaggtcgaccttgtgggatccacccaaagcaggtgatctataccgtatctctaaacttgtttgtatatcacgatcagatgcttccattagcttctcttactatgttacctgcgttatctgttacagttcaatactcaactggacatttgtatttctgcttctgaattgtcctttgctttccaggtagatcaaatggttattcattctgcgtcagatcctcgaccaaaaacaactatctgtggtgattacttttacaactattttactcgtggtttggacatcctgtttgatggcgaggtaggaaactcatcaactagagttatatgttccattcgtacgttttctttattcacaactctaccttttctgcagactcacaaagttaaaaagtttgttcttcacaccaactatccgggtcatgctgatttcaactcatacataaagtgcaactttgtgatttcgggtacgtaatacttatgaagcagctcatgtcagtcaatatattcaatactcgatatatgttgtctatttttccaacaaacctacgctttcatgtcacttttcagctggagcggatgcggcagaagcaaacagaagtggaaacaagatcactccaagcactaactgggatcaggtcaaggtaaatcttcagaccaatgtgataaaagcagaacagaaaattgaatgaaaaactagtctatgttagggcttgaccaattgttcgtgagagtttttactgacgtaaaatctctttaccatcccatcattgatggctctaattgcgtaatgggaagaaacttgggatgaagcattaggaaattgatctgaatagttaaatctgggatcagaacagattgaatgagtcatttctcatggaaatgtctttatgcttaggaaatactcggggaatgtgggccagcagctattcagacgcaaggctcaacgagcaacccttttggatctacatatgtgtatggctatcagaatgttgcttttgaggtaatgcatttttgtaataaccctagattcagtaactttgatccttgttatatacttgcagactgttaagtgaaactttatgttgggttaaaatatttgcaggtgatgaagaacggtcatatagccactataaccttgttccagtcatgatgcgtatccaccgctgaggtatatgcccgttactaattcttcgtttatgttgaatttggtcgtaatgaatattcactgtttggttttgtagaaaaaatggctcagattaatgtcttgtgttatatgctacttaacaaagcttcttacatcaatcaatgtctttgtaggggctcaagatgctatcttcaaccagactctgtaaatctaacgtcacaagaagctacgaaaactatcgatgataccaaaaacgacaaatgttgtacagttatacatttgtctagttactatcacccgggttataataacagttattctggttataattcttttcagactttattatgactaattatatatcatttatctgttaaaagttcataaaatagcctcatcatttgagttttttgcggtatcgataaattttaaggttttaaaaaaagaaattgaaaaaacaaaaaaaagctccgtcgccgggactcgaacccgggtctctcgggtgagagccgagtatcctaaccagctagactacgacggaatgttgcctactgatgacttaaattttatatagcacactactggtatagtcgagaaggttgtgcggtatctcttctatccgttgcgtagcaaggttttgtctttcgtgtatggttccgggaaggaaaaggggaagtggattgttttcatcggcgataagtctcttctcctctggtacttcttctttcgattctcttctcttttgtttcgggttccacttagatactctgtagctgctttcatttcagaattggcttttggttcaatccattggtagtgcgagaacttgaattccgaaatagttccgatttctcttcagattttggatgttatcttgctaattgagtttagaatccatagtaatagtgcgattattgatttagcggttgtttagggtttaagcctgtttttcatttgattttagggattgaggttggtggtgtgaggtaaagcttcggtagttagagatgaatgcgtccggcttaactgttactccgcccagatttcactttcgatggcgttctgatcgttttggtacatctcagagaagctctcaagcttttactgttcttagcaaattgaataatcgaaattccgcttggcctgttcttaaaaggtagtgttttttggttattgtttcatttagcatatgctagttctttcttcgtggttatctgtaatgttcttctcttcggtgttgcgcagttctcgtttggcgcttcctacacaaagaagaaatgctatgatcactcgtgccatgagtgcttcctttggtgatatggcagacgattcagctggtaatacattcttctgagctatgcacaatttaaggttatgctttctagtaattggcacagactcataatcctgagttaagcttgtaaacggtgcttttgagtaatttagtagttatatttaagtgcttttgaatcgaactagctttcattagacgaagcaatacctagctagcaattcaatgaaatgcgtaattcttgggttgaaaacttgaattccaaactgactaagctacttccattggttcagctatcttccctcggatcaatgtcaaagacccatataaacggcttgggataagccggatggcctcagaggatgagattcaaggagcgaggaactttctcattcagcaatacgcagggcacaaacccagtgttgatgcaatcgaatcagctcatgacaagattatcatgcagaagtttcatgagaggaaaaaccccaagattgacatatcgaaaaaggttcgccaagtgaggcagtccaaagttgtcaactttgttttcgagagattccaaactcctcccaatgcagtccttgtcaaaacagcagtcacgtttgcagttcttggcgttctaaccgttctgttcccgacagaagaaggaccgaccttgcaggttttgttatcactaatagctaccttttacttcatccaccaaaggctccagaagaagctctggactttcctttacgggtaataagctgatcttaattgtaaaaccgttgctacctacttgattagaatccacacctgatcaggttgatattttgaaacagagcgggagctttcatcttctcgtggctggttgggactttcttgatggtatctgtgatcccaccgttcatcaaaggaccaagaggttttgaagtcatgtcttcgctcctaagctatgttttgctttgggtcgcttcgagttacctccggtagcgtgctagcttttttcttttccccgtcttttgggccagaaattcaagtgttatctcggatatatgaaaacacacgaacagagaaaaaatgcatcattttcatgtgacagagagagagagagagagagagatatgatttgtggtcttggagttgttatttcacggagacctcattaactttcaaagctcagtttccaagttgtggctacaaacaaagaatagtaagagttgattacggaaattagtcggatactagtctgatttcataggaattaggaaacatggcctcatagcacatcatgtgctgtctcatacataataactatggctgcatgattttgtccatggcctcattatatgtgcatggccctcttatttatttctgtgtctaatttatgtatatctccaccgaaataataaacattttagatcaaaaccatttgtcagcctcacgattaatttttttctttcttatcaacataattctttttttttggcaatgtacggccttccaaactagtgaacgttgtaaaattgggctatcattagaagttcaataatttgaaacgctaaaaaggttggctaacgcaaattttggtcgtttcaaatataaatataaggtttatttattaattaatccatctagatgattaactagattggtaacgacgactaatctttagacgatattttcattgaaccactttatgtatgttagtaagaaaaagcaaatgcacatgccttcatgtgctctgcttcacttatcaatagtgaactaaaaattcgttaaccataccttaaaaacgcgaaaaatgtaaataaatgcttgtataaaatagttgcttgcaaaatcatataatttattgtgtggtactgatgtgatgtaccattaattaagatcgaaataatgtgtgttcatcataggtgaccgtttaatgatgtgattaatcaactttagactgattttggattaaaacattattattagataatgtgcataattattttttggaataagaaagatatggcctagacaaagtcattattcttttttgaaaaaaatatgtggataataaaattgagacacatttatggcatatattattaatgaggagaaatctttgaaattttgcaatttggttattaaaaaaattggcttcatttggtaaccttttaattaagctgaaaccaaatgtagataaattacagaagctgatccatttttttttattttttttttaatattcttggacaattgtctgatttacgagcaacaagagagagtctctctacacaaaaaaaaaatcattagctgctctaaatgatgctttctttagcgcgctaatataattagctaattccttaattgtaccaatgaagacgaagaaaacaaaaagccattaacgatttaacagctccacaattccgactttttttgaaaacacctgaattattttttatcgctgtagcgaaagcgaaataggtcgcctgagaaatctctggtttctccgaatcgcctccttagcatcgttcctccgtcggaacaccgtcgcttctgccattgttctccatctcgcatttggtctcgtttctcagatttccatacctcattcgctgattcgcaggtgagaacaaattcgttgattgttcttgatccctttaccggattttatgattttgtggcattggttcgtcttaatgctttgcggttccggtttctagtagaactacgcacgatggttggattttggtagttttggttttgaattttgtgagattcgttgatttgaagttctagtgtgagtctgtgagccggtgaaaggaatttctgagctcctcgccgaaacttaggttcatgttccggcgaggcatgtcacactattgaaaggatttgaaatttgtttgggtgtaattgcgtcgtgttcgttattatattagtactttcttggatcttacggctaagtttgtgttggattttttgttctttgttgtttaccagagacatgtgtaagtagtcacaaactttgtttcctcactgtgcacatggagttaccaaagattcttggctccacattgaacattctgcagaaacggctgtgattattataatatcaaatctgttaaggtaactgatttcttttgtttaagtgttttcttgtggttttaggcaataaaatatgagcgtaggcttgaaacttatgcaacatgcaaggaagactttttgacagactgtttaggagggggaccattgcgaaaacacacaaaatcctctccataatattatatgaaacttgggtttctttatgtctcaaacaatgatgagaaaaaccatgttactgatttcgttgtcattttctgctgagatattttggatataaaacacgtggatagagacaatgttcttctgccaaagacatgaatatagacaagttgataagtagtctgatgatctttagtgattgatttgtcctcataattcctgttcgctctctctatatgtatgacattgctttgttcttgacctggtttcttttggggtaggatgcgggaagggaggtgacgggtgaagatgggtataggagaggatcagatgcaaggatcgagtggtagggaagagaagatttttgtttctgttcgtctgaggccattaaatgtgagagaaagggcaaggaatgatgtggcagattgggagtgtatcaatgatgaaacggtcatatacaggagtcatctctctatatcagagcgttccatgtaccccactgcatacacatttggtaagacttgctcacttttgaaacttcttgatcaaagttaatccttaaatttatcttgctgagctttcctatgcctctagacagagtgtttggccctgagtgttctaccagggaggtgtatgatcaaggggcgaaggaagtggctctctctgttgtcagtggggttcatggtaaggcatgtctcctactgctttttagttttttatcctctgtggctcatgtttgatacaaatttcaactgttttcagctagtgtctttgcatatgggcaaacaagcagtggaaagacatacactatgattggtattacggattatgccttggctgatatatatgattacattgagaaggtaaagttaacaatatcagagtcttcatagtaatcttaccgcattatttccaattcattcagtaactgtcgccttttaaaaaaattatttgttttttgcagcacaatgaaagagaattcattctgaagttctcagccatggagatctataatgagtctgtaagagacctcttgagtacagacattagtccactcagagttctagatgatcctgaggtaaaagttgggactggcatcttatggaattggtatgcataatctcactttactggtcatttactttgggacagaaaggaacagttgtcgagaaactcacggaggaaactctgcgggactggaatcattttaaggagcttttatcaatctgtataggtacttattttcctaacatgtactcaattaatacttttagtgttttggtcacaagtttcactaagtatcatcccatcattgcagctcaacggcaaattggagagacagctttaaatgaagttagttcccgctctcatcagattctgagattggtaaggcattctgctgatttagtttaatgatacgacactgcagtcttcaggctgcgttttctacttatttctgactgatatgtttaacagacagttgaaagcacagcacgtgaatatttggcgaaggataaatttagtacactcacagcgacagtggtatatacttttaaatcttccattatgtactatcctaaaacaaaacatgaaatatattcatagattaactaattatcctgcagaatttcattgatcttgctggaagtgaacgtgcatctcaatcattatcagctggcacaaggttgaaagaaggtggtcatataaaccgaagtttactaacactaggaactgtcattcgaaagctaaggttagcctgtgacctatagcgtcaatgaaattctgtgatctgtgccaccttaggctgctctttattctttccctatattcaaagatggttaagcagctaatcattgtctttgagagttgagttccaagctgaaacataggactttcgcccagtaacgccagtttaccaagttattagcagattgctgttattaacatctaatgtttgcttctttttacattactgaattatgtggctagcttaatgcagtaaaggaaaaaatgggcacattccattcagagattcaaagctgacacgcatacttcagacttccttgggaggaaacgccagaacttccataatctgcacactgagtcctgcaagagtacacgttgagcaatcaagaaacacattgttattcgcaagctgtgcaaaggaggtgacaacaaatgcacaagtcaacgtcgtcatgtctgataaagctctggttagacatttacagagagaattggctaaactggagagcgagttgagcagccctcgtcaagctcttgttgtgtctgacacaactgcattactgaaggagaaagacctccaaatcgaaaaggtaatgcgattatttacttcattcaacatattaagttatgtaaaaaccagttgcagtatgagagctcacttacccaatattttttttgtgacaaccaacttttgtattaccggtagttcattcataccagtaaatatttttcatgatctgtcttaatatgtaaatctttttcatgattcattcactctagagactttacgttcatttcattatttacagctaaataaagaggtattccaactagcacaagaattagagagggcttattctcggattgaggatcttcaacagattattggagaagcaccacaacaagagatattatcaacagactcagaacagacaaacacaaatgtacgttaatatcatttttttttagtttcaccggatgataagcctttcaactgcccgatttataatcctgtttttgtattcctccaggtggttctgggacgtcagtaccccaagttacgggtgcgtagttcatgggagtctctaaatataacaccagagagtcccctatcagcgcaagcgtccattatgatttccccacaatcaaccgagcatggttctgacgagaatgttttccagctttcagacttgaggttgaattcgggtgcaagtagtccagctcaacaccttgcgtttgtaactcctggtaaattcactaaagttcgacttaatattcgtggggtagaaagtaaaaaccaactgcacattcacaagggggaatctgtagatcagtctcgtgttcagggggaacgattgcatgaaatggacgaaccaagtgaggtggattctgaagatacctgcacggaacttcaatgcatagaaacagagagtcctggtatcatcatgtatccagagccaaatatacttccagaccggtgtaaggctgtgagtgcactaccattatgtgaaccagagtcaaagaactcaagaccaccaacagaaactgcagaagaaaaagaagaaaaagaagaaacagaagaaaaagaggaagaagaagaagaaagagttaaggaagtcagtagtgtctctatccaaacaaaggagaaaagtggaccgatcaaagtctctccacgctgtgttttgtcacttactgacgaatcatttccggatgagtcttctaacctcaaaagagacccaacacatcaagattttgtcactccgtctcctgaaaagctttatgcttggcatcttgagagtaatgggcaaacggcgggaggcacggggtttactagaagccgaagctgcggagcaagctttgtatcaagctcttccttttctctgtctgagagagatgctaacacaccaccatgctggtatcagaatgaaagagctgagagcaacctgaaaccgtccaacagcaagaggccaccattgccaaagcatattagccggatgagcatgccagcaacttggttcgagaaagacttcaaccacacccaaagaatgccagctggtttagatggtgttaatatgataaagtcatcaccgaatggatcacaggtttctacctctaaatctcatgtgtatgcacgccagacaagtggtagagctttaatcagccaagacgaaggtgaagagactgttcctcagagggacaagcgaatcattcacctatcggttagttttcctaacttggtcaagcagagcttgcttttcgtttacctatacttggtacgacctttagatatcgtcattattttgagaaccacctctatcatggcagatggaggagatagagcaaaaattcttggctctaagatcgtcaaagagtttcaaggacgctgcggttgacccaatacaagactatttaaccatgccattgaactggccgttggagttcaaaagactcgagatggagataatagagctatggcatgcttgcaacgtttccttgtcacacagaagttacttcttccttctcttcagaggagatcagaaagattgcttgtacatggaggtcgaactccgtaggctcaagtacatcagagaaacctttacccacaataacaaagctattgaaaatggacgcactcttacatcaatgtccaggtatatatattcacccaaaaacaccttaaatttctttgacggtgaatgtattcggttatttaactgtttgggccatgaaacaaaacagcctgagggcgttgaacagggagaggtacaagctgagtcagctgatgcagaagaaactgacgaaagaggagagagagaacgtgttcttgagatggggtattgggctgaatacaaagcacagacggctccaactggcacatcgtctctggtcagagagcaaagatatggatcatgtccgagagagcgcctcagttgtgggaaagctcatggggttcgtggacatggatttggcatccaaggaaatgtttggcctcaacttctcacttagaccccgtgccaagaaatctagcctttggaaacgcagcgttttgtcgctctctattttgtaattataaaggacaaaaatccaagcgattcattcctgagcactaaattaaaagtggtgtggcttctgtgagaagtacattcacaaatctaaatttgatttgggtctgagactgagattgagcagtctcaaatgtaaaattttaaaatggcaaatcgcaaaaatcatagatgatatgtttgtgcgtttaactgtttagagtcaggtgatactctaaagtcgttagcataacccgacatctcaataagaaaagctcttgtgtttctcttccggtgagtttgaaatcttttcatgcagtttacttgtgtgtcacatttttattgacctaagaatgcttcacatgcaaatcgctctctctcaaatgcctcaaccttgaacctgctctttgccttaaaatcccagtgatatctgaatctgaaccatgtttatgtttgtgtacattagccaaattcagggtgaattgaagtcattttgaaagattcatgaattgaagaactgtagtatatgattctttttgctccttcattcaaaattcactgcgctttcatcctcaactcattggagggaaacaatttagataacttaaaaagcaacaaagaaactaaaacataaaaagacaacaaacaaccaccaaagcaacaaaaagagaaagaaaaaaaaacgaaatttaaaactctataaaagcagataaatgtaagaaactccatctttgtataattgatcaaatcaaggttgctgcttagcatccatgtatccagcatcaacaagcactttctccctcttagcaagctcaagatcttcatcaaccatcatcttcacaagcttctcaaaccctacttgtggtttccaccccaacacttcctttgccttgcttgcatctccttgaaggttatctacttcagcaggcctaaagtacctctggtcaatctcaacataatctttccaattgagtcccaaatacccaaatgacacatcaagaaactcttccactgtgtgtccttcctctgttgccacaacgtaatcatctggcttctcttgctgcaacatcaaccacattgcttccacataatctcctgcaaatccccaatctcttgacgcttgcaaattcccaaggaatagcttcgtctgcaaaccaaccttgatccttcccaatgctcttgtgatcttcctcgtcacgaaattctcaccacggcgaggtgactcgtgattgaacaagattccgttacaagcgaagagaccgtacgcctctctgtaattcactgtgtaccaatgagcagcgcatttggaagctgcgtaaggagatctgaggtgaatcggcgtcgtctccgattgtggaggaggagttgatccaaacatctccgaagatccggcttggtaatacttgacggtacggccactgtcgatggtgtgagatctgacggcttcaaggagacggagagcaccggttgcgactacatcggctgtgtaatcagggatctcgaaggagacagcgacgtgagattgagcagctaggttataaacttcgtcaggtttgatcacatcgatccaacgacggagagaggaagcgtcggtgagatcggcgtagtggagtttcatcagagctttgttgacattgtgtggatcgatgtagatatggttgattcgctgggtgttgaaattcgatgatcgacggatcagaccatgaacttcgtagccttttccgagaaggaactccgtcaggtatgatccgtcctggccggtgattccggtgatcagagctatcttcctcggttcaacgacggtggaatcagctttgggagcggtgatggattcggaatcggatctggatccgttgttctctgacgccattgttgggttttcggatctgggatttcagagacaaatgctaacgtcagctctgtgttgaaaatccgtgttgaattgggctgttagagttttagctgatttaaatagggtcagagaggttgaagacggaggggtattttagtcaatttcaggataagggtagtttggtaatctttgttggtctttaagttttttttaattgactattgattggatattttccttgtttatgtataacacgttaatgatttacttattttgtggtcaaactcatcaatggtgtactatagaattttcttagatcatttgcaaactttccacaaaaacaaacatattaagattttcaaatcattttatgaactgtccaaacaaaaatagtgaaaagtatttgaaagtttataagacaataattgcaaaaacaattagagtgaaaagtagtcaaacaaagcatttaatatacatttagtgtagtcaaaaattaattaaaaagttacaaatttgatacattaaaaatattagtaattttttgtagaagcaattactattttgtactcaactgaaaaaattgagagaattggattgaaaaaaaagacagaaatgaaactcaccatttactaaaaaaatgaagcaaatgataagagtataacttggctcaatgccgaaacatactaacatatatatttagtctcttgagttgtgttcgagtggtggacaatatgtaatctccacgatttgttttaggaatcttatgcttcaaatcacctttgttgttttccttttacaaatcttcaatcattttcatttatttttcttctttctgtcacaaataattgattggtttgtcaagatatgcttttatatattatttatctttgcctgttattctttcgacaaccaagcaaagtgatcatttgaccacaacaaaaaagcgttgagacttgagacaagtgaaaattataaaccatgcgttggaccatcttatgcatccggaacttaggtataccaacttagtcttaccaagaattatattcgatcagacactaattaaagaagttaattatttcatatgttcgacaagcatcaaaatgtggcccgtattactatccatcgaacgaatattctagcattagtggatttctccaagctaaactacaatctcaatctagaggatgcaacacggaaaccaaaactgaattgctcaacaaccatgattttcaacgttaattatggtgtttggtcacttgactcactttggctacaacttgtgttgaggttgataaacctttgttgtcatctcttataatattggactaatgaacttgaagacagaaagaaaactttagaccaccgtgataaagaggaaaaaacattcctagggtttttttatctatacaaaaaacccgatcaagtggctgatctttttactaaagcattgggtagttccagttttagagtatcttttctccaagttgggtgttttaaatttacacacaccaacttgaggggagtgttatcgagatagatgtgaatatgtcgagctagatagatatgaattttgtttagatgtgtttagtatctctaaagataaggtttagagaatattgatgtacacacataggtatatacatgtatataagggaaacgtatcccaagtaaataacacaactcaattaaaccaaagtctcttcttaagtttacaaaacttgacgaattgtggtgtaaaggcaaagaagattataaaggtcgttcgaagagatgggaatgtgatagttcttcaacttgttcaagtactaggaagagtctattcgggcaatggtgcaataggcaattgagaaaacaattgagggtgtgaaacaaagggttgcaatttggttatacatgctcaagcctcacggtgagcgcaatttgtttttggcaattatcttatttgttggctattctctgaaggaaagaacattaaaaaattgggcttacaaaggtttgaattcaacttagattgcaaagacttagtgatgggccttatggatgagattacttgggcgtccttgagaattgtggcccacgaagttcaagagatactgataggatacattcgacgtattccccatttcgttttacattttaagatgatgatgtgtgaaactagttaagaagggttcttcttagtcctaaaagagttattaaagtttttttaaaactctataaagtttcgggcttcttaataataaacacagaaatgataatggcacttaaaaaaaaaaatcataattctcttaagattttctgaccaattgtccaataatcattgtccaataatggtattatttgcttatttttttactacataatctaaagttaatcaatatcctttaatccaataataatgacaacaaaactgtgtcacttttctagtggggtataaaatatataataatatggctcttctcctaaagtactgcaaagagaagaagatctcgttgacgccccaaaaaataaccagaggtaatggttccgcttccatgggagctagaggaagatatactgtctcgacttgcagcccaatctcttgttcgattcagatccgtttgcaaacgatggaattatcttttcgatgaaaagagtttcatcaaaaaccacttcgctcgtgcttgtcctcagttcatcttcatgaccgattccaatatttattcgatagagatcatcggtctcgacggcgttgatccaacgattaagttacgtgtgctagactcctctggtatcccttaccgtgactggaaatttgcttacataaccatcactgcttgcgatgggttcttgttttgtaactcttgggctagtcctaaggggacagctttttggaatccgtggttgaaacaggttaaatggatcgagtacgaggataaaggtttcaatgtctgtggcttaggatacgataatactagagacggaaaggtttacaaaatcttggggtatttaatgtgtcgccctgaagatgggagctcttacgtataccaccagagagttgcgatctacgactgtgcctctcacgcgttcaagtttattgaaatatcgaacaaggactggttcctaaccgatgttacacgattcagtgtgtctttgaacggaaatctctattggctttctcctattcccaacactgatgactttctcatccaatgttttgatttctctagggagatatgcaaacccttttgtcttcttccttgtcggaagtttgatgctttcgatttacttgtaagttttcaggggagataggttatccttgttaaagcaatgttataagacaaggaaggttgagatttgggttacgaagaataagattgatactagtaacaacaatggatcagacgaagttgtgtggattcacttgttgacgttgctaccaaataacttgccaaacttatttatcgagtgttatggcattagttacttcatctatgacaagaccaccttcatcatttattgtgctgacgagaacacttatgcggcttgcatctatattgtcaggggagatttgctcaagaagtttgtaattgacaccatggttttctgttgttatagctgtgtttatgctcccaattttatcccccttcctttaatgtaaaagttctgaatataataataagatgctttatttattaaagctctcaaatcaacatttattttatttcactagtagtttaaaccaattgacaaaaccggttcagtcaatgttacaacttacaatccaaaacaacaaaccaaaccggataaacacccaaaatgcccaaaaaaataacagaacatgtgactaaagctttgacaaacggatgaaatctaggctctacgaccactacaatgatataatatatgtactgtgcactgaaataatacccagcaaaatagtgatcagttccaaagtctaaaagaaatcagtatgactcattacagttttaccaatccaacatttgtcgccatcataatcaaaatcacacgatcgtagtcgtagaagcctttgcgttgatcgttacttagagtgattaccattatcgtcacatcgtcatgatatctccgtctcctaccaaccggaatattcgtcaactcttccaatgcgaagcctaaatcaaagtgccaattttcgtctcctaactttcttgaacctttcaaaaagaaaaatgtcaattttatcttttcgtcttctaattttctagtcggactagttgttgtttttccaatttaatgtcggctttcaactcaggcgtagccggtgttttggtcggattaaaatattccaaacttagttttgtctaagtgctggatttttgtgttttctctttctacatgacttaaaattaaatcttgtttagattatgtatgatttactgtcggcttggctcttctaaaggactaatatccttgtaacttactaccgactggtatgaagactggtatgaagtggaccttttaaggttttgaggtggagctttttttgaagaatttttgaattgagatctaaagattcgttggagtcatggccagaattataagaacgtacagcaaaatttggcaggccggcggcggtaaacctatagaaggagctagcgatgatggatctaaagtccagcgacaaagctgaaccatatcgttagatatggctgataaagatcgtgtcaatactcatccttctcacgtgtggatactttttcacaagtggcatttttaactcttattttttttaaaaagttggatttagagtaagtgggcttaatttcaattttaagttgtaaatgtaggactttgttttatctgtaatgccaatttggttttccattttaataaaaaataaatagccaaaaataaggaaaaaatcttatttaattttttaaaataagtaggaatccaattgagttaataaataaatataaattaggaatccaattataatttggagttagctgagacctgagaattacacgaaattaaataaataaataactgcttccgttatatataaatacagtctctaaaggaacgtcctaacaaaatccaccgtgtactaaaaagaaaaagaaaatagaagagacagttgttagggttttctcatcaatcaatcaatcatcatcatcacccaaatccttccgccgacgtctctttcttgtttccgttttctctctccgatctctgactcatccatcgtattgaccaattccctaatcaaaatccttcgaatctcaatttgcttcgttaagaaatctgtagatctagcagaaaaaattcatatttgatctgaatctgataaaaaaacgatcaccggttgaatcaaaaagaatcgaattttgttttcactggtttgtttctttgagatttatatgaataatatgaagagatcgaagaaacccagagtttcatggccaccaggtcctaagctttgtcaggtataattaatccttatatgttccatgttttcttatccactttctaatcccaaattgattgatccatctcaccaaatctaaactctcgattataacaattaacctaatttctggatcctaaaatttcgattttgaagttttcctttaaacccaacgaattgattgatacgatcttgaatcgctgaattatttaatttcaatatccaatcgaaaaatggtgaagaaaccaagtcttgtttgttgttactttgacggctcttttggtatgtagaaggctttgatttttctatctttgaagataacgttttagctcatatagtttacatgaaattgatttgaatcaacaaagatatattcaaggttttggatttggaaatttgaatcaacatacagttagatttagattgaaacaagatatgatcaagttttgaagtttgaatgcatcaatccaatactctgcaactacaaatttacaatctttttacagatagacttgggaagccttattggtttagttacatagttttgatacacgaaaaagtcagctttggttagcttctaactatgcggattttgaacaggttaaggtttttcgaacagaggacagtcctgccaatgtagcctctcagcctcaacgtcatagctacccatctaggaaacctcgagggccagatcttccacctggttttgaaggaaatcactatgcagttaagcctaatgtttcaaacattcctcgcatcaaatggaaacgacctcctcccaaggtatattttttatactgtaaagaattggtgaatcccttttgaatctttttttatcatatctgatattaatattatgtgtcttggacaatgcagttctctgtcaatgatacttggctggttggatgtggtggcgggagctcagaatggcaaaatgaaaacttgaggatttcaaaagtgctggaagctatctatcctcatcgctctgccatcccttctcggtattttaccttcttctcttaggttattcaacattgtgttggtgtgttagttagcctgctgattgcattctgttttcatgtagaccctctgtttcaccggctgtggaagctgaatgctttgatgacagcaaaactcctgccattcgtctcactcctattgaagacgagagtgaatcttcttcagaggagtcatccaacagtaaggttgaatcaggtgttaccgcaaacaagcagggtcagttggagaccaaacctctatgttcaacccaagaacaggtttctggtcttactggtcttgcaccagacttgagtctggctgcttctgcagctctgactgcactgatgaaaaccaaggaacaagggagtttggtcgatactgagctacttatcaagttcctcagcgacccaaaattaatcaagaatcttatcactgacacatcaggtaaatcctctgaaactaagaatcagcccattgtcactaacatcaactctgctactagacctgttccgcagcctgtcagtgctgtcaccgcctcacccatggctagaaagccgcagccagtgataatacctcaagaacacagtgttgcagtttctcggtcttttactaaccctgagaggcgagtatcacctcccaagcctgtaaatggaagcatatccccacctaagcctataactggaaaaccatctagtataccaatgcccgttcatttccatgtcggtatagctaaagaacaacctcagcctgctcggttcccatcgagttctctgccaatgaaccttaacttccaccgacctccaaatgttttctcagaaccaaaggtaatagtaaatcctcaaccccaacaccaaccctattccgcattccgtacatctgaaatgaactatgttcaatcatcaattggacttggaaggggtcctcaaaccggtttcaattcttatccaatgaactttagccgggcagatgcaattggtagcgctaaaccagtagtacaacctatgaagggtctagactatttcaaaaaccttataagggaacatggcacagataatcatgaaactaaccaataccattcacaaactggaatattcaacggacgcattgataataataataagattcatcaacaatgtatctactttggcactgcgaatggatgtaatatgggagacagttgcacctatgttcatgaccggtataggcccaactttgaggccgcggctccgagggctaagagaatgaagtttggaaggtatgagagaaatggtttttgaacataaaaaaaaaaatagagttcacttttatagtcttgtctatcactggttaaggaacaaaacctgaggtgatacaactttcaattttgatcaatttgtgcgcaccaattttaattcatttaacaaagttatttgtttagagcaccagtttaatgacaccagtttaagaggtcgagaaagccggacaatattaatttaaatcatgatttcaaaactaatctgcgtaattaatttgtagtaaactatgtccggtcttttaaaacaaacgattaacggagttgagttttgtaatcgcttaaaaaaactgttgtaatatatagctagagtctggagatgtactgcaaagtataggtaatatgtagtaaaaaaataccatcaagatgaccgcaaaagatctcataaattaaagaattcaaaattctacctttaaagggcagattcgaaacgaagctcattagctttcaacacaaaaagaggttataactaaagtaaaaggctacaatggggtgttaacagaaataagaaattaaaatcaagaaagcagagaagagtgtgtctcaagtctagtagtctgccttggctgctaatgtggcagctgcacctctacgacgaccagttctccttgcagcaatttgaccaaccttagcaccagcagatttatcacgcctgaccgtactggcgtgaccaatgtgctggtggtttcctcctccgtggggatgttccactgggttcatcgcaacaccacgtacaacaggccaacagttcctcttcgctttgtacttgtggtatgcatttccagccttgagaaatggcttctctgttcttcctccacctgcaacttgcccaatcatggctctgcacgcacttggcaaaatcttcttcgatccagaaggaagcttaaccctttttatggtacaacaaacagatcaatcttgtaaattgctattcaagtcaagtaagacaatgatgttccagtaatatacttaggtttacgcataagataacaacagcacgcaacatgaagatataattatatactaataattggtttcccgaaattacctagtggtgttgctttcaggattgtgagcaattacgatggcgtaatcaccagaagccctagcgagagcaccacggtcaccgacatggagctcaacgttacagataacagctccctcagggattgatccaaggggaagaacgttaccgaccataagattagccttcttaccacagtagaggtattgtccggtgtacataccttcggcggctacgaacagttccttctgcttcatgtagcggaaaggatgacggaacgcgacacgagcgagaggagcaccacggcctgggtcgtggatgatttcggtcaccaatcctttgaggtaaccgtttcgctctccgtaatcgaggctccggaacttagctggacccttgcggtggtgggtgtgggacttgaaaacggaaccagccgcacctttacgctgtgccctaatcacacgacccatttctttaccgccacgtaatattcatcttcttcttggttgcatcccttatttataagcacaaaaaccctaaaatgttttgtcaaagaacagaaaccctacctaattcatagtcgtcggcttatggggccttcatgtaaccttctttgtaaatagactgcaggcccagttatgttagaaatactggcccagttatgttaacccaatgttatgtaaaagttttactttttattattgtgtcaaaaattcagattattctatacttatatttgcattttaattacgggtatgtataacaactaaaataaaaagagacagattctttaatagaaacgtaaattgtatgctgtcaaaatctcatatatcttagaaagtggacctctttatacgttacgttacaaattatatattttgctgacaagtgacagccgatgcaaaattgttgaactacattgttattccaattctatacaaccaatttaagaaatcaaaaaatatatttcgattgtatgtacagtttagagggctatacttttgctttgtgtttatcaccggtatagaagtaccggactatcaaagccattataataaatgatcaacttgcatgctgctgcctgcaatataagcatgaataatgcgttcattattttttatgtttaaaaagaatgagttagctgtttaatcatatgacaaaaaccaaaaacaaaagagtccagacagaataaaatctttgatagaaaacaaatagtcatgtagttggacttatgtggcggcggaggaagtccattttcatgcttatccgtcacacctgcgcatttacctgctttgtgtttactacactgtaagatgatcagaatttgatctcatctcctactagtttgtatcgtgattatgtttttctcagcatatataaaaacaagttcaaaactaaaagtatagtatttaaactttgacattcagatattgaaggcgccatgattatacgactcctaatattatcatttcatgtatcataagtactggttaacgataattaagatgttaaatattgatattttgatattgaaggcgccatgattatacgactcattaacattatcataattatatgctaattaatatgctgtatcgatgattttagatattagatcatcagttagtgtatattatatgtagagatagacagacacacatgcatgtgaagaaacgtggaacacaattgaagaaaggccatgaaaaacaaaagttgtacatatattcctcttatcatcatgtgaggaagcctcaaaaatataactacgatcctagctagtaagatgtgattgagtctaagagagtgagaaaggtgttttggtcacaaggaatggtgaggccgctctcttgcctaaacccaaactcttcctccgatttttgcagcatcatcttgaaggttggatggttgagggatgtgattgggatgacgtggcggtctctgaagtggcccacgtagacagcgaaatagcccttcttgggcacgtcttcttcgttgctcttcttcacgaagcttgaacatctcttcatcagcatctgctttagtgacgatgctcctcgtctttctctttgagtcttacttgcttcctttatctccattatgtatatttatgtactcttatatacaggtgaatgggtatggtgtcaatatgtttttgtttattttgactccgatggagagatatatatacagatcgagcaagtgatgactgaataatcatgtctttggaattaggaatattatttattttgttaaaaataatgatggattaaattggtctgacactaaacaatatcagatctatttatctattttgaatctaattaattaagcttgatgtcatcatattcattttttgtatcatatatactagttgcttgacatggcaaccacgtcaaaccgagacaacaatccctcataaatctgtctgaaaaagtccttttccgagggttttaccaacagacatcgcctgagaaaatacgatgttttcttatagtattatactagttaacagaattttaatttatttggaaatttgttagaatttgagatgtttccttgtagttttagtgttatacaaatattttggttatatattaattactttatttcaaattaataggacatatattagtgaagccatttggtttagtggctagtaaattattaagtggttttacatcatatattaattatgttcgattaattctagaaaatgtgaaagaatagtaataatggagacactgttatcagaaatttatagcatagtgcatgtaaagtcgtttctcgtgatttcgtatgttaaaaataattttgttatatgtaaacgtggtctacctagctagaactatctatcgtaaatttctgttagtcgtggaatcgttcgtaaaaaacattgtcatggtcgtaagatttttaaaagaaaaagaaaacacatacgaggtcataatttcactacgtgttaatccgaggtgacatgcatacagctttatataataaaactggtgcgtagcttaaaatggtttcaataataaattattacatgagtgggcctggccaaccaaggaagtaagaacaaacgacggcgcgaccggtcaccagtcagactataagaaaccgggctgtcaaaatcgttgtgactcaatttttgtttccaaaagaaaagaaaaaggtctaatcacgtggatcaaacttgtcgtccctttgatcaagtcaatgctctttcttcatatctcacaattgaatagtctcaagacgtctacgccacataaccatttttctcgttatctcgacatcaaaatttaataaaacaaccgattgataggatcatcaattcatcatgttaaaagtgtcaaatgagctaatccgttttatgtaattatctattttagtgcgaaacagtttacgatcaatttacaaattttcggatttacagtatagttaaaatagctataaattatctacaactcataaaaccttctatatatttctaaactagaagaaggctcgcccgtaaggcggagtttgttttttaaataaattttgtattcattattttaattatttaattgtgttatcgataaattttaagtatataaagtgattgttttattgtgttttgttttcaaatttttaacttgattaatgtattacatgagtttgttctttatattaaataatttatattttatccaagattatataactttataacaaactacagatatacattttaaaactaactattagaaaaatacaatgtcttattaaataaaactaactaatagaaaaatacattattttactaaatatggtaaagtagcacttttttaattggttagtaggagagaccatttttatttgtatatactgtaaatcttgtttatttccatctaaaatattatcctttttgttgtttataatagttttttgctctctgcgtagcattaagtggtagagaggtgaataagactagaagaacggtcaatggtgtcgatcacaaagatttctttcgcgatggaaaagttggtgactggaagaatcatctgagtgtgactcttgaaacggagaacaaaattgatatgaccatcaaggagaaatttcaagggtcaggaactcaggattgaaattttgagttaaatatgtatgttggtttgtgtgctttctttcatgctttgaaataaatgtacctttcgttgtgccgttgttatgttcctattattaatggttctagtttgaatcgagtgagtgtcattggggggttttgtttcaaacggttactttgactataatatttgtatcaaactgttcggaatatttggatagaaacatttattaggatccgttcgggtttaataactaatcgattcggtttcagaatcggacactttttatttggttccggttcggtttccaggttttgcattttatgcgcaaacctagtaggagtagtggtccacgcaagaagagaagagggaaggtgttcgagtcatttcacatattaattaatggctcttactcttactcttagtatctatctctttttgtcattcttcttctagtcgtctccttaatagtattggttaaaatatttgttttgattataagtaaatttgaactagttaacatataatcatcatgcaatatatattgcttgtatttcacaaactctcgttttctgtatataatcaaaatttaatagtttatccaaacaagactttgtgataagcacttgtttagtaatttgtaacaagatctaatttgaatgaatctccgtattaagaacaattaattcagggatattatttcttaacttgtaaggcacgcatgagtactgaacacgagatgaggatctctaaagtggtggtttaactagaccggtttcttgcaaagagccaagcagccaatggaaccaatggcttcatcttcttcgtctgcttcttaaccataacttggttcttctcctctttgcccacaatgaccttcgttaacaatggtgggttagcaaacttcaccgaacgcctcttctctagacgatcaccatacacttcatttcgatcaaaccggttcatcttgatctcggttatgttgtccggttcgttaaccgtggattcctctataaacttgaggtcatcttcgacttgagggtgttctgggaaatttctgagtgagtgattaagcttttctttagtggtttcaagctcttgtgtaaggctttcgataagctgagacaaaaccttgttctcttcctcagctttcttcagattctcctttgcttcaaccagctcatcttgaatgcttttgcaactgcttctctaatcacacggtccaaaatcattgcaagaaagttaatatatagttcatatatacacatatgttacgattgatatatgcatttgatatatatatatatatataaacaacctctacggacttgctgatgtaattatctccgagaagaattctctcgccgaaaagagtaacagcctctttaacagaacggaaaggagctccggtttcgatctcggcccgaaccatgatcaagagatgtttgttgctttagttatatgagttggtccatgtcatgacgaaccctcagctttttataaagaaagaacacatatgtttcatgaaagattgcaactgttggttgttgtcacttaaacggatggtgactagattactgactaagatgaaactaaccacgttatgatgattaaatcaatttcaacatatacattgcttagatttttttgctattttttaaacaaacttcattttcatataaataaaacatttataaattggtcttacaaaactaatagtataaatcataatcaagaagatctagttccatagttgatacattactatgtgatggttccaccatattatataatcatttattttaaaatgtaacacattgccgacggaaaattccactaaatgacaaaaatgatgagaagttgttaagtttttcgtggtgcttgttttttagtattgcaaaattagaatttaggaacaagatatagttgaaaatgtcttggcgtttacttcacactaaagaacaagtttgggtaaatatagaacaagtagaaaggttcgttggaacgtccttttgttttctcatgtgttctgttagttttaccaccaaattttattagacaacgacctctctcctatttaaatgggcctttttaggcctgaaaaacacagatcactatctcgtgaccaatattacaaagcaaagcccaataaagattcttattcttcttgagtagcaaacctaaaatgctttcctctcggagttggaatccctttcaaatgcaacacttctttagcctctacgatctcatcgtcttcactgttgtaaagaaatctgttatgtttccctgcaaattcagcttgattcgtctctacattcatcttcttcattccttcacacaacccatcaacctcctcttcttcttcttcttcttcttcttcttcctcataaagctgacttgtcggtgaagtcaaacagtaaagaacgagttatgctcatactcttgtcttctttctcttcagatatctgagaggttctcaagtttccagcaacaatcggagatgcgatcttaatcttgacatcatcatctgaaaagtttggaaattggggagtatttgctggagttggagcgagaagtctcattggagaagtgaccagatggataaaaggacgagtctttattgaatggataagctctgttccttcttcaaccttgtgtaaaagggttttgacttgtcctctcaaaagggcttcaccagatccaggcgtgatcttgattctgctgctttttctcttaaccatgaaccctgaaggaggtgtctgcatcgttagacccacgatcggtgagtcgttggttatgtcgattagtgcagacctgtcttcttcttttctttggtcgatgctcgaatcctctgttttgtctgagccaaaaagcaaagaaaaggattaggttcagaaagatcgagtctatctatgttacttataaataactaattactctgcagatgctttaaggctaaagaaactacaagaacctaaaaaagaagatgggaaagacaaacatacttgatgatgaaaagggaactttgaagtcagaatcagagtcgttgattgcagagatagcctgtgatctagtgacccttttggctgatgatggagtctccatttgaatttcgagttcttgtaaacaacaacgaaaactgaactgaaagagaatttgggaaaaaacaaagtgtgaatgaagctcgtttaggtcgcagtcttataacgttttataactaaactagccgttgtggctcctctcttgcaaagtggaagatgagccgttgccgttaccgttccgttagtaaacccacgaattatttttcttccaaaactagccgttggatccgttctctcatggaaaaagtagacgtctttgttctgtatgggcctttgactaactaaatggcccagcccgttcataacattaatcatttaaaaaatcacattgatggtataacactaattttttttttcacaggtgtataaccaactaatataaatatgcacattcacttaaaattaactaatatcataaagagtattatggcgtctgttttattgtttatccataactacatcaatcaaatccaagttgatatactagttagaacctaatactttacaaatccgatcattaatttatcttgtctgcttaagattttttttttgtgaataaggtttaattatctcatcaatacgatttagtaaaaagtctgtgcaaaaattaatgacgattgggatttttgtaacgcaagcccgtaccagaacatgtctccgccacgtgatttctccacagaccacaagcatttttaagacgtggctttctatcaaccgttaaaaacgtaaatcatattaaccatgtgtctactacctacggtgtaaacgaaactgtataacgtccctatcatataatagtaatgtgatacgttggaatgtagccaaaaagcataaaaaataaatagataattaagtttataatgttttcctacaaaatattattataccgtatgtattttttattttattttctgaagttaaaaacagatgtagttagttgagtaaattgtgttctagaaagagaagagagagcagtagtaccgtggtaggtagctagcgacctcttcgttcgtcagtcatcacaagctttgaaagattttcagctaccactctctcctttatatattcattacacatctcttctttctatatctctcttaatttagtcttttgtcttcgtaattacaatggctccaggaactttgactgagctagccggagagtctaagctcaactctaaatttgtcagggacgaagatgaacggcccaaagtcgcttacaatgtgtttagcgacgaaatcccggtgatctctctcgccggtatcgatgacgtcgatggaaaaagaggagagatctgccgtcagatcgttgaggcttgtgagaattggggcatcttccaagtggtcgatcacggcgtcgatactaacttagtggcggatatgactcgtctcgctcgtgacttctttgctttacctccggaagacaagctccgtttcgacatgtccggtggtaaaaaaggaggattcatcgtctctagtcacctccaggtaaaagccacaccacaatcttctaggttaaatacgtaattatgttttaatcttgccgttaaagacataataattatactataaatacagggagaggctgtgcaagattggagagagattgtaacgtatttctcgtacccggtgagaaacagagactactcacggtggccagataagccggaaggttgggtgaaagtgacggaggagtatagtgagaggcttatgagtttggcttgtaagcttcttgaggttttgtctgaagctatgggtcttgagaaagagtctcttaccaatgcatgcgtcgatatggaccaaaagattgttgttaattattacccaaaatgccctcagcctgatctcaccctcggactcaagcgtcacactgaccctggaaccattaccttgctgctacaagaccaagtcggtggattacaagccacacgtgacaatggcaagacatggattacggttcagcctgttgaaggagcgtttgtcgtcaatctcggcgaccacggccatgttagtactctatccatttattggcttttttgtttctctgtttttggttttgacttggtcaatcttgatttgtcttgatgaagtttttgagcaatgggaggttcaagaatgctgatcatcaggccgtggtgaactctaactcgagcagattatccatagccacgttccagaaccccgcgccggatgccacagtgtatccactgaaagtaagagaaggagagaaggcaatattggaggagccaatcacgtttgccgagatgtataagagaaagatgggaagagatttggagcttgctcgcctcaagaagctggctaaagaggagcgtgaccacaaagaagttgacaagcctgtcgaccaaatcttcgcttagaatctttgtgttcttgcttacttgttgttgcgttggttctgttttgtacgttggtactgaaaattatgctaggctcggtgtgttttgtgtttatttatgttctttcgaatcataaagaaataatgataattgatgcacttgtctatgacaaaaacatcatactccacctgtatttgacgcgttgggtttatgtcaaaaagcattaatacttcaactcctctctattcagtggcatacatacattgttggtaactgtcattgtctaaacactttgtactactaatcaattttttttgttcttcctacttctcctttatgatttcttcgattgttattcttttatgttgaagcgttaaaccgaaacacataccttggcagtttagtgacgaattttagcaccaagaaaatcgacacagagatcgggtagagatcacaaatggaaatcaaccaccgttcaagtgtcaatggtcacaaagttatacattatgtcttctcttcaatcattcttttatagacaaaggaaaagaaaccataaagaaaaacatgattttggtgtctattgagaaataacttcctcaaaactaaaccagtttggtatcctgccaaatcataagcgcaaaccaaccataaaccaacataatgtacatattaagtttgctcagagtacagggtttcttgatgagatacacttgtcaaaccaccgtatacaccatctggcaagagaggatcacataaggtgtcataatgaagctccgaaatctgcaggcattctaacataatggatcgacaagcaaatgcgaaacaagatcaccaccattgaaagacaaaagggtgggcgatatgaagctagctttcaaagctgactccaaagtcagatttaattctctaagttttcattataatctctgctcttgatttatttttctatagaacacacgatgtactagttgtaaaaacgttattttttttttttgaatctaatttagtattacttattaaaaaaaaaaaaaagattcacaccggttcatctatatgatgaattgtaatggacttgtattttttccaagcacttcactctatttcgtggaatcaaaacttttgcaacaacggcttatgctagtctcacatgatgcgttttacacactctagatagattgacctcgcattagatcggaattctagtgatgccctctactaacatataattgatatcaatcaccatccataatcttatttggttttagatctcttgcaacactagctctttcttcctatcacaataggcttttcatttgggcatttgcaacttttttttatatttttcatgattatgaaaaccttaatagagtagaaaaggtggtaaatagatatttatgcgtgtggattcaaattgcgtattgcattaacgatatcgacaattttattggttaaaccggcgggagtacacttttatttatagtctatttttacgccacgtcatctctaccttgaaaaattgaaattcatcatttttcttcctccttaagattttttttttttcttttctaattaacgacaacacgacgaagatgaatccttctcacggtggcgacgacaagcaacgaccggcgatgtatccccaagttgatcaatccattcctgataatccttttgcttctacaaatccttacgtcgcttcttcaccttatctatatccttctctatcctctcataatctcggacctaatctcttcccagaccacggagatgcatccaacgaccaatcaccatctgctcctcctcaggcgacggaggaggttctcatccgtgttcccggcgctattctcaaccttatcgacaaatcctacagcgttgaactcgcgtgcggtgatttcaccatcgttcgaattatccaggggcaaaacattgtagcggttctagccaatgttggaaatgagattcaatggccgttgacgaagaacgaggttgcagctaaggttgatggatctcactatttcttttcgattcatccgccaaaggagaaaggtcaaggatctgggtctgattcagatgatgaacaagggcaaaagagtaaatcgaaatcggatgatgagattcttaattacggattgaccattgcttcgaaagggcaagagaatgtattacttgtgcttgatcaggttttacgagactacagttgtttcacagagcagagaatgtctgaaaaagccaaggagactggagaagaggtgctgggaaattcagtggtggcggacacttcgccggaggagcttaagggtgagagaaaggatgttgtggaaggtcaatgtgcggcgtattggacaacacttgcaccgaatgtcgaggattatactcacagtactgctaaaatgatagcttccgggtcaggtaagctgatcagagggatactgtggtgtggggatgtaactgtggagagactcaagaagggaaacgaggttatgaagaataggcttagtcgtgctgagaaggagaaagatgttagccctgagacactgaggagaatcaagaggtatggttatacttaggaattttgcatctttgaccttgaaaataactgcttaggaatctagtagggattctcttatctggttccttgtttcatgatcattagagaactgagtagtaagggatgattattgtttgcagaagaccaattctatgagcagtgatgaaatttcttgtttaaaaatgtttgaacattgtgcattctcatggtagtatatcttgaatgaaatcaatttttatgcctttgcttatctccctcatgtggtttctatctaaagggttaagagagtgacacaaatgacagagaaagttgccactggtgttctttctggtgttgtcaaagtctcgggattcatcactggttcaatggcaaactcaaaagctggaaagaagctttttggtctcttgcctggagagattgttctcgcatccctcgatggatttagtaagtagattacttgtttttggtttctcatatttcctatcccatgcttggagggtcataaaagcttcttgattcacgagttgccttgctttctttcatctcacttgaatacatgttttgacatgaccagcattacaattattgtttatccgactttccctctgatggccattcccataatttttccaatttttcgaatatgacatttagcagaagttccttgatatagtgtattagtgcttggatctgcttcttgcattgaacaagttagtctggtggactttggagcattattctttttgtgggtttttaatttcaaagttaccaaatgttttgtaatcgctggcttcccttatataccgaacccttttttgtttaaggcacatgggattagtacccttcttttcatgtttacttcttgttgcaggcaagatctgtgatgctgttgaagttgctgggaaaaacgtaatgtcgacttcatcaactgtcacaacagaattagtcaatcacaggtattgattagcaaaggcatatataaacaatcacatatctccgcatgagtgatcttcagcaagagtgatcaaagtttccttagatcttaaagaaacctcatggattctgtttcgaaattacaggtacggcacaaaagcagcagaggctactaacgaagggctagacgcagcgggacatgcatttggaacggcatgggttgctttcaagattcgaaaggcatttaaccccaaaaatgtcataaagccttcatcattggccaagtctgtttcggaactaaaggctaagaaaggctccaagtaaacactaaacagccttcaactgttctgtgttcatctaaacttgcatttagtttttcattttggaaaagtatatgaagattgattgatgtaactctatatttagttttctgtgtatattgtgattctatgtaaactatataaacagtttcttccaatcttctcccatttatgggtttgatttgtaacttcttaatgcatcgagaagcagtattagtactctttatctttcttttgtactgctatttcttaccgctaactctcatctctggtgacttatcctgccttcgtttaccttttttagtgtttgcttagaaacactaattgcacctatgttatgtattctaccagattaatttgacaaaaaacaatgttaggagttttaatgttttgaagaagtgggccagatgtttggagttttaggccaatgtagctcatcttgggcccagtacagaaataaatccagtgatgattctttctgattggctggaaggtgtgtgtacgtgaacctgtccgcaggtgattaaaacagagctgggcttttggcttgtcgcctaagtcgggaatcgtttactgtgaaataaaaacgagagagagtttttgaagaagaagaaagaacactcacaagatccagaaaaaggtaaaagatggcgagatacgatcgagcaatcactgtattctcccccgatggtcacctcttccaagtagagtatgccctagaagccgtccgaaagggtaacgccgccgtcggagtccgcggcacagatactgtcgtcctcgccgtcgaaaagaaatccacccctaagctccaggattccaggtattgctccgatctctaccgatacaagatgcttaaaccggatttagtccatttacttttgtttctgcactttgattttggttttaagcttcacctggatagctcgcttgatttactcaattgctacttgtatgatcactgtttcaatccttctgaactaaatcctgatgttgggattttgtatcacttcgtaattgcgaatctagtattgttagatcgtagaatctgagctgaaccctagtttaagtctttttctctacgagtgtacaattacagttcctgtatctcagacgtgtttttttgtataagaacacgtttttggttatactctgcaaattgatcattcactgcgtaaaaatataattttggtgttgaacttgctgaaatctaagcaatatcgtcttcgtatctgttggctgagctcttgctccaatagatctgagtttttttacctattgttatccgtatataggatctggttggtgttccttcccaatcatatgagttttgataatttttttgcttctcagatcagcaaggaagatagtgagccttgataatcacattgcattggcctgtgctggactgaaagcagatgctcgtgtcttgataaacaaggcgaggatagagtgtcaaagccacaggcttacgttggaggacccagttactgttgagtacattactcggtacatagcagggcttcaacagaagtatactcaaagtggtggtgtgaggccttttggtctttccactcttattgttgggtttgatccctacactcgtatacccgcgctttatcagaccgatccatctggtacattctctgcttggaaagctaatgcaactgggagaaactctaactcaattagggagtttctggagaaaaactacaaagaaagcgctggccaagaaactgttaagcttgctatccgtgctctgcttgaggttagtttgctctatcatgttctataactaaaccttgtagttttcttttgagctattgtcggggtgccctgttagtgaatgttctataactaaacctagtagttttagttgacaatgagatctgacctattaattattttgctgcgtgacccggtgattttgtgagcaacatgccaaactttgaacctcattatgattcttcattatttataggtgtggctttaggttaaaagtgaatgttagagaatgttaaagtttttgaaaatgtagaagaccttactaattgagttggattataatgttagatgagcttacttagcaaacgcacaagtagtggtggaacttgtaaagaagctgaaaaggatttgcattttgcaggttgttgagagtgggggaaagaacattgaggttgctgtaatgacacgagaggaaggtgttctgaagcaactagaagaagaagaaattgatatcattgtggctgagatcgaagcagagaaggctgcagctgaagcagccaagaaaggccctgcgaaggaaacatgaaccagatcttaaagtagcggtctcagattatgagttgtaatgctggttcaaagtcagggatattcaagggttgaatagaaaatctagaccgcatgaaatggtttgttggattactagcctatttgacactgttgctttaaatcttaaatgacattttagcggagtttcgatacttgtcagttggaactatggcatgttcagtattctagatgactttgcatttgcgctcaagagttgtagattttgattttggaaacgttgtttcttactaaacatgtctctcttcttattatctccattgtgtaacttaccgtttttaccatctttgtacctccattaacttgttcaccaacgaataacatgaagagaacaacattacaaagtggaactgacataaactatgatcaccaaagtccataagactgccagcaaccctgaagatagttagttgtagtttgctgaaccacaatggttttgaatcaaacgaaattccattaccagacaacaagatgctagccctttcttctctttagctttgtgtgtcaccattgagacgattacctcaaatgacgtaaaggtatccccaataaggcaataacgtaaaggtaacgttaatgatgttaaaaatcttgaaaaacaaaaaagacgccgttgccggggatcgaacccgggtcacccgcgtgacaggcgggaatacttaccactatactacaacgacctcgttgttaggatatcaaataacatggtattaatacaatagtatacaaagatttttctaaaagagagttgaatcttgtgtctaaaggattttcgagttcacaaaaagaatttcctcgctctaccgccgccgtctctcttctctcaggtaagctacttcagtttctctgataaacctattttgctctgttcttgtccgaaactttaccgtatctagtcgatatctagtttaggtgagttatctgttaaaagtttttacctttgagtggtattgtcggtttgtcgtctagggttgcattcaatatcacagcaatttgagaaattgatattttattcagcaaggttgaatcatcagagaagaaagggttttacactgcggcgtaaaggatgaagcttgacgtgaatgtgttgagatatttatccaaagatgattttcgagttctcactgctgtcgagatgggaatgcgaaacgtcagtgctcctctctaatcgcttttttttttttaaattctggaattgacatttagggttttaaccttttgttttactttttttttctgaaaatcctctgattttttggtttttgcagcatgagattgttccttctgagcttgtggagcgcattgcttgtctaaagtatgccccggtctttgatgctttggatgttttccttctttattaagcttatttcttcattttgtataatctacatacctcttatattcacagacatggaggcacctacaaggtcctgaagaacttgctcaagtataagcttttgcaccacgattcctctaaatgtgaggaattatctctataggcattagtaacttttcttgatatgtcttttgaggattggaagtcttgttaagttgcagaatcttatcgctattgcgttctttgtttatatctgtctagatgatggattccgactcacctatctgggttatgactttcttgccattaaaacattggtcaaccggggtatatttaccggtgtcggtcgtcagattggtgttggtaaagagtcaggtatgttgttttcctatttatttttattttatcggtgtcgaagagatgcgtgttggtggctgatgtatcttatttatttgttctttgcatataatagacatatttgaggtcgctcaggaagatggaactattctagcaatgaagttacatagactagggagaacctcctttagggctgtcaaatctaagcgtgactacttgaggcatcgcagtagtttcagctggttgtatctctcccgacttgcagctctcaaggagtttgcttttatgaaggttattgccttcttccactaatgtaacactattcttgtgggtgtatcatctttttattttatttttggcctaatgtttgtttggcttctgggtgagcaggctttggaagaacatgactttccggttccaaaagctattgactgcaatagacattgtgttatcatgtcccttgtgcaaggttaccccatgtaaggacctaactacatatttacacaaagaaaagtggttatgatttatgatgtttgtcatcatctactgatatgttgtggtcggatattgattttaagctaagataatcattggatttttgagtttctaagaaagctaaaccatttgcttcactcactcactaagaaacagttacaccctttctgctgtgaatcacatcttttcacatttttcatttatgcagggttcaggtgaagcaattacagaaccctgagacaattttcgagaagatcattggtattgttgttcgtttggctgagcatggtctaattcattgtgacttcaatgaattcaacatcatggtgagatacttagatctatctagttgaattataccttctatttgtaagttactttgctgaaaatatcatgcatttatttgaagctgccttctcatataagttaattaatacttctgtaagcatgctagttttgtcctctgcctacttacaattttcattgacacatcctgtttatgtatgcatgtatgttatagattgatgatgaagagaaaataacgatgattgattttccacaaatggtatctgtttcacaccgaaatgcacaaatgtatgtgacctctcatctctgcaccatgcctcagtactttcttccaaatttctataaaatattcttggtttgttaatgaattttgtctctcaggtactttgaccgtgatatcgaatgcatcttcaagtttttcagaaaaaggtgatttaccaatttgattttctttttaatatatacatcatttgttcacaatacctagtagaaaataatctctcagtcgctgaatccatgtcatgaatgaccctgaaattctcatttttctttgaactctggtcctttcttacaggtttaatatgtctttccatgaagataaaggtgaatcagaggagacggaggtggatgagaacagcagaccatcttttttcgatattactaaagatgctaatgctctggataaagatctagaagctagtgggttcacaagaaaggagcagactgacctcgataaagtatgtgagcctatgaccttagttataacactgcttatcaatcttcaatcaaccgtttcttggtattgcgtatatattttgaatcttaggcagactaatttgcagcactggtctctgtgtggttttgtttcctcattctctctggtatatagaatgaacatatggtttctgtcttttatagtttattgaaggtggggtggagaagagtgaagattctgatgaggatgaggaatctgatgatgaagagcagacttgtgaatcaaacgaagaaggaaacctaaatgaaataaaatcattacagttgcaagacaaggtataaaactttccaattcatcatacaactgaaacatgtaccaagtaaagatgtcctctacttacagtatatgcttttggcatgatgtaggagcaaaaaagttcagatggtgttgaggcagaagttgagttggataataccgagaacggtgaaagcaatggagatgaagatgaagtcggaagtaatgaggttagtatcttgtgtgtgagtaactcggagagtgaagtaatgaaatcacttacaaaaatgagttttgctacttcctttgtacaggaggaggaagagaaagaggcagagctggagaaaaatttgggcaaggtaagacgcagagccatggcagcagccaggggacgtagaaagtcacagtcttcaagaaacacatacaaggacaaaggacgcggatcccaaaactccaagatccacagcaacatgagcggcttttgatactccaactgtgggcttgaatgggccgtataatgatgtaaacgggcccataatctttttctagtgactttttctcgaatcgttgagttttccaaattgaacaccaaccaatgtactgagacagagaaattaaattataacggatatgtttcttaataaatcaaatctcaaatgttattttgtccaaattttgtttgatgtagttttagcggggctaaactgaaaacacatgaaagtcaaaggagtagatgcgaaacgctcccccagtaattagcggaaatagaaaataatggaacgcaacggctagtgatctcaacggtcgaaaatttaaacttttttataataattgacagacctctctcttttgttaaaatcctaaccttgttctcacattaatcctccgccgagattccttttgtcttcttcttcttcatcttctccatttcaattacaaagatgatgagagatgttttcaggccgactaaatcagccccttgttctcctgcaaagccacttggtatctctcgcactcaatctgaatcatttcatgctattcacaaagttcctgtcggagacagtccttatgtcagagcaaagaatgttcaggtgatttgattatatcccttctatagatctgaatttgtgtttgatttgatttttgttctgtctctgattgttgttttatggatcagttagtggagaaggatccagagagagcaattcctctgttttggaaggctattaatgctggagatagagtggacagtgctttgaaagacatggctattgtgatgaagcaacaaaaccgcgctgaagaagccattgaagctattaaatcactcagagttagatgttcagatcaagctcaggaatctctcgacaatatcctcttagatctctacaaggtccgtcctttatacataaccctgtttcctctgtttcgtttttgcatttggtttgattctgtattgaaatggatttgttactgcagagatgtgggagattagatgaccagattggacttttgaaacataagctcttcttgatacagaaaggactcgctttcaatggtaaacgaaccaaaacagctagatctcaaggcaagaagtttcaagtctctgtggagcaagaagctactcggttactggtaagcagcaatttcaaaatgtgcattatgtttagcaattaccaagtttgtgttaattcttaattggatgatgattggtttgaaacagggaaacttgggatgggctctgatgcaacgagacaactttgtggaagctgaagatgcatacagaagagctttatcaatagcaccagacaacaacaaaatgtgtaaccttggtatctgccttatgaagcaaggaaggatcgatgaggccaaagagactttacgacgtgtgaaacccgcggttgttgatggccctagaggcgtggattcacatctaaaagcttacgagagagcgcaacagatgctgaatgatcttggatctgagatgatgagaagaggaggagatgataaggttgaacaaagaaggctctttgatgcaatctttggatcttcctctatatggcaacctcagccttgtagtgagcagactgtgaaggctaaaccaaagcctggtttaagcaatggtgatggatacggtgatgagaacgtgaagatgagtgtgaatccagtagtagtaaacccattaagggttgatgcaaaaccgttcttctcttcgaagttggtcatcagtaacaacgagaagctgaagagaacgagatcgtcgagccaagggatggggatgttgagtggtattggtggtgatcatgagggagagacaaacacaagcacgagaaggagattgtcaatggagaagaaagcaacggagtgtggattaccagacaataaagactttgaagatgcgatcatggctgctgttttaggaacagaaaccaaagtggacaagaagaggctcaaggtgttccaggatatcactttgtgtctcaatcagagtctctaaccactcttatcattttatcattctaatttataatttagtcaaggaatcaaaaaaggagatgagcttaattcttcttggtaattttattaatgtttttgtcagctttaagttgctgccatttttttcacaattattgtcttcattgaccagtaataaaagctgaagttattattttccttgccattctacaaatatagttattgatcaagaatagtgttgtaaaatgttactaaaatctaatgagatagagagaaacaaagaagatgaagatgacatgagtggttaccatgaatatcccattaattaatccatcagaatcttatttactgcgttaccattaatcagatggttgctcttactctttttattcaccactcactcaacttttgtggtcaagtttgtagcaaattaggggtaattagtatccattaaaccaatcatttgtatctatcaatttggactcttctgcttccaatttgtagtaacgcttacccacacttttaattcggccaaaatacatccgttgaaattgtataaagttccggaagtgcccctcttattttattaaccatggcaaatgaaacggtgtaaaaacttgtttttttcccacttaatctctctctatttgaaagttatgcatttttggtatccgcattaactcgagtcttttaaactttgactgtcagaaaaaggcaaaaaaggtaaatttgttttgataattccatggtacattttgtaatagaattgagaaataaaggatattttagtcaaatggactgttttggtttttggaagaaaagaaaaaagaagagatttaattggaggaaagggctctctgaccaaagcttaaggagagtgtgaggttaaactgaaaaaagaagaatcccaaattccaactacattcctcagggaagccaaagtggccttcacaatcctaaagttaaaactcttgagtgttttttttcagatcaagacaaagtttagatcttttctttttggtttaattgttttgacacaaacgaggtaagcacaagcagaagaagaagaagatagagtttgagttcaaattagatttgttgagaagaaaaagagtgatttttgttttctgatgcatggtgaagaagaagaagaagaatagtgagtgagagaaaaagagtgattttttcatttttcagacagagagtgagtacttgaagaaatgggttgttgtcagtcaagaatagatagcaaagagatagtgtctcgttgtaaagcaaggaagagatacttgaaacatcttgttaaagctagacaaactctctctgtttctcacgcgctttatctccgttctctacgcgccgttggctcttcccttgttcacttctcttccaaagagactcctcttcacctccaccacaaccctccgtctccttctcctcctcctccaccgccgccgcgccctcctcctcctcctctaagccctggctctgaaaccaccacatggaccaccaccactacttcctctgttcttcctcctcctccgccgccaccacctcctcctcctccgccttcttctacatgggacttctgggatccgtttataccgccgcctccttcttcctctgaggaagaatgggaggaagagacaaccaccgcgacaagaaccgcaacaggaactggctctgatgctgctgtgacgacggctccgacgacagctactcctcaagcttcgtctgttgtgagtggattctctaaagatacaatgacgacgacgacgactggaagtgagctagcagttgtggtgtcgaggaatggtaaagatctaatggagattattaaagaagtcgatgaatatttccttaaagctgcagattctggtgcacctctctcttctctccttgaaatctcaacctctatcactgacttttctggtcattccaaatcaggtaacaacaatcaagctcttgtcttctcttctttgattgattttgattagtgttttgtgtttgtttcttcagggaaaatgtacagtagtagtaactacgaatgtaatctgaatccgacgtcgttttggacaaggggatttgctccttctaagttgagtgaatacagaaacgcaggaggagtaattggaggaaattgcattgttggtagccattcatctacagtggacagactctatgcttgggagaagaaactttatcaagaggtcaaggtattcactttttgacttcatttcattcataaagttgcaatctttgaacaaaacaattaatctttgatgtatcttcatatgttaagttttgtggaaagagtttgaaaatgttgtttatattcagtttgaagtttgaatattgaaattgcttgcttagatttcatccaaatatggataaatgttttgtttttgggaatttggttgattcatgtgggcattaaaggcttgtggtgggtccaagcgtgagcagatagtgtaagagacccacgtgtgtacttaattctgatgaataatgtgttatgtacactggcacaaatatcttgccaagtagtgagtgagtgtttgttgttttttgaatgtgggttttgttgcagtatgcagagagcataaagatggatcatgagaagaaagtggagcaagtgaggaggcttgagatgaagagagctgagtatgtcaagactgagaaggctaagaaagacgtcgagaagttagaatctcagctctcagtatcttcacaagccatccaaagcgcctctaacgagatcatcaagctcagagagaccgagctttaccctcagcttgtcgagcttgttaaagggtttgttttgtgcattcccattgcttcattaacctaaagtatcttatgttggtcaatgtgaacaaggttcttgtatgaatgtaatgtaggctaatgtgtatgtggaggagtatgtacgagagccaccaggttcaaacccatattgtgcagcagcttaagtaccttaacaccatcccctccactgaaccaacatctgagcttcaccgacaatcaactcttcagcttgagctcgaggtccaacaatggcatcactctttctgcaacttggtcaaggcccaacgtgactacatacaatctctcacgggctggctcaggttaagtctgttccagttcagcaagaatccacttgttaggagtagctacgagtcaaagatctacagcttctgcgaggaatggcatttagctattgacaggatccctgataaagtagcatctgaagggatcaaaagctttctgacagcagtccatggaattgtggctcaacaagccgacgagcataagcaaaagaagagaacagaatccatgttaaaagatttcgagaagaaatcggcttcgctgagagcgcttgagagcaagtatagtccatactcggtacctgagagtaggaaaaagaacccggtgatagagaagagagtaaaggttgagatgctaaaaggaaaagcagaagaagagaaaagtaagcatgagaagtcagtgagtgtgactagagccatgactctaaataacttgcagatgggtttccctcatgtctttcaggcaatggttgggttttcaagtgtgtgtatgcaagcctttgagtctgtgtacaaccaagctaagagcatcggtgaggatcaagaggaggttaagaggttgcttccttaaagagagaaagacaaattgttttaccatttgctctctgtttttgcttgatccaagctaatcttttggttgaatgttaggttgagtttatgctgttttcgaaatgaaattggttaaatgacttttcattgaatcactgcttgaaacttcatcaattcaactacttcttagccaagtcaaatcattggaaggtgacctaccaaggtattattaacattggagaagtgttagttagttagttagtgaggtagttaaggggattgcttaaagaagtaagcaagtttaatgataatcaaacactcgtgatgtgtacgtaacagaagaaaagagagatgattcgtttgagcggcagaaaaagacaagtgcctaatttgatttcccataaataaacacacaatcgattggtaattttgattagttgggagctattaaaagaggaaatccacaataatcggaaatagaaagacaagtttggttagcggaacgtttcaacgccatttttcccggccaaagctaactctaactaactctttgttttttttcggtttttgtgccatcttccagttttcattttttttgtttcccctctatctttttgggtaatagggtttctaatctctgggacaaactccaatcgtttcgaatccgcaatgcccagatggtcgatcaatagaaatatcaagagtctccaattccaaaggctaaatctttgagatctttttttttataaatttccctgaaattaataaactttgaggggaaatgagcgcttcgaggttcgtaaagtgcgtgacggttggtgatggagctgtcggaaaaacttgtttgttgatttcttacacaagcaacactttccctacggttatgtcccaattattctttcatgtttcttgtttcattaccacaacaacaacatatctcatgtttcttgtttcttttgtggatatacaggattatgtgcctaccgttttcgataatttcagtgccaatgttgtggttaatggaagcactgtgaatcttggattgtgggacactgcaggtttttcattttcctatatatcttggtgtttgaaatttggaatatggtttttggatctgaagattttgaaaatttgggtatgaataaacagggcaagaggattacaatagattaagaccactgagttaccgtggagcagatgttttcattttggccttctctcttatcagtaaagccagttatgaaaacgtctccaaaaaggttttaaaaatccatcaatcttgtttcatattattgagttttcgtcacattttttgaactcttgtcacaaattgtgtttgcagtggatcccggagttgaaacattacgcgcctggtgtccccatcgtccttgttggaacaaagcttggtgagttttccattgttttttcctgatctcgctccttttactttattagttgtgactgagtttgtgtttttgctctccagatcttcgagatgataaacagttctttatcgaccatcctggtgctgttccgattactactgctcagggagaggagctgaggaagcaaataggagcacctacttacatcgaatgcagttccaaaactcaagaggtacgtagattagtatatatacccttgttgcagatttctaatgttaatgttaatgctaatgttgatgatgtgagagtgcagaatgtgaaggcggtgtttgacgcagccatccgagtggtgttgcaaccgccaaagcagaagaagaagaagagcaaagcgcagaaggcatgctccattctatgatgattggaaatctctgtttttatgtatttggttttggtatattaatcttctaacaatgaatgaatcaatgtgttaatggacagacacccaagtttgactggtcctttttgttcttaatattaatggagtttgtcggaatcaacgtttcttttgcttctacgattcagtcctatgcataattccacacaaacaccacatgttttgaatcagttttcattcccaccatttcttcagctgaccatattttgtatgttactgttttaaactttgcaaacatgtttattggtagagagtgtaactaggaaatgaaaagtaatgatacaagttttatttctcaagattactcttcatgcttctgcaacaagacgagaagccattgattattgatgatttgcctaacagaatgcaagaaataaattcattcaaaccattccattttgattttctcgtatttctcattcatgccaccatcttcttgctgtctctgaaactcgatgtaacgtagagtactatttatgaatggctctgcgcctgactcaaccttctttgtctcgcttttgattaattcagctaagctcttgattgtatcgcctgttacttgttggtttcctttctccaggaagtagagatacctgcatttgactcgtaaaaccattaagagaaagcagtgacaactgggaaagtactcgattgcaagcattttgcagcgtaggtagtaggtactaaatagatgcaacttaaagagaaacttacttgttcagcagttcgacatatagagacaccgacccagtgctactggtaccacgggatgcgttggccatttgttgaacagcatctgcaatcctttgtgccctcttcaggcaaagcacaaccctggtatcccaaaaacccccaacaaactctcaatatgcctcaatttttctccccttattagttgcgtacagctaccaatcttaactttgagatttagtatgttaagagtatacattcatatgtgtacatacctctctccatctttcaggttctcgcattcgtcagcccagaagagatgcgcacattcataaacagctctacactgatctggcttccttaggagtcttgcagaatactacaacaacataatttagccttgttagtattcagtgtagcacacacttactcaactggtttgtcaggaaagatacccctgtcgccttgtgagtcagagtatctctgttctcaacattaaatacacgcatcctctggagtgtccctattattaaacgtagtgctgttacttgtgcctttgaatcctaaaacacccaaaatttatagccacgtcaaggtctttcttgcagaaagttgcatgtagcctcctaagaaattcacttactgaaatttcttcttcatacagaagatatgcctttgtgaagaactcataagcaactgtttctaactcacagttatttgctgcctaaagattcaataaaagaaaatttcagctcatgcactatatcttttgttggttttgatagtggatacaccaaagtccaaatgatcatatacctgagcacactgcaagtagaggcgcaatgccaaatcaggtgcggaaacatcagatagaacttccaccgtctgtaaaaattgagattcaaaatcgactggcatcatagaaattctggcaaaacgaaatacaatgtttcactgggacaaagccaatgatgtttgcaaggcaactaaactgtcctcactattttctaacaacaagatgtatgtacacttgcctcgcttaacagctgtagaattctcttcggtgttgctgatgcatcatctccaaatgggttttcatctccacctcgcagtcgccgaattaactgcacaagcatatcaatacaatgtgcggagttccaaattcaaacacaatgtctaccaaatccataacaaaactggaaacgacacaacagtcccaaattttaaattgaaaaacttttccaagttggatatggggtgaaaaagtgatcagtaaaaaatacaaaccttgagcgcggaaaagacaaggggtggtatagttaaaggcaaacgcttaggtcctccagccacgatgtgcttccttacagtgaaaataatctgtagttgggtaaacgaattaagaatcgtacacaggccacattgatagtaacgcctctaattataatacacaccttagacatttcttctggatcatcaatgtagagcttgttaacaagccgtgcaacaaggttctgctcttcctggaaatcttcttcatcaatctagaacccaacatagtttcccgtttgaaagcgtaagttatctaaagaaaaacaactctttcgagtgacaagaatactttgaacacaaatgcaataagaattgacgaacaagggtagggttctagaacctcatcatcaattgttccgtcaaaatccttcatgagaccctttgccagttcaaacaatgcatcgacctgtaacaaacaataaaaggaaactccacatcaatagagaatgctaaaagaagaaactaaatcgaggaaggaaacggacacctcatcagcagtagcaatgtgagtattatttttaaaaacgctctgaactagaatgattgccattgctttgtttgtctcacggtcaaggtattccattactagaggatagttggtaagcttcaagatagttactacattattatacttttccaatggagcgctaagaaatgcgacgatctgttttgctgccttgtcatcacaaagctttcctgtggcagatagttgagtaacacatgatccctaaaggaaaaaagagagacaacaatgtctattagcaacaaccagaactacttaaagcattaaaaaaaagtactacagatgaataaacttaacacgcttatacatcctcagaaagcgttataccaaaacttggtccacatagtccagacgatcggaatagacatggagagtgaattttagaagaaacaaatacaatgttacagatgctgcggccggcaagtccgcctgtgcttctacaacctgaatcataatagatgtggactcgatcagctgtttataaatacaatagattatcaatgtgatacaatcagaggaaagtagggcaacaaaaattacacaaaaatatcacaacacaatggggattaagctagatttttcagctgtttctaatactagcacccctaataaataaacttacattcaagtgtcaatttaagttatcacttttgacttcatgtgtagatgcaagatttaccttcccaatggcataatttaactttgaaaaggcttctacttgcaggaaattaggcaatgcttccacactggatgcagcatagttcgaaagcctttccattagacccgaaagaaccgtcttgatatcaacagacggctggaacaaaaaatgacaaaaagaaaaataggagaaacatgttctgatgggatgaggtttataagcagtctaattttttaaaaagaaaaatgcatataaaaaagaagtggtcggttacataaaaaagtacctgaagttgtggacaagctcccaataatacatcgagagtttgaaggtgaaaatcatcaggaaagacttgaataatgcaatccataaggtagcactgtgcaagttcatccttacagttgacaaccttttaagacatagtgagacaatagttgacaacatgtagacggaaggttggatgctgaaactatctaaacggagagaaaaaccagacctgctccagtattctaggaagaacagtatctctgtagattccaaggtcaacaccttctaactgactcagtacatgaaggttcttaccaacctaatcaagcagtaaagagaagaaaaaagtgtctttcagaaaataataagaaccatagctcgcaaatttctagatgagaagaatcaggtacaagttaatgctattacaagatcacgtagttcattcctttctttctcacgtttttctttctcccgactaggtccctggatacaagaaagtctcaactcaggttcagctcagtaggaaaaaatcacaaagagtaaaatagcagcatgaccagacattggactctcacagtacgcaaacatattcaatacatacatgctggatatgagagcagtatatcattagcatttccaaccaacctgatgttgcattcgaacccataatttgttcatctcggtaaaattttgaagcacgaactctaaagcattcatgtgtgcatcaccatctctggagagaaaagcaaaacacttgcctcttaacatgtgtttcatagcttaaacaaaatcatctaacagcaggtcgtgtggccttacccttccaagtcagaaccaatgctgggtaacttatccctagtaacttgagcaagataacttctcaagaaaagaccacgcaagggatgttgaacagctcgacacatttcaacaagatccttaagtatatccgtagcagtaacatccttggatttgatatatacagatcctatggtacataaaagatacctgaaactcaattgatgagtatctacaaagttaaaatcagagtgtgcaaatgacaacgtattctgaacaacaagaacaaaagaaacttacaatcttggcaaaatgttaccggcatgctgaactaactcgtagagctctgcgatggagcaaccacgtcccgtctcttccttgaagaatatctccaaagtccccaattcattaaaaactcgcatatctgaacaaatcagatcgcagtaaggaaatgaaaatcacacacaagagctacgaatagaggaagagcgggtaacgaacgagtcgactcacagagttcatagtatttatgaggagaaagcttggaagtacgaagctcgctgagcatttgagcagaaaactttagagcgtctttgagattgttggagtcctgcgaggataaattggagattcgttagaaaacaatgcaggatttagggttctaagatcccgaatggaaaattgattgatgaagaagagaggagaggggaaggagtggtacgatagcgcgctgcatatagaaagcattttgcttaacggcggcgattgcggcggcaagccacttctcatcgtcgtcggcgatcattctatgttcctcactactttactctacagagagaagtctcaattttgaccgaattttctgagatcttcgcgaattgaaactctcctcatttaaatttgttctttcttcattatcagctttaactttaaattagatggtgacataactcatttcatagtcattaggctacattagtcttatctctcacaacttcaattttgacttttgagtaagctggtaatttaaattacgtaaatagatcacatgatttagaatttgatttaccctttttcctcacattgattgtgtaaaagcctttctcaaattaaagaattgacaaatctgaccccaaaaagaacaaaaatgaaacaggatcaagtacattttgagagactattaacttctcttctttccattctaaacaaggattttactactctttgtctgcaaaaacagaccaaactcatggacacagcttccatttatgacttttcataccctggatctggtaaaagagcaaccgtatgcttttaacttggggatttaactttattatgacggtgaatcactgtagcatttttctaaactagtctcagtgaacaccttttctgcttctttgcatcctagtctaaggccatggactatctccttcaagtccacaaggccacacccgggtattcgtcctattttcctctccttcaccatctctctcactctattaacatcctcccaccgtcccgtaacactgtaaatattcatcagcaaatggtaatacttgtagttcaaaggatctgtctctatcagggacttggcaatgctctcccctagagtcgggtttcctgtaaaacgcgacgagctgagcaagtttgcccactttgtagattctggtgtcacatcttcatctggcagattcttcagagcttcctctgcttcttcagggaacccggcgctggagtaaagattagccatgcaccattggtgtccaaagttgggtttgatctggaactcatcaaccatcagagaatagtaactttgtccttgagaaacaagcccagctctagcacaaccgcagagaacaccaacaaatgtcacttcatcgggtctaagcataccattgatcatggcttcaaataactcgagcccaccttcaggacgcccgtgaagacaatgtgccaatatcatcacattccaagtaactttgtttctaatagatagactatcgaatatcctacgtgctaaacctacttccttgcactttccatacatgtcaataagagctgtatcaataactacactcgaattcagaaaggttcttatcaaagaagcatgaaccgacctaccttccttcaatctagctgatctaccacaagcattcaacaacaaaaccaacgtactctcatttccttggaaccctgctctgaccatctcacggaacaaactaatggaaactccaggattattcgcacccaaataagcactaatcatgatattccaagaaataatgtttttgtcaggcatttcatcgaacaacttgtgtgcagccaaaacatcaccattcctcaccatcccagctattatagagttccaggacacaatatctctcttaggaatttcaacaaacagcttctttgcaagatccaaagcaccacaacaagtatacatatgcattaacgaattttgaacaggcaaaacttgatcgcatccatgcttaatggcttgcccatgacacattttaccagaatcaacgcaacaagtcttctcaatacaactaatcaacgaaacgaaggtgtatgaatcaggaacaaaaccaaatcttagtatatcgaagtaaaaccccaacgcttgtttcggagaagacgagaccaaataagccttaaagacgggatttgcgcagtaaagcttgccaatgctgcggtatatcgaaacggtgtagctagaatcaccaaaacgcgaagaagacttcaacaatctgatagcccaagatgaatcccagaagttaccggaggtgattagcctcgcgtggacttggaagaggtgtgtaatagagttggaatcttcgacaagtttgaaacccttaagcagacccgttccggggacgatgaatctggatgtgacgaattggcgaatagaggaagcttttgccattcatctccagcttgaatgctaagatttgagtcagggttggattcagaaatcgccattaaccaacgatcatagctatgtcaaggtctcaaggaatgattacagctcaggagaaggtgttgcggcgaaggagaagaatcgctcagtgtaaaaaccttaagagaaaccttctctgagagaaggagacttccagttttgttggatcaagtcaaaacataattaaatagaggtttccataataacaacaaatttcaggaccattttgcaattttaggaaaaaaagaagataaaaacactttttaaaagtggtgtgaatgggataaggcacctcacgagtacctaattttagtttagatggcgtttcaaatgaaaatttataagagacagacatttaccaattcattacaagcaaaaactatctttaaaagcagaatttaagataagctgaattatctagagagtctttcttatcttgatatttcttctgttggaatcatctatatatccgaatcagatcgagtctttaattgattttagattgttatctgcttgaattaagggaaaaaaagaaaaagaaagaggagaagaagagaaggtgagaagtaaggatctggtgttggtgtgtgaacataaagaaagagagagaggtgtgtttaacgtacattgtaatccataaaagagaaaagccttgcaaatcacgcaacagtgaccaaccccctttttttgtttgtctatccaacacacacgcctcttattacactctgttaaattgataaacacaataccaagtgcaagagaatccaaaagaagaggaagatgaaggttctggagaagtggttggccttgctgtacccgagagtgcagggaggagaaggaagagaggaagagtgttgtagtgtttgtttgatgagaatggaggcaaaagatgtcatcaagtctctaccttgttcccatgagtttcatagtctctgcgtcgatacgtggttcaatgtcagccgtaagatttgctgtcctctttgccgtttttcacccactaccatccttcttaccgatgaacttctcctctggttttcttcttttcatttctgattcccattgtctctgtattcctgcttttctggggatcaaacatctttctccttgtataatactataaaatctcttgtagtactagttttccattcaaggaggaatgtctaaggagtttgattcctctctggaaaaaaaaaagataataagagagaaagactgtaattaagttgttgatgcaccaatggcctcctctcacaacagccaaaaaaaacaaataccttccgagggggacagagaaacaacttgcgtaaagatatgaacgggttttacaaaatggtaaagaaatacttaagctttgagattaagagtttcgagccaattcactaccaaaatgtggagcttgacgaacaagtatgtaggtaaaagattattgatctgcatcctttttgccttttacccacatatttgttcttcaaactccaaaacttgttagtgaattggcgcaaatctttaactcagtgctaaaagatttctaacaatctagtgaaatatatgttcatatagcgactcgtcttgctcactcctttttacgtttatgtaccatctggtcggagcccgctcacgtctccacttcgtcgtcgcttgaagagttcgccgaagttatcttccaacgattggggtagctctttttggagttttcaagaagacagaggatggtgtatggacaatgtaatcaactccaccatttataagtaatcaaatggcaacaaaataattaaggatggtaatttgtgattggcctaaattttctgaggtcagaacacatattctgaggagacgaaacatctttgacaaatatccaaaacattttttataatacaaacacacattatattataagaagataagattgccacctctcataccaatggatatatattgttttgctcagattataatttttatgaacataaaatgggtaaactcaaaccaacacaaaatgaatcagaggaaggccaaaagaggtaggagaagtaggagttgagatgcgagagggactagattggctgcagtgcctgtgccagagtttctggtagagttacgagggtctatttggggaggtgtagctgcagcaggaggaggaagaagactaggtaacggagtggaggcacttggtgaaggagcttcagtctctggtggtggaggagtcgttgattccaagctttcatcttcaaaacctgccataacaaaaaacacttcatcaccaacgctttgttcctaagtatatacagtcacttccgacctggtcacttacaatcagaccgtttccaacccaaaatcatcctctcccggtcgaatacaatgcggtagccagacatgaagttctctgcaaccaaccaaatgaaaatgcattcagcctatgctcttttttttgtctgcgtcaattctatatattgaatatctacagtgtaaatctcagtattgtgatacttacgtccgataatgttaatcttgaaatccacgctcttcagaatacccaagcagtacatggcgctattgtcctgttattcaggttgaaaagaaaatagacaaaaaataaggcaaatgtaattatcaagacgctagttcacgaaactatgtgaaactggaagaaagaaaaacaaaacacccatgtcttgcctcattccacactatgaaaagcggatttctcagaaacatttgggatcctccttcaaaagtcatcgctactctggggaataaaatggttgttttgtttggactgcatgtgaagagaaagaacatcagaattcaaatgtgtatcagagacttctttgaaaatccaacacatctctagttaaatgagaagaagcatatgacaagagcgcacacatgaccttaagtcgtaacagaactcaaatggaagctcaggatcaatcggacgtcgcttgtcagtgacatgatcgtcaaactgcaaaagtataagtttgatggtcatgtgatgtaaaaaaacacaagcttggaggaatgacacaagcttttgatagcacaaagtttcttgaagaatgaaaacttcactcagatatggtattagtacaatgaattctgtcaggcagtattagaatagatgactagtctgatctatggcacttacagctttggtaataagaccatattctggttctagtaaatgtgtaaatgatgttccagtgtcgaagagagctagcagctgaaccccaacagcatctccccctacagatacttcggtcacactcacagcatatgtcggactattttcatttggtataaacaagatcacaggagacagaaacagaatcagtatagataatacatcaaattgaaaacttttattcgctgtcagatcaaattggactttactatgtaccttggttcggtaggaagtagtggcgtctccatctggtctgtgtatcctttgtcaccgaagctgattcttccgacaacgtcaatgatattcccgaaacacattgagaaagagtttgcagtgatttttgcttttgccagtatgctcggaacagagtaatctttcaaacctagcccgagaagaccattaacagccgcactactctggagaaaacctgtctgattcttaccgcaactgcaacgcaaacacatgttagttccaagagaggcaacttttttaacatttttagttttgaaactaagttcaatataatcgttactctgttttgctatgcatttcaacatatagaacacgaaatgaacataattttagaggtttaaatagcggcaacgtgatttttgttaagaaaaacaaagtcattacttacccaagcgtgatattagctttaacaggctctaaaccctcgtcctctgtgaccaaatgcaatacatcctcaaacaatgtcccggtggtaaaggtgtccttagaaaggtactggatctgataagggcaactacttgcaggagaagaacaccggctcgacccaaaacaacggtcatcactgcatctaatgcttgaacttgtagaagatgtgttggggctgtatagattgagtggtcgactctatgtcaaagaagaaaaagagttaaggaataaatagtttgaagaagatatatatctgaatgctttcgacaggagaaaaaggcacctgtgaaagtccaacttctttcaagtcacggatacaagtggaaccgcaattgcaaggcaaccaaaacaaatcgcttccggtgtccagagccaccaggaaccaagtggccggtgttcccacagagacattggcgtagtgcaagctgaagtcacatggatataccaatcagattcaataagcaataaagcatgaaacgaattgttatgtataaggatgagaagaggcattacaatcccagaaggtcgattgaaatcgtgcgatttccccgcatgaaagtaataggggtttcttcgttgttggaggcaagacctcgacctctgatcaaccgatcacgctgtgccaaaaccttgaagtactccaaacttcccttttccggcactagatcgtcaagtccaagactttgcttgaccctatcagagaacatatggtgaacttcaaagctaaacttcccagaagcctcacatctctccaatccccaacacacaactaacagagacaataacacaaacacttggcgtgcaacgaccatgacttcaatctcggagcttttccgagaaaacaaaaacacctccgggataaaaagacgtttaatttctcagataaagacataatcctcgaagaataacgtatatgtaaggaaattgaagaattggaaaagtcaacagattgactcgttcgcattgttccagagaagctgatttgattattggccctaataatatttaagctaatactagtttaatcggagtagtagccattattttgcgtcttcgtcttcttccctgaagctgaaaggttgacaaaggcagagtttttttatccggagggagacgactttttaaatcagccgttattataagtctgttagtcatctctttctttttgcataaaagcccctctacgcttcttatttcgtacttaactccttttatagtttatactatttatattcaacgaacaatttattttcctttttttggtgaaataatttcctagtcaaatcaatcattcgctcataattgttgctgatttaattatgccgcattagagtatctcaatactaaactcaaattcgaattatatgcaacaagttgagaaaaagattagctcttttagaaaagtcaacatacgatgagggcattatgaattaagtgaatcacaaatagacaatttgaatcattgctttacggatacatgtcctcctttgcttcaatcacttttgacacatccgaaacattttacataacaaaaacatacattgtaacaagggagataaaataagattcaacaatctcaaaccaatgaacattgtgttttgctcatcaaacgatgtttattattaaatgaacacaaaaatggttaaaccaacacaaaacgaacttttgtgattcagaggaaagccaaaagtggtaggagaaataggagttgagctgcaagagggctgagattggctgcaccgcctgtgccagagtttctggtggagttacgaggatcgattgtgggcggtgtagcagaagcagcaggtggtggagtggatacacttggtggaggagcttcgatctctggtggtggaggagactcagatgctaagctttcatcttcaaaacctgcattgacacaaaaccacatcattactaatgcttggttcctaagtatatacagtcacttcctgatttaggaacttacaattagactgcttccaacccaaaatcatcctctcccgatcaaatacaatgcggtggcccgacatcaagttctctgcattccacacatactctcattatatccatatatatatatatatatatatatatatatatatatataaatttgtgcatcagaattggttgttgagatacttacgtccgatgatattgagatttatgctcttcagaatacccaagcagtacatcttagtaccctcctgttaccagtgttcaaaaccaaaaacaaaaagaaaatgtaaatagatacgttaatacaggaaaagaaaaagaaaaattaaagaccatgtcatgccttagacgttgctgtaagaaacggattcctgagagtcattttggatcctccaacgaaaatcatctctacaggggttgtaacatttggactgcatatgacgaggacgagcatcagaattcagatgttcttctctataaaatgtttcccatctttcttactttttacgtgttctggcgtgcgttaaaagaatgtgctattaatataggcaaaagcatatataactacactgataagagtggaagcatgaccttaagtcgtaacagaactcaaacggaaaatcaggatcaactgggcgtcgcttgtcctccataagatcgtcaaactgcaaaagtaaaagatgtacgtcatatgatgtaacaaacaaagcttggaggaatggctttcttctgagaaatcttcatttcaattttcaatgcccactgcaaaaattacagatatatctaatggtttaacagcacaatagtttctccgaggaagaatagtttacacatatctcgcttttttacatgaatttggtcaggcagcattataatacatggtatagtctaatctaaacacttacagctttggtaaaaacaccatatgctgactccagtaagagtgtaaatgatgagccagtgtcgaatagtgcaaacaggggaacatcaacaggaacaccccctactgatactcccgtcacattcacaccatatgccgtactagttttcattttaggtcaaaaatgtgaaaaggaaaacataatgggagatagaagcagaattggtgtagtagatatacacaaattataaaactttggcgccgctaatctggaaatgacttcttaccttgtttcaagagagactaatggagtctcctcctggtctgtgtagcctttgtctccgaaactgattcttccaacaacgctaatgatacgcccgaaacacattgaaaaggagtttgcggtgatattcgcttttgccagaaggctcggaacagaatattctttcatactaagcccgagaacaccattcacagcaatatctgtctggaacgcacctgtctggttctgaccgcaactgcaccacaaacacggattcagttctttagcatctccttggtcatttctctaaacagaggacagttgatggaaccgtacatgagttctaagagaggcaaaagacctaaactttttacatgtccggaatctcacttcattcaataggttactccaggaatgaaccctttattcttaaaggtgcatagaagaaagacagaggaaaagagtcattacttacccaagcgttacattagcattgacaggctttaaatcctcatcctctgtgactagatgcaatacatcctgtaacaatgtccctgtcgtgactgtgttgctagataaggcaatctgataaggacaaatactttcaggagaagaacactttcccgatccaaaacaacgtttgtcactgcatcgaatgcttgaactcgtagtcgatgcattgggagtgtatagattaagtggtacactctgtctcaaagaagagaaaacgacaagagataaggaacaaatagtctgaaaaaaatgttcaactgcttggagaagggaaaggtacctcggaaaatctagcatctttcaagtcatggatacaagtagtaccgcaattgcaaggcaaccagaacaaatcgctgccggtgtccagagccaccagaaaccaagtcgccggtgttcccaaagatacattggcgtaatgcagactgaaaccatattcaagaggcgatggagtcaagcatcatacactaccaaattgtgtttgcgttaaagaagaaaacgaaatgttgtgaatcaaaaggaaaagaggaattacaatcccaaaaaattgagtgcaagcgtgaggttgcttccaatggaagtgagaggagtttcttcattgttggaggcaagacctcgacctctgatgaagcgatcacggtgggccaaaaccttgaagtactccaaacttccgttttctggcactagatcgtcaaacccaagagtttgcttgactacgtcagagaacatgtggtgaacttcgaagctaaacttcccagaagcctcacatctctccaaaccccaaaagatcaaaactaacatagacaataacacaaacacttggcgtgcaacgttcataacttcaatctcgaggcttttccgataaaataatacaacttccagagtaaaactctgtttaatttctcagataaacgatgtacactggtacgaatgccgtatttgtaaggagattgaggaaatgaaaaggtcaacagcttgacttgttcgcattgttccagacatgctgatttgaatgttcgagctaagagttgtttaatcggagtagtagccattactttggatcctcttctttttcccaagaacctaaaaggttgacgaaggcagagtctcttatccggagggagttgacttctgacattagccgttattaataagtctgttagtcaactctttttttttcggaaaaacccctttattcttcgtatatttcacttaactccctgtattctcttctgttcaacgaacaatttctttacttttctatttcgtgaaataatttcctatttaagtgagataacttctgacattagccgttataataagtctgtcagattatcacgaagtttatacactttatgtaattgatgattgctccatgcactttgacatatccaaaacactttatgtaacaaaaacaggggagacaagattaccactctcaaaccaatgaaaattgttttgcacatcaaacgaagtttgttactgaatgaacacaaaatggtcaaaccaaggaaaacatatggcttctgtgattcacaggaaggccaaaagaggtaggagaagtaggagttgagatgcgagagggatgagattggctgcaccgcctgtaccagggtttccagtggagttacgagggttgattgggggcggtgtagcggaaacagtaggaggaagagaacgaggtggtggagcggatacacttggtgcaggagcttcgacctctggtggtggaggagttgtagattccaagctttcatcttcaaaacctgccattaacacaaaacactttcattaccaatgctttcttcctaggtatatataatcagttaatcacttcctggtctggtcactcacaaagagactgcttccaacccaaaatcatcctctcccgatcgaatacaatgcggtagccagccacaaagttctctgcgagccacaaatattcccattagtattttgcatatatatacagaattttgtgtatcagtgtggagatacttacgtcctatgacgttaatcttgagacctacgctcttcagaacacccaagcagtacatcacattaccctcctgttacataaccaaaaacaaatatgtaaatacataagctagtaaatcaaagaaagaaaaattaaacaccatgtcttgcctgagtccgtgcagtgaaaaacggattgttgaggatgattttggatcctcctataaaagtcatctctactaaggggaactgtatggttgtagcgtttgggctgcatgtgaagatgaagaacatcagaattcaaatgtggtaccgatcagtccattttacaaagtcaatgattacttcatattcttctataaagtcaatgtttcctcaggcttttcttacttattagatgttctagcgtgcgttaaaattcgaacacattttactaaagtgggcaaaatcatctaataactacactgataagagtgcgggcgtgacctcaagtcgtaacagaactcaaacggaagctcgggatcaactgggcgtcgcctgtcctcaacaagttcgtcaaactgcaaaagttatggagaatgaacgtcatgccgatgtagcaatacccactgcaaaagttacagatctatctaatggtttaacagcacaacattttcagaagaagaaaagtttatacatacagatttggtaagaacgccatatgctggctcccgcaagtgtgtaaatgatgagccagtgtcgaattttgcaaacaggcgaatgtcaacaggatctcccgccactgatactcccgaaatgttcacaccataagcggtactagtttattcattttggatcaaaattgtcaaaaagaaaacaatgggagaaagaaatggaatcggtgtagaaactatgttgactttgtaccttggtgcaacagaaatgaatggagtctcctcctggtctgtgtagcctctgtctccaaaactgattcttccgacattgccaatgacacgcccgaagcacattgagaaggagtttgcagtgatattggcttttgccagaaggcttggaacagagtaacctttaataccaagcccaagaacaccattcacagaattgtttctctggaacagacctgtctgcttctgaccgcaactgcacgacaaacacggattcagttatttggcctttgaggtcatttctcaaacagaggacagttgatggagccatacatgagtgctaagagaggcaaaagacctacacattttacatctccagatttcacactatatctaatcttactgtatattatcggttatgctacgcacacctcggcgttaacaggacacggacagtatttaagcggcacaatagcgtacatgaaggttttttgtaaagaaaagacagaggtgaagaatcatttacttacccaagcgtgacattagctttgacaggtgttaaattttcatcctctgtagccagatgtaatacatcctgtaacaatgtccctttggtgcctgtgctgttagagtaggaaatctgataagggcaaatacttgaaggagaagaacactttttagatccaaaacaacgcttgtcgctgcaacgaatgcttgaacttgtagtcgacgcgttgggagtgtatagattgagtggtacactctgtctcaaagaagagcaaacgacaaagagttaaacaaaaatagtttgaagaaaccgtttagctgctttcaaaagaggggaaagtaacctgtggaactccaatgtcttccaagtcacggatacaagtagtaccgcaattgcaaggcaaccaaaacaaatcactgcctgtgtccagagccaccaggaacgaagaaggtggtgttcccacagagacattggcgtagtacagactgaaaccaaaccacatggagatacaaatcatatttcaacaacgaatggattcaagcatctcattcatacatatcgcttttactatcaccaactagcaataaacaagaaaacgaatagttgtgaatcaagatgagaagatgccttacgatcccagaagcttgactgaaaccgtgaggtttcccccatcgaaagtgatcggggtttcatcgttgttagaggcaagacctcgacctctaatcaagcgatcgcgatgagccaaaaccttgaagtactccaaacttccctgttccggaactagatcgccaagaccaagactttgcttgacggaatcagagaaaatgtggtggacttcgaagccaaacttcccagtagcctcacatctctcaaatccccaacacaccactaacacagacaataacacaaacacttggcgtgcaacgtccatgactttactctcaaaggtttttctcgtagaaaagaaaaacacttccggagtaaaactccgtttactttctcagataacgatacacaccatgacgaatcccgtatatgtacagaaatttgaggaaagtaaaaaggtcaaaagcttgactcggtcgcattgtaccagacatgctgagagaagctgatttgattctcttcgaactaatactagtttaatcggagtagtagccattattttgtatcttcgtcttgtttccctgaaggagaaaggttgacgaagacagagttctcttttgcggtgggagactttttgaaattagccattcctttttataagtgtcttcgtcaactcttttatttttgttgaaatgcccctctacacttcgtattttgcacttcattcctgttattttctcttttttgtcttattttatttaacgaacaatatctttttctattgttgttgatatcatataattccctagttactcataatagacaacattgttgatgttttctcttacagttgaccttctaatcatgccgcaatagagtatcaatagtacatgtatacctaatcttatattaaaaggttatacgagctttttattatcatactaaaattcgacttgtatacaaaaaatttagaaaaatagaagttccttcagagaaatcaacagacgaggagggcattatgcattataactttataaatcaaagatagacaagttgaattagtttccttttctccattttgtttaaagtcttggcttatacaatattatataggttaagtcattccatcgatttatttttggatattttaaattttgggagacgacccaaactttttgacccatgcgtgctcctatataaggtaagatattgtatttaaaaatgtcccacttggatgaatgggacgaacatggcaagaagatgagaaacaaagaatgatggggtggatagaataatatgtgaaactcagagggtagaaacgagaataagattagctctttgcacattagatgtaattaaattagtcactatcacaaagatacaaaagaaatgaagcaaatgatgaaaagtgaagaagccgcagccagagggttcaaacgactggaaaggttgatggttcttggagacgacgttggtgccatcgatggcggttttgctaaagcggtaggtcctgtgaaaccgttagtatcattacctgaaaatgtccacaagaaattagttattaacatgagtaatttttgtttttggagaagagtttagttcaagtaggacgtacaattagattttttccatcctaagatccttctctcacgatcgtggacgattctgtagttggtcatgaaattttctaacataaagaaaaattttcatctgatttaggaattggttaaaatgtacaagaagaaattgtgttgattgtgggaaaaaaagaacaaaaacgaacgtccgatgatgctgaagtcagcattaacttgctttaagacagccaaacaatagacttgaaaactaccctgttaatgcaatggagattaatatatttagatatagtaaatatgataaaatgatgatatgagaagatatgtgtatacatcggaagtgtcgaagacaagtatggggctgaaaacatcataagcagctcctcctttcatctcaaagctaactgaaggaagcttatcttcatctgaactgcaaacagctacacacacatgcatcaataattttttaactacaaacatttatcatatgtatatctaaagataagcctacgaacgttgatgtgataatgtagcaaaactcaaaagggctatccacacttttcgaaagtcgtctgtctggtacagagagatgaaactgcataacacaacacacagacgggtcggtttgtaatgttacatgcctcgaggttttaggtaatggaatgaactaaatgcaaaagtacgtaaagcgcacgtttgttgttagagcagtgtagtaaggctcgatcagccatgtaaccgcggttccagagtcaaatgtcgcggtgaattctgtatccaccgtaacttttcctaccttgaatttggtgatgctcacatcgtaaaacatcctgtgtttagatcatgcatgttcgttacatatgaatatacttattgggacaaataaaagaaaaaggtgtaaggagggtttacggtgagatggtgccactcaatggagtctcaagctggtctgagctacctttgtctccgaaactgattgttcctttcccattaggaccaaaacacattgagaaagagtctgacgcgacaccggctttaaccaacatgtttggaaccgctatgtcggctattgcaagtcccattataccatttacagccacttctttgaacaaccctagttgggactcactacatctgccaccatttaagtacttttcatatatgaagtaagaagagacctaaaatactatatgaaagacatattaatcagtgcattgccaattttagaaagaattacaaacccgaatgtgatccgagcatctctagcttctccttcttcagtgctcatgtggatcacatcctccaccaacacacctgtacttttgcttcccggagagagatatcggattctgtaaggacaatcgctgaccggagaaatgcatctgtttcttaatgcacagagtgtgctattgcacgtaacctttgagcttgattttgatttgctggggttgtagatgttgagttttattctctacgtatacatgtgtgtcttaaaagatgatcaagttttgatgtcataacaaataacattccaagattgtataaaattacctcgccttggtcagtctccatactccgtacacaagtggaattgcaattgcaaggtaaccaaaacaaatcactgcctgtgtctaatgccaccaagaaccattgagccggtgtccctatcgtcacattcgcataatgtagactgatcattaagaataaagaaacatataatcaaaggtctatatagtacttactaaatggaaatacagaggaggtgccaaatttttatcatacaaactgatttcttcggtggagttgccttgagcgaaagaaatagttgtctgattgttgttgttggaggttagctggcgacctcgatcacgatgaaccaaggccttgtagtagtctaggctgcccatttcaggcaaaccatggccacctagaacggttttgacttgctctgagaatctatggtgaatttcaaaggaaagtgatcctgaaacagaagaagccaatcccaaactcatagcacagaggaatccaaactgaaacatccatctcaacttccaattactccaaatcattctttgatcttcctatctttctctatgaatctaaagttaaagaagaaaaacaaagaataggtgtgttgattcttgctagttgagtttccttttactacacgaaacttgtttgttttgttttgtgtgtggaatatgagggagaaggtcaacgttttgtctggtgcttggtctttgtcaacggatttttaaagatcgttattaaaggaatatgttgccaacgaaattatcgtatttaattcaatttttgaacatcaactctcatatttaattattcatagaaaccttatcataatatttcttgttcttttatctttataaacaaaaccccacaagtatatgatctaacctcgaatcattgtgtttctgtggctgtttatatataaatttggtggaaatgtgactagagacgtggagggatgtttgttatcggtttggtgcagcccggtgtacattaggcaattggtaacaatattgtttaaatctgtacggaaaacaatggggtgaatttgtcataatatagagataagagagatcgaattgcaaatatgatacaattatttgaaaatagaaacgttgactattgataagtttttgtacacgtgtcatgtatatatgggacccagatcaaattcttcttcttaatccagccagctttgaattttgatatttgatgaatctcaattaattgtatgagaaaaaaaaagtttctctctttaaattagtagatcttagactgaatcataaacttttgatctctaatctcaacagatatgaaaataatcacttgattccatcatttgcttttctcttaacttttttttttccggaaaataagttttaattttaaactatagtaacaaaaatgatagaaagtacgtagaactctggaacttacacatactacgaacaactacattagataaaaggaaacacaagtcatgtacaagatgtgaagattagacgaatatcttggagaaaaacttttaaaaataaaaaatgtttgaaaagcaattactatgcattcatatatatgtatagacgaggtacgtagctagtctaagaagatgtgatgatcaagccttcgttcttgagaaattggggagaagatggaggcagtgaatgaaatgaaggtcgtgtacaagaggatttccggttctccttggtggagaccctacgtaccacattgactctatggttccaccttctatcggctgcacctacgaccacgatgaacatttatatttaaataacacccaagatcgattcatgcatgcaagtttgaaaaaatattttaagaaattaattaaaacaagtttatgttttagtattctcacaaaaaagttaagttttgatatatcattttacatttttaccaattttcatatataaattagataatttcatagaaaatagatgaaaaggactattgttttgaaaaggaagaaatctacaaattaaatgtctaatagaaatgatgaaagaagcaagaatgacgacgaccttatcgataatgctgagaacgtcgcttcttccctccttactttgttggctgattaaggcacacacatgtatgatgaatgaatcatcatgattaatttcaagaaacaagaagaaaatgatatatagtttcgattgttataaaaaaaacttttgtgtttacgtttacaaacaaaaagaatcatgttcttaactttttggaaagcacaaacacaaattacaccaaatgtataaaaaacacaaacaaacaatctagctagaccatgtaatgttaccaggtggaggagtgtaaggaacacgagagaggtttgatgaaatcaggaagagaatgacacacacggcgtggcttagggcaaagaggctgcttcacttccgaatgatgttgcatcttttctatattcccttaatccgatccaaaagaacaatgtagttatttaaatgttgatcctttgttaactggagtctgaaatgtagtaattaattagtttgaaatctatatatacaatatgtatcgttcgtttaagaagaaactgaaggattgtgtagtgatgagtgaagccaaagtttggttattctcagacaaaacattacttagaaagacgtgatcaatttacatgtggtgtctttatttcgtggtgaagagtgaaagtagggttggtgttcttgactactccccctcgttttttgcccttggttataaggccgagtagacatatctaaaggcccaatttgtgataagtagagagaaggcccgttttgttttcaagagccagagagcaaatgggaggaaagtgaggaaaagggaaggcacatgggagagaagtgaaggggaaaagaagagcaggtcaggtgcaggtggagttggatgtggaagttgcacacgtatgtctgtcttctttcgccagctaacctttctctctaatctcatttcatcacgtgtccctctcccttatcactcacacattttatctatatctttttttttttggttttttaactatcaatctttttcttctacatatatctaccaatacaaacacttgtctatatctgcaacactttttttttacctctccaagttataaggaatcgtcgaattcggagttgtgggtttaattgataacagaattagttatttggtataaattgtaagttattacaaagataaaggaccgtttgggtaaataaaaagaggaaagaaaagtcaattagaggagaaaagaagggttaggtttagaaaatctgatccagtaagtaatttgagagattggattgtctggttagaagcagtggagccctttcctttctctcttctctcttttctcctttgccttcttcctctccgagagaaggtcgacgctacttcttcttcttccttctttcttctggatctgattcggatccatcactctctctttctctacatcaatttgttttctcagatcttcatctttttttcgtatacctgtatttgtcgaccttttctctcaatcactaaaccctcaaatcctttttttggattataagattgcttctctgattgtaattgctttgatgtgtatcagttgacttgtgaaaagtctgcgagtgacttcttcctgtttacacatcagctactccagaatctctcaggtactaattttctcagagtttgaaaaagtttggattttgatctgatccttgttgaataaactattccctcttgcttatctgatccattaaccaattgggtttgcagtttttttagtttaaagttgggtttttgatatcatttttgctcagccaagtcgagagttttcagattctattaagcttataaaattgttgttttgttcagatccttacttttaattctgttttgaattgcagattcttaaaagcttaaatcttttttcgactttgattgtttctgtgcatcgctttgacggatgtggaggaaaaaaggggtgtcttgatgaaatgagggatgttatcaacgttaatgaaactcttgagtgcttgtctgtggccgtcttcttcctcgggcaagtcctctgattcaactggaaaacaagatggattgctttggtacaaagactttggtcagcacctcgttggtgaattc

SEQ ID NO: 96 - DNA, 94349 bp, Arabidopsis thaliana
gaattcaaatgtgtatcagagacttctttgaaaatccaacacatctctagttaaatgagaagaagcatatgacaagagcgcacacatgaccttaagtcgtaacagaactcaaatggaagctcaggatcaatcggacgtcgcttgtcagtgacatgatcgtcaaactgcaaaagtataagtttgatggtcatgtgatgtaaaaaaacacaagcttggaggaatgacacaagcttttgatagcacaaagtttcttgaagaatgaaaacttcactcagatatggtattagtacaatgaattctgtcaggcagtattagaatagatgactagtctgatctatggcacttacagctttggtaataagaccatattctggttctagtaaatgtgtaaatgatgttccagtgtcgaagagagctagcagctgaaccccaacagcatctccccctacagatacttcggtcacactcacagcatatgtcggactattttcatttggtataaacaagatcacaggagacagaaacagaatcagtatagataatacatcaaattgaaaacttttattcgctgtcagatcaaattggactttactatgtaccttggttcggtaggaagtagtggcgtctccatctggtctgtgtatcctttgtcaccgaagctgattcttccgacaacgtcaatgatattcccgaaacacattgagaaagagtttgcagtgatttttgcttttgccagtatgctcggaacagagtaatctttcaaacctagcccgagaagaccattaacagccgcactactctggagaaaacctgtctgattcttaccgcaactgcaacgcaaacacatgttagttccaagagaggcaacttttttaacatttttagttttgaaactaagttcaatataatcgttactctgttttgctatgcatttcaacatatagaacacgaaatgaacataattttagaggtttaaatagcggcaacgtgatttttgttaagaaaaacaaagtcattacttacccaagcgtgatattagctttaacaggctctaaaccctcgtcctctgtgaccaaatgcaatacatcctcaaacaatgtcccggtggtaaaggtgtccttagaaaggtactggatctgataagggcaactacttgcaggagaagaacaccggctcgacccaaaacaacggtcatcactgcatctaatgcttgaacttgtagaagatgtgttggggctgtatagattgagtggtcgactctatgtcaaagaagaaaaagagttaaggaataaatagtttgaagaagatatatatctgaatgctttcgacaggagaaaaaggcacctgtgaaagtccaacttctttcaagtcacggatacaagtggaaccgcaattgcaaggcaaccaaaacaaatcgcttccggtgtccagagccaccaggaaccaagtggccggtgttcccacagagacattggcgtagtgcaagctgaagtcacatggatataccaatcagattcaataagcaataaagcatgaaacgaattgttatgtataaggatgagaagaggcattacaatcccagaaggtcgattgaaatcgtgcgatttccccgcatgaaagtaataggggtttcttcgttgttggaggcaagacctcgacctctgatcaaccgatcacgctgtgccaaaaccttgaagtactccaaacttcccttttccggcactagatcgtcaagtccaagactttgcttgaccctatcagagaacatatggtgaacttcaaagctaaacttcccagaagcctcacatctctccaatccccaacacacaactaacagagacaataacacaaacacttggcgtgcaacgaccatgacttcaatctcggagcttttccgagaaaacaaaaacacctccgggataaaaagacgtttaatttctcagataaagacataatcctcgaagaataacgtatatgtaaggaaattgaagaattggaaaagtcaacagattgactcgttcgcattgttccagagaagctgatttgattattggccctaataatatttaagctaatactagtttaatcggagtagtagccattattttgcgtcttcgtcttcttccctgaagctgaaaggttgacaaaggcagagtttttttatccggagggagacgactttttaaatcagccgttattataagtctgttagtcatctctttctttttgcataaaagcccctctacgcttcttatttcgtacttaactccttttatagtttatactatttatattcaacgaacaatttattttcctttttttggtgaaataatttcctagtcaaatcaatcattcgctcataattgttgctgatttaattatgccgcattagagtatctcaatactaaactcaaattcgaattatatgcaacaagttgagaaaaagattagctcttttagaaaagtcaacatacgatgagggcattatgaattaagtgaatcacaaatagacaatttgaatcattgctttacggatacatgtcctcctttgcttcaatcacttttgacacatccgaaacattttacataacaaaaacatacattgtaacaagggagataaaataagattcaacaatctcaaaccaatgaacattgtgttttgctcatcaaacgatgtttattattaaatgaacacaaaaatggttaaaccaacacaaaacgaacttttgtgattcagaggaaagccaaaagtggtaggagaaataggagttgagctgcaagagggctgagattggctgcaccgcctgtgccagagtttctggtggagttacgaggatcgattgtgggcggtgtagcagaagcagcaggtggtggagtggatacacttggtggaggagcttcgatctctggtggtggaggagactcagatgctaagctttcatcttcaaaacctgcattgacacaaaaccacatcattactaatgcttggttcctaagtatatacagtcacttcctgatttaggaacttacaattagactgcttccaacccaaaatcatcctctcccgatcaaatacaatgcggtggcccgacatcaagttctctgcattccacacatactctcattatatccatatatatatatatatatatatatatatatatatatataaatttgtgcatcagaattggttgttgagatacttacgtccgatgatattgagatttatgctcttcagaatacccaagcagtacatcttagtaccctcctgttaccagtgttcaaaaccaaaaacaaaaagaaaatgtaaatagatacgttaatacaggaaaagaaaaagaaaaattaaagaccatgtcatgccttagacgttgctgtaagaaacggattcctgagagtcattttggatcctccaacgaaaatcatctctacaggggttgtaacatttggactgcatatgacgaggacgagcatcagaattcagatgttcttctctataaaatgtttcccatctttcttactttttacgtgttctggcgtgcgttaaaagaatgtgctattaatataggcaaaagcatatataactacactgataagagtggaagcatgaccttaagtcgtaacagaactcaaacggaaaatcaggatcaactgggcgtcgcttgtcctccataagatcgtcaaactgcaaaagtaaaagatgtacgtcatatgatgtaacaaacaaagcttggaggaatggctttcttctgagaaatcttcatttcaattttcaatgcccactgcaaaaattacagatatatctaatggtttaacagcacaatagtttctccgaggaagaatagtttacacatatctcgcttttttacatgaatttggtcaggcagcattataatacatggtatagtctaatctaaacacttacagctttggtaaaaacaccatatgctgactccagtaagagtgtaaatgatgagccagtgtcgaatagtgcaaacaggggaacatcaacaggaacaccccctactgatactcccgtcacattcacaccatatgccgtactagttttcattttaggtcaaaaatgtgaaaaggaaaacataatgggagatagaagcagaattggtgtagtagatatacacaaattataaaactttggcgccgctaatctggaaatgacttcttaccttgtttcaagagagactaatggagtctcctcctggtctgtgtagcctttgtctccgaaactgattcttccaacaacgctaatgatacgcccgaaacacattgaaaaggagtttgcggtgatattcgcttttgccagaaggctcggaacagaatattctttcatactaagcccgagaacaccattcacagcaatatctgtctggaacgcacctgtctggttctgaccgcaactgcaccacaaacacggattcagttctttagcatctccttggtcatttctctaaacagaggacagttgatggaaccgtacatgagttctaagagaggcaaaagacctaaactttttacatgtccggaatctcacttcattcaataggttactccaggaatgaaccctttattcttaaaggtgcatagaagaaagacagaggaaaagagtcattacttacccaagcgttacattagcattgacaggctttaaatcctcatcctctgtgactagatgcaatacatcctgtaacaatgtccctgtcgtgactgtgttgctagataaggcaatctgataaggacaaatactttcaggagaagaacactttcccgatccaaaacaacgtttgtcactgcatcgaatgcttgaactcgtagtcgatgcattgggagtgtatagattaagtggtacactctgtctcaaagaagagaaaacgacaagagataaggaacaaatagtctgaaaaaaatgttcaactgcttggagaagggaaaggtacctcggaaaatctagcatctttcaagtcatggatacaagtagtaccgcaattgcaaggcaaccagaacaaatcgctgccggtgtccagagccaccagaaaccaagtcgccggtgttcccaaagatacattggcgtaatgcagactgaaaccatattcaagaggcgatggagtcaagcatcatacactaccaaattgtgtttgcgttaaagaagaaaacgaaatgttgtgaatcaaaaggaaaagaggaattacaatcccaaaaaattgagtgcaagcgtgaggttgcttccaatggaagtgagaggagtttcttcattgttggaggcaagacctcgacctctgatgaagcgatcacggtgggccaaaaccttgaagtactccaaacttccgttttctggcactagatcgtcaaacccaagagtttgcttgactacgtcagagaacatgtggtgaacttcgaagctaaacttcccagaagcctcacatctctccaaaccccaaaagatcaaaactaacatagacaataacacaaacacttggcgtgcaacgttcataacttcaatctcgaggcttttccgataaaataatacaacttccagagtaaaactctgtttaatttctcagataaacgatgtacactggtacgaatgccgtatttgtaaggagattgaggaaatgaaaaggtcaacagcttgacttgttcgcattgttccagacatgctgatttgaatgttcgagctaagagttgtttaatcggagtagtagccattactttggatcctcttctttttcccaagaacctaaaaggttgacgaaggcagagtctcttatccggagggagttgacttctgacattagccgttattaataagtctgttagtcaactctttttttttcggaaaaacccctttattcttcgtatatttcacttaactccctgtattctcttctgttcaacgaacaatttctttacttttctatttcgtgaaataatttcctatttaagtgagataacttctgacattagccgttataataagtctgtcagattatcacgaagtttatacactttatgtaattgatgattgctccatgcactttgacatatccaaaacactttatgtaacaaaaacaggggagacaagattaccactctcaaaccaatgaaaattgttttgcacatcaaacgaagtttgttactgaatgaacacaaaatggtcaaaccaaggaaaacatatggcttctgtgattcacaggaaggccaaaagaggtaggagaagtaggagttgagatgcgagagggatgagattggctgcaccgcctgtaccagggtttccagtggagttacgagggttgattgggggcggtgtagcggaaacagtaggaggaagagaacgaggtggtggagcggatacacttggtgcaggagcttcgacctctggtggtggaggagttgtagattccaagctttcatcttcaaaacctgccattaacacaaaacactttcattaccaatgctttcttcctaggtatatataatcagttaatcacttcctggtctggtcactcacaaagagactgcttccaacccaaaatcatcctctcccgatcgaatacaatgcggtagccagccacaaagttctctgcgagccacaaatattcccattagtattttgcatatatatacagaattttgtgtatcagtgtggagatacttacgtcctatgacgttaatcttgagacctacgctcttcagaacacccaagcagtacatcacattaccctcctgttacataaccaaaaacaaatatgtaaatacataagctagtaaatcaaagaaagaaaaattaaacaccatgtcttgcctgagtccgtgcagtgaaaaacggattgttgaggatgattttggatcctcctataaaagtcatctctactaaggggaactgtatggttgtagcgtttgggctgcatgtgaagatgaagaacatcagaattcaaatgtggtaccgatcagtccattttacaaagtcaatgattacttcatattcttctataaagtcaatgtttcctcaggcttttcttacttattagatgttctagcgtgcgttaaaattcgaacacattttactaaagtgggcaaaatcatctaataactacactgataagagtgcgggcgtgacctcaagtcgtaacagaactcaaacggaagctcgggatcaactgggcgtcgcctgtcctcaacaagttcgtcaaactgcaaaagttatggagaatgaacgtcatgccgatgtagcaatacccactgcaaaagttacagatctatctaatggtttaacagcacaacattttcagaagaagaaaagtttatacatacagatttggtaagaacgccatatgctggctcccgcaagtgtgtaaatgatgagccagtgtcgaattttgcaaacaggcgaatgtcaacaggatctcccgccactgatactcccgaaatgttcacaccataagcggtactagtttattcattttggatcaaaattgtcaaaaagaaaacaatgggagaaagaaatggaatcggtgtagaaactatgttgactttgtaccttggtgcaacagaaatgaatggagtctcctcctggtctgtgtagcctctgtctccaaaactgattcttccgacattgccaatgacacgcccgaagcacattgagaaggagtttgcagtgatattggcttttgccagaaggcttggaacagagtaacctttaataccaagcccaagaacaccattcacagaattgtttctctggaacagacctgtctgcttctgaccgcaactgcacgacaaacacggattcagttatttggcctttgaggtcatttctcaaacagaggacagttgatggagccatacatgagtgctaagagaggcaaaagacctacacattttacatctccagatttcacactatatctaatcttactgtatattatcggttatgctacgcacacctcggcgttaacaggacacggacagtatttaagcggcacaatagcgtacatgaaggttttttgtaaagaaaagacagaggtgaagaatcatttacttacccaagcgtgacattagctttgacaggtgttaaattttcatcctctgtagccagatgtaatacatcctgtaacaatgtccctttggtgcctgtgctgttagagtaggaaatctgataagggcaaatacttgaaggagaagaacactttttagatccaaaacaacgcttgtcgctgcaacgaatgcttgaacttgtagtcgacgcgttgggagtgtatagattgagtggtacactctgtctcaaagaagagcaaacgacaaagagttaaacaaaaatagtttgaagaaaccgtttagctgctttcaaaagaggggaaagtaacctgtggaactccaatgtcttccaagtcacggatacaagtagtaccgcaattgcaaggcaaccaaaacaaatcactgcctgtgtccagagccaccaggaacgaagaaggtggtgttcccacagagacattggcgtagtacagactgaaaccaaaccacatggagatacaaatcatatttcaacaacgaatggattcaagcatctcattcatacatatcgcttttactatcaccaactagcaataaacaagaaaacgaatagttgtgaatcaagatgagaagatgccttacgatcccagaagcttgactgaaaccgtgaggtttcccccatcgaaagtgatcggggtttcatcgttgttagaggcaagacctcgacctctaatcaagcgatcgcgatgagccaaaaccttgaagtactccaaacttccctgttccggaactagatcgccaagaccaagactttgcttgacggaatcagagaaaatgtggtggacttcgaagccaaacttcccagtagcctcacatctctcaaatccccaacacaccactaacacagacaataacacaaacacttggcgtgcaacgtccatgactttactctcaaaggtttttctcgtagaaaagaaaaacacttccggagtaaaactccgtttactttctcagataacgatacacaccatgacgaatcccgtatatgtacagaaatttgaggaaagtaaaaaggtcaaaagcttgactcggtcgcattgtaccagacatgctgagagaagctgatttgattctcttcgaactaatactagtttaatcggagtagtagccattattttgtatcttcgtcttgtttccctgaaggagaaaggttgacgaagacagagttctcttttgcggtgggagactttttgaaattagccattcctttttataagtgtcttcgtcaactcttttatttttgttgaaatgcccctctacacttcgtattttgcacttcattcctgttattttctcttttttgtcttattttatttaacgaacaatatctttttctattgttgttgatatcatataattccctagttactcataatagacaacattgttgatgttttctcttacagttgaccttctaatcatgccgcaatagagtatcaatagtacatgtatacctaatcttatattaaaaggttatacgagctttttattatcatactaaaattcgacttgtatacaaaaaatttagaaaaatagaagttccttcagagaaatcaacagacgaggagggcattatgcattataactttataaatcaaagatagacaagttgaattagtttccttttctccattttgtttaaagtcttggcttatacaatattatataggttaagtcattccatcgatttatttttggatattttaaattttgggagacgacccaaactttttgacccatgcgtgctcctatataaggtaagatattgtatttaaaaatgtcccacttggatgaatgggacgaacatggcaagaagatgagaaacaaagaatgatggggtggatagaataatatgtgaaactcagagggtagaaacgagaataagattagctctttgcacattagatgtaattaaattagtcactatcacaaagatacaaaagaaatgaagcaaatgatgaaaagtgaagaagccgcagccagagggttcaaacgactggaaaggttgatggttcttggagacgacgttggtgccatcgatggcggttttgctaaagcggtaggtcctgtgaaaccgttagtatcattacctgaaaatgtccacaagaaattagttattaacatgagtaatttttgtttttggagaagagtttagttcaagtaggacgtacaattagattttttccatcctaagatccttctctcacgatcgtggacgattctgtagttggtcatgaaattttctaacataaagaaaaattttcatctgatttaggaattggttaaaatgtacaagaagaaattgtgttgattgtgggaaaaaaagaacaaaaacgaacgtccgatgatgctgaagtcagcattaacttgctttaagacagccaaacaatagacttgaaaactaccctgttaatgcaatggagattaatatatttagatatagtaaatatgataaaatgatgatatgagaagatatgtgtatacatcggaagtgtcgaagacaagtatggggctgaaaacatcataagcagctcctcctttcatctcaaagctaactgaaggaagcttatcttcatctgaactgcaaacagctacacacacatgcatcaataattttttaactacaaacatttatcatatgtatatctaaagataagcctacgaacgttgatgtgataatgtagcaaaactcaaaagggctatccacacttttcgaaagtcgtctgtctggtacagagagatgaaactgcataacacaacacacagacgggtcggtttgtaatgttacatgcctcgaggttttaggtaatggaatgaactaaatgcaaaagtacgtaaagcgcacgtttgttgttagagcagtgtagtaaggctcgatcagccatgtaaccgcggttccagagtcaaatgtcgcggtgaattctgtatccaccgtaacttttcctaccttgaatttggtgatgctcacatcgtaaaacatcctgtgtttagatcatgcatgttcgttacatatgaatatacttattgggacaaataaaagaaaaaggtgtaaggagggtttacggtgagatggtgccactcaatggagtctcaagctggtctgagctacctttgtctccgaaactgattgttcctttcccattaggaccaaaacacattgagaaagagtctgacgcgacaccggctttaaccaacatgtttggaaccgctatgtcggctattgcaagtcccattataccatttacagccacttctttgaacaaccctagttgggactcactacatctgccaccatttaagtacttttcatatatgaagtaagaagagacctaaaatactatatgaaagacatattaatcagtgcattgccaattttagaaagaattacaaacccgaatgtgatccgagcatctctagcttctccttcttcagtgctcatgtggatcacatcctccaccaacacacctgtacttttgcttcccggagagagatatcggattctgtaaggacaatcgctgaccggagaaatgcatctgtttcttaatgcacagagtgtgctattgcacgtaacctttgagcttgattttgatttgctggggttgtagatgttgagttttattctctacgtatacatgtgtgtcttaaaagatgatcaagttttgatgtcataacaaataacattccaagattgtataaaattacctcgccttggtcagtctccatactccgtacacaagtggaattgcaattgcaaggtaaccaaaacaaatcactgcctgtgtctaatgccaccaagaaccattgagccggtgtccctatcgtcacattcgcataatgtagactgatcattaagaataaagaaacatataatcaaaggtctatatagtacttactaaatggaaatacagaggaggtgccaaatttttatcatacaaactgatttcttcggtggagttgccttgagcgaaagaaatagttgtctgattgttgttgttggaggttagctggcgacctcgatcacgatgaaccaaggccttgtagtagtctaggctgcccatttcaggcaaaccatggccacctagaacggttttgacttgctctgagaatctatggtgaatttcaaaggaaagtgatcctgaaacagaagaagccaatcccaaactcatagcacagaggaatccaaactgaaacatccatctcaacttccaattactccaaatcattctttgatcttcctatctttctctatgaatctaaagttaaagaagaaaaacaaagaataggtgtgttgattcttgctagttgagtttccttttactacacgaaacttgtttgttttgttttgtgtgtggaatatgagggagaaggtcaacgttttgtctggtgcttggtctttgtcaacggatttttaaagatcgttattaaaggaatatgttgccaacgaaattatcgtatttaattcaatttttgaacatcaactctcatatttaattattcatagaaaccttatcataatatttcttgttcttttatctttataaacaaaaccccacaagtatatgatctaacctcgaatcattgtgtttctgtggctgtttatatataaatttggtggaaatgtgactagagacgtggagggatgtttgttatcggtttggtgcagcccggtgtacattaggcaattggtaacaatattgtttaaatctgtacggaaaacaatggggtgaatttgtcataatatagagataagagagatcgaattgcaaatatgatacaattatttgaaaatagaaacgttgactattgataagtttttgtacacgtgtcatgtatatatgggacccagatcaaattcttcttcttaatccagccagctttgaattttgatatttgatgaatctcaattaattgtatgagaaaaaaaaagtttctctctttaaattagtagatcttagactgaatcataaacttttgatctctaatctcaacagatatgaaaataatcacttgattccatcatttgcttttctcttaacttttttttttccggaaaataagttttaattttaaactatagtaacaaaaatgatagaaagtacgtagaactctggaacttacacatactacgaacaactacattagataaaaggaaacacaagtcatgtacaagatgtgaagattagacgaatatcttggagaaaaacttttaaaaataaaaaatgtttgaaaagcaattactatgcattcatatatatgtatagacgaggtacgtagctagtctaagaagatgtgatgatcaagccttcgttcttgagaaattggggagaagatggaggcagtgaatgaaatgaaggtcgtgtacaagaggatttccggttctccttggtggagaccctacgtaccacattgactctatggttccaccttctatcggctgcacctacgaccacgatgaacatttatatttaaataacacccaagatcgattcatgcatgcaagtttgaaaaaatattttaagaaattaattaaaacaagtttatgttttagtattctcacaaaaaagttaagttttgatatatcattttacatttttaccaattttcatatataaattagataatttcatagaaaatagatgaaaaggactattgttttgaaaaggaagaaatctacaaattaaatgtctaatagaaatgatgaaagaagcaagaatgacgacgaccttatcgataatgctgagaacgtcgcttcttccctccttactttgttggctgattaaggcacacacatgtatgatgaatgaatcatcatgattaatttcaagaaacaagaagaaaatgatatatagtttcgattgttataaaaaaaacttttgtgtttacgtttacaaacaaaaagaatcatgttcttaactttttggaaagcacaaacacaaattacaccaaatgtataaaaaacacaaacaaacaatctagctagaccatgtaatgttaccaggtggaggagtgtaaggaacacgagagaggtttgatgaaatcaggaagagaatgacacacacggcgtggcttagggcaaagaggctgcttcacttccgaatgatgttgcatcttttctatattcccttaatccgatccaaaagaacaatgtagttatttaaatgttgatcctttgttaactggagtctgaaatgtagtaattaattagtttgaaatctatatatacaatatgtatcgttcgtttaagaagaaactgaaggattgtgtagtgatgagtgaagccaaagtttggttattctcagacaaaacattacttagaaagacgtgatcaatttacatgtggtgtctttatttcgtggtgaagagtgaaagtagggttggtgttcttgactactccccctcgttttttgcccttggttataaggccgagtagacatatctaaaggcccaatttgtgataagtagagagaaggcccgttttgttttcaagagccagagagcaaatgggaggaaagtgaggaaaagggaaggcacatgggagagaagtgaaggggaaaagaagagcaggtcaggtgcaggtggagttggatgtggaagttgcacacgtatgtctgtcttctttcgccagctaacctttctctctaatctcatttcatcacgtgtccctctcccttatcactcacacattttatctatatctttttttttttggttttttaactatcaatctttttcttctacatatatctaccaatacaaacacttgtctatatctgcaacactttttttttacctctccaagttataaggaatcgtcgaattcggagttgtgggtttaattgataacagaattagttatttggtataaattgtaagttattacaaagataaaggaccgtttgggtaaataaaaagaggaaagaaaagtcaattagaggagaaaagaagggttaggtttagaaaatctgatccagtaagtaatttgagagattggattgtctggttagaagcagtggagccctttcctttctctcttctctcttttctcctttgccttcttcctctccgagagaaggtcgacgctacttcttcttcttccttctttcttctggatctgattcggatccatcactctctctttctctacatcaatttgttttctcagatcttcatctttttttcgtatacctgtatttgtcgaccttttctctcaatcactaaaccctcaaatcctttttttggattataagattgcttctctgattgtaattgctttgatgtgtatcagttgacttgtgaaaagtctgcgagtgacttcttcctgtttacacatcagctactccagaatctctcaggtactaattttctcagagtttgaaaaagtttggattttgatctgatccttgttgaataaactattccctcttgcttatctgatccattaaccaattgggtttgcagtttttttagtttaaagttgggtttttgatatcatttttgctcagccaagtcgagagttttcagattctattaagcttataaaattgttgttttgttcagatccttacttttaattctgttttgaattgcagattcttaaaagcttaaatcttttttcgactttgattgtttctgtgcatcgctttgacggatgtggaggaaaaaaggggtgtcttgatgaaatgagggatgttatcaacgttaatgaaactcttgagtgcttgtctgtggccgtcttcttcctcgggcaagtcctctgattcaactggaaaacaagatggattgctttggtacaaagactttggtcagcacctcgttggtgaattctccatggctgttgttcaagccaacaacttgcttgaggatcagagccaagttgagtctgggcctttgagtactcttgactctggtccttatggaacttttattggaatctatgatggccatggcgggcctgagacgtcgcgatttgttaatgatcacctttttcagcatctaaagagtgaggaaactgaatgatatatgcataccaggttacaaaccaaccgtgcggaaactaaaatcttgtttgaattttcaggatttgctgcagagcaggcctctatgtcggtggatgtaattaaaaaggcgtatgaggcgacagaagaaggttttttaggggttgtgacaaagcagtggccaactaagccacagattgcagcggttgggtcttgctgcttggtgggtgttatatgcggagggatgctttacatagctaatgttggggattcccgtgcagttcttggaagggctatgaaggcgacaggtgaggttattgcccttcagctctctgctgaacataatgtgagtatagagtctgttagacaggagatgcactccttgcacccagatgactcgcatattgtcatgttaaagcacaatgtgtggcgtgttaagggccttattcaggtatgtttctcaatctgaatgatatttaattagattttatggttaaatgacggctttaattcaggtacatgagtatcttagtgaatcactcgttgaattgatatatagttgtcttgtaaggcaaaaccggagctaatttgaattaaatggccttggaacttcttgctggtttcatgaagccaaaatgctaaacttcgaatcaaaaaagcagtgtttttttcttacttttaagatgtcaagatcaaccaagaaatttgtcaatgttttatctgtttggcgataaggtctctgcattaaattagactttacattcaaaaggctagatttgtcgtaaccttgactttgacattgccaataccaaacccaccaacccgagaaagtcagagctctggttgaagttgaaataggtattatctaaaagccagtgtatgtatgcccctcctacacaaagatacagatattatataattgactcaacagttgaatccatattttatccctatcactgcatgtagacagtagacactaggtgcaaacgctagatatgtcaagataatcctggagattgaaattgaaaaggctaagatatgtttgttcctttgcagatatctagatccataggcgacgtgtatcttaaaaaggcagagttcaacaaggaaccattgtacacaaagtatagaatccgtgaaccgttcaaaagacctatcttgagtggggaaccaacgataacggagcatgagatccaaccacaagataagtttctaatattcgcttctgatggactatgggaacagatgagcaaccaagaagctgttgacatcgttcagaaccacccacgaaacgtgcgttagacccatttcttcctttttttttcactttcagtaaaaaccaattacaaaaccaaagattgactctatcctttgttgtggaaatgaatgcaggggattgcacggagactggtgaagatggcactgcaagaggcggcaaagaaacgagagatgagatattctgatctaaagaagatagagagaggtgtgaggagacatttccacgatgacataactgtggtcataatcttccttgataccaatcaggtgagctctgtgaaaggacccccactctctatccgaggcggtggtatgacattccccaagaaaatctaagatactccacttttaggctccatcttttgtagttatataaaaaaaaaagtcactgttgttggtataagaatgtataattttaacgtgaaagccacacaatactgatgtttggaactcattccagtaattattaatttttatttattcagcaaactttgtgtaacgatgtaatttgttgttgatgatgaatgaatatgaatgtaggccttcttcttctgtcatgtatttgtattgcattcataatacagaggtgcttgatattgctttttattctatatatgtgaatgaagccaagaatcagttaatactaaagctcaagtgtgcaatatacatcacaatacctttgtccttgtttcaggtctacttttacatcatagaacttgctcctatagataatacaatgcatggtattgacgtaagaactcttagcttttcatattagtagcttataatgttccttaaatgcgacattgatattaagctactactcaataactcaatggtaacgaatcataagtctgaactattcgaaaacagtaatcctgaaaagaaagaatgaagcgtgttgataagtaatgatatgatttgatattgcaagtcaagaaaatataattgggtagagaaagaaagagagataatgtgtgttctgcataaaatttatggcaatggtggaccggagaggttaatgtagtaagaaagcatgagagaagtaaataggggttgcaaaagtttttgccatcccaccagtcctaaccagacaaaaaagaaaggtgttggttttaaacaagctctggtgttacaatgtgacattaaaacacgaatcttttctcttgagaatcatcaatagagagagagagtgagtggtcatattagggttcataacttgcttgaggttttgtaaaaagcagagaaagagagagagaggggcctagaaagaaagaaagaaaagcagtaagagactattaaatgttgcaggcaggtccagccagtgtcccctctcttctgcgagattccctcaaaatttattacaaagcatcttcatcgatgttcttttaattcttcctcaaaatcttttctctttttttggttatatatatttgaattttgatttatgaacctcctcaagaaggaaagacagaggaggagacaaagaagtataggttcacattgcatagccagtttagttttgaaggatggatatatgaaaaaaatatgaagagagagaagagagaagaagaggaggattaaagagggtgaggccagcttttgtgctttggtagtagatgaggtttaaatgctccataccttccatttccttctctcttaccctaatttaattcttcctctcctttataactccccacagacattctcacttctcctcctcacacttcacatcaacacttctttcttgttttttcattttacaatgtttcctttgatatccgcactttaagcatgagagagtccctttgatattggcctggttcactcagatcttacctgaccacacacgtagatatacattattctctctagattatctgattgagccgcgccaatatctcagtactctctcgtctctattttggactttgtggtcttgtagatcgatttgtatgtgtgtgttgaaatggagacaagtacttgtaacttctttgttgttatattgtttacctataggctgatgtcataaactcttttgatcttgtttctaacttccagattcttgaaaaatcaagtcgtgtgtgtgtctccatggaagccttttccatttcttcttttccaaggtatccccttaatcagcttccttgccaagtataaatctgttgtagggttttgcttcaaataatctatatggatccttttagaatgcatattgtgttgataccaattttgagacagaatgtgtcagcgaaactgatcttgtttattagtacaaatgcaggatgttagagagttagctaataacatatacaacaaaatcacaaaaccggtgaagcaatgtaaaatgtcacaatcacaagatgtttttttcaaaaacaggggaaaaagcagagttaatgagagagaagctgacgagcacgaaccctaacctgcaagcgagcaagagcatgcatacaatgtaaagcaattcgtgcttgtctcctcacaagcactcctctagccaccgcctgtaacttcaccagactcttcaatgctttaaacgctcttcttgcctgcaaaacactttaatggttttaccaattttgttttttcaggttttcaaaatctacagagatagaaaatgtaaattaccaggtgccctctgaaaaaggcttggattttaacggcggcaatctcttctcgagttgtttctggagctgaagagcgaatgattgtgattctgctttgagatcgtcggagaagtttccttcttacaacaccaaacaaacgtttggagttggccatgtttatgggtggatcttgtcttcttttggttttggttttggttttaaaagaggacgtctaaggaaacgtaaaatgtgaataaaaagtgaagacggtggctttaagggatatatggaacatgatgtgctctcctcatttctaactaacgaacgtgctcgcatgctcctctctttacacttggtttcgttttgtttattagtagttttcaagacacacgagtctttggtcttttttacatttagttattgaattatagttatgttatgcctaactcaataaaaagaagcttattgagattttgaaaaggttattataaagggtgattgttgcatttcaatgctcaaaattaccatgttatgatatatcttataatcacatgtgaaatctacactatttttaaaatttatgatttagacaattttttcgaaaatgtcactctatttttcaacaagaaaataaaattaggtcattggtattgtggtttgtaatatactaatgacccccactacaatcctaccgacaaagcgtccactctttgtaatgaagttctttgatcatttctctattcaatcttgacactatgaatgtaatcgcgcagcggaagaatggttcatcatactcttacactgttacacaggtccagccctgaactaaagtgtttgtgtttttgtatcggatatgattagcaattgtgcatcaagttagttacggtctcttctcaaatccagtaaaccaaaaaatatataaaaaaatcatactctataataaacttacatcaaatgtcctttttttaacgtttatgttgggagtacgtagtgagatttttcagatatgataaatgtttatgtttgaagttctattttgagtatcatcattttacacgtctcctatcttttcttcaatcaataaagcctttgagcccacaacttcgtaataccgttaaacccaattgttattgggcatgaaaacaaggcccaactcaagtctatctcccccacttgttcatcttctattgtcttgttgcgagtttgcgacttaaacagtaattaaattactaattacgcaataatggcggattaatcgaacctactctctctctctctctctctctctctctctctctctctctctctctctctctctctctctctcgtgcatctccataaactatcttcaaagattaaattttgaagatcttctttttggcttattacccgattctgtcactgtctcttcttcttctccaatcccaatgtttgcttgagagaaagagagagagtcaaaccaaaacatgggcgtttgttgccctttccttcaaccctgggatcgagctcgtgatcaatgtctcctcaacctcccttgtctctccgatcctggtaccaatttcctctctttttaccctaatctatctcacgatccggtgtttcattaggttcttatgattctgtatctaattgctatcttcttcatctacccagttcgaagatcttctctacttctgaaattggcactagtagctctccacctcgtctttatcggctttctcttccttttcgatgctgaatttattgagaaaactaaacgagatccatggttattactccttatctctctctgcttattcaattactgtatccttgagcttaatgttgattactctgtgattctttctctgataggtatatgggctgttatatcttactgttttctgcaacgcttctgcagtattttgtaacttctggctcttcacctgggtatatctacctatctatgcctaaatgtgtgtttcattttgattctgaaacctaaaaaatgggtgcttgaccttcttccttgtcttttaggtatgttgttgatgcaatgagggatgtttgcgaggctagtgcaatgtatagaaacccatctacgacctcaatgtaagaattgttctttcgttcttgtagtggcaaaaactctatgaagtttgatgaaaaaagtgtgattgacactagaatagattataatataggggagggataggaaagtaagaatcttttgatcgtttggttagtgagagacgccttttggatataggagagttaggagagctctacaacagttttccaaggtagttagggttcttgattgtaattcagtgataagaaatacagtttgattacttgattcttatcgaagtgatggaagtgagttctacgttactgtgtctcactgttgtgtttatacttttattattatttaagcgaagacaacatgcttccagaaaaagtgagagcgttgttgttaatgtcgaaggaggatcagcctcatgtcccagaaggcctccaacgccctgggggaagttggttctggacttgtaccctccagggacatccattaggtacatataaacttcaatcaaggttttgtattgtgtgaatcctgaagaatcagcttataacttgtaattgttagtagaaaggagtgttctgaattgttttgtttatgacttgcagaaatttgacatgcggctattgtcatgtggagcaggtaacatttgaatcttgtatgattcaattggacactctaattgttctttcggatttcacctttacctgtttgttcaagttcccactctctaaaactttctctcgaaacacgtaatgctttgcagcctccacgaaccaaacattgtcatgattgtgatcgatgtgttcttcagtttgatcatcactgtgtttggttaggaacatgtataggccagaaaaaccatagtaaattctggtaagcctgcaaaagctgaagtcgttctgttttattgtccaataactcggtactgttatgcaacagactttttcttttttagatcccagtaaagagtttctgtgataccaggtggtacatctgtgaagagacaactctatgcatctggacgctcatcatgtacgttgactacctgagtaatgtagcaaaaccttggtatgatactttcttatctcctcatgtattggccaatttcttctccggccctttagcagctccaacttgttaaaacacgaatttcaaatggaaatgtgaacaggtggaagaatgcaattatcatactgctgcttgtcatattggcgatctctttgatttttgtgctgcttctattgatttttcacaggttggtgttcacattttgtgttatttttcacaatctcatatcttttttctttgtctaactgcttctgtttctatttcaactgatttcttgcagctacctaattttgacaaatcaaagcacttatgaacttgtgagacgaagacgtattccatacatgaggtaattcaatttctatcacctagtaataatatcaggtttgtttgcatgatactaaagctattggggtttgcaggaatattccgggacgagtgcatccgtttagcagaggaattcggaggaacctatacaacgtctgttgcggaaactataatctagactcacttcccacagcgtttgaactcgaggatagatcaagaccctacacctgcatcgatatgttgaaatgtcgctgctgctaagtttttcatttatagttttatacatgcaattgtttcagtgtccaaaaatatgtgaaggtaacatgtttcctctaaaatttggatgatattgtatacatacaaggattccaattaatgagttatatatgcaaagagagtatgttcaataaagaaactctagcttggatcatacgtctgtacaatctttcgagcgactcctccagatcttcaaccgctacatctactttatccaagttggtgatcatagacttgatccgatccttctttatctcttctgccatgctgaatcttcgcagttcttcgtccatcatctggaattcgtttctgtgtccagtcctaacttgaccacttgtactagtaacgttcttgatcaccagtttggtgaccagggcccatttggaaggcctgggcttaggtacagctgtggatagggacaacaagactgtcctaaaggtttgacatgtttgggaacaaacttgttggagcagtgtgatcaagggatgagaggactcagatgaggataggccggtttgtttgagcaacaagagtagcttagcaatgtccttatgaaccgctttcctagagcggataaaagctttgacgtgacaccgaatggtagaatctccactgtgtctcctccgtctgaaagcagaacggaggtcgcggaggcaatccttgatgcggcaagtgatgtctcttagcttggaacacaagtcaaggtgtaaaagggagagatcaagaaggtgagtgaagaaagagtgatgagggactagaagtgaagaaggtgaatcgttgaaaagatgagagacagagtcgtagagatttgagagaagtgagagactattgttatcatctgcacgaagcttattaaggagttgctgaatttggttgagaccatgtgggtgtagccgagctggtaagctactagatcggacgtggtatgaggcagccattgatgatgatgttttgagatagagctagaaagttttagctaaaatgaagttgaataagaatatatatagagggagctagagagagagaggtcaagaaataggaaatagggttgtgaaagtaaaagccacgtgaaggggataatgttctttgttccatcaaagccaacttcatgtccttttctttatgcacttcattatgatctcgacatatatcattagttcgctcaatatgtacctaatttcatgtctttgttttcttaatcctttgttaaatcataatttgatgtacgtacccactaattagatcttaaattaggcaagcaagaatcaaaacaaagatattttgtcaagcccttcctcaactttgggtatattgatgcatggttatgaatggttctaattacttaattagtgagcatatctttatctcatatttgtgtgatcaaatgaagatttagcatcatctaaaacaaaaacaccaaataattgaaactgaaaatgattgatctagctgaagctggtggttggataacactaaatatgggaccgtgtgcacgagtgtcttgttgaaaacttccaaaggaaacgatcaaatagtaattaataatcaatcaatcacaatcgcaccgctttccttttcttaactaatatgaattcatgaacttgacttgtctctatcaaagtacagcctgcaactataatatctctcatctctaattagattacatagtccaatatctaacttcaaaatatctaccctaactattaggcatttgataataatatcttctcgtgacttggatatgtaactttttccttttttgatttccttagatatgtaacttaattggtctacaagaagatatttcatttgagatattttgttcgatcacattcccatgcatgtctgaaaagtttaaacaccaacttggttcttctacgtacagtataaaactaaactctatacacactctccaactaacttttgttttctttaaatatttatccaataataaccaccaatccaagcaaaaaaatatgtagaagaagttgaaactatacatagaaaaaggctagtatatattgtaagttgttcatttgtttgaagtaacatcgatcgggggttttggaaaccgacaaccctaaggtttaggtattgcgagtttacgacgatagacaagaaaaaagttgggccatgtgaagtcacgttactcttggaatggaccctcaattacgtaaaaatagcaactattaacattacaattgtttctcattattgtttgtttgggtttttgtcattttgtgtaataattgtgccacccaattgccataattagtgagccattgctcccatcacctcacctctctattgccgcctccattaccttgtatatctctactgtctcttcctttcttcatctctcacttcaataaaatatcatgcatgatattgttgtagagaattaaagaggtatgaagaagccttatgcttttgtttcatgctcccatgttttctcttctattatatatgatttttggtgacacaaaagaaaaaactaacttttgatatatagatggccattatattcttattaggaaaggtgattcaaagccatgcattcctaataaatgggaagtaacatgcacaaattaactaccgttttgtatttataaaattgatttttaattataatttcagcttttaatcctataatttgatttcttagttatagagaaatgaacttcaataagatcataaaatgatatgtataatgaaacataattttgtattgaaatgtgttagttgcttatatttattattagtatttttcaaattgtttataacttatacatgcatccttttagttgaaaacaataatgtaaaccaggctgcaaaagttgatttatttatgattttcgatttttcgtaataaaacttgttagatttatttttgtcttatatgattacttaagtacaatataaaattgaaatagggtcggcctcgtagcaaccttgaacagttggctgtatcaatgtgtggggacaagaggaatcaaagatccactcctctctcctttttaaatattcattaagagattaacaatttactaaatcattggatcatccgaaattaaagatcttgatgatgatgacttgatcattggtggtatcaaaactcaattagaaaaataataatgtgcacgagggatgggacttttaccaatgctaggctgacatgtaagagtacggacacaaatcttacaaagttcttattgtaccttccctaactttgctctgttgagataagtttctttggtaattaagaagtgtttgaattatgtagctataatttgctgatttatattaaattcttcactacaagaatctgtatctataactataatatgttttgtgtacaattagagactaactaaactaagagtgtgttgtaagaatgttaagcaaataaactctatattggacaagtgacttgaaaagagaatcaagtgcagtctcaagttcctctgttctttcctctaatctctctaacatcttcttaatttccttggagttatccccatctgaacgtagaactgcatccaagttctgcaactcgctcattatcgacgatgacgatcggtgaccaccactgatcagcctggagacgaatttgagagaacatgtctttgtcttcattgttgatgttgtggacaggaacatgaaaagagagcggaagatggagacagagagctcggttgtctcagagtcatccaacttcttcttgaggccaagaagaagcttgttagtctctttcttgatcttcttcctaaaggaaaagtactctttgatctgaacttccatggatttgtcttttcttctcaatgcagactgaagattaaggagatgctctctgagagtgagaactaggtttctcgctgcgtcgcaagagtctagtaacgtggctgacacgtcaagagaatgttcagcttgagctgtgggaagagagtgattgagttggtgaagggaatggtaaagctcagagaggttgagtaacgaggcgtgaagagattgagaatcagatgagttttggaagagatgaatctgagagagagcagcttgaaacttagcagaaggatggtggattcttgatggaagacttatagatctaactggcatttggagtttggtttctggaaatgccatgtttcttaattctgctgaagaaaaagaaagaagagaggtttggtatatatatgatgaagccaaggcatgtgcaggaaacatgggatattatatttgttaaaaataaacagtgattgtttagtcaagccacgatgcacatggaggtggtgaaggaagctttgaatgctctgttttatgctctgtttttgaacgtgaaaccaattttagaggaccaaagatagatagagccattactagatgttgcctttgtgattcccatttagttagccggagagagtgggcttgtcagagtaaggagacatggaaacatttgtcgcagaccattttcagatttcaactctttcttgtttcatccaattgtcaattttttttttcttcctattaacttattcaccattggttcccaagacggtcgtgaagagaaaaaagatgtcacaacactacaaagttgttgtaaaacaaaaaaaataaatactatatacacgaaagatgttacaaaaaaagtattattttgcattttcaatgcaataattaaaatgaattccaagtttattctttttttttttttttttttttttggtgcaccttccaagtttattcttataaactgattcttattatgtaaaaagtagagaaaatgcagagagttacatggaaaaaaattcaatgtagtcttaatttgtgagattttttttttatagaatgacacttagtataaaatcgggaaatattatattaagaataatcctaatcaggattatacaactgtacctactttaaataatgttgattagaatttaggagggcggttcaatgttttgtgccctaataatagaacgttgtattataagtttttgattgagtgcttcaaggctgtcattggattcatgatcaattggaaacattgttaagtgagagggacaaacttatgaattaagatattggccctttgtctccgttacaagagctatgcttatatgataaaatttgtttattaaagaaagaagggatcattgtagatcgcatataaatgatatgatgcaaaattacgggacgatgtaatgtacggggaatcttaaaagtggtacgtttcagacagaagatcttcatggaatttgatacattgaacctcttctcaaagtgttaatcaactcatctttatctgtcagaacccaaacttaaaactcagtcgaaatgtattctcaaaatatagttaataggcaacaaacttcgactatcaataataaccacataatttggtcggaaactagaagacgtcgcaacattatcaaacttaaactatgtagaaaatttccaaaactataagctactttaatgttgattaaaatgtaggagctagggctagtagctgttcaatgggttgtcccctgattcaccatatccattttagtataagtttttctttaatttgattgagtgattcaagactgccattggattcatattgatcattatcaattggacgcattgttgaattagagagacaagattatgaatcaagatcatggcttgtccccgtttaaaaatggtttaaactatatgataagtttatttagaaagaaaaaaagatcatgtacggggaatcttagagaagtggtacgttacagacaaaagatcttcacaaaatttgatacattgaacctcatctcaacgtcaatctacaactacgccttcaatagtaacagaaacaaaacacaaaaagtccataagttaaacactgggcctgacaatttaggcccatatactgaaggaaaacgagtctataaataattgggcctaatgaaatataaaagcccacgatactagattatcgaatggtggtccctattagttacgtaacgtacgaagatttatctacaagtttgaatcactccaaaaatttaaaattcagtgttcaccattttttatttttctccacaaacccaatctttctacaatggttctcttcttctccactcgttttctcttcttctccatcttcttcccttgcctcatctctatcactctctaccaactcgactcattcgagccagcttcacttcccgcggactcactcatcacctctcccacttcaatcccgccacttctcaacgacagatttctcaccggagctgagtttatcggcgtcggtcttctcaataaccccgaggatatcgcctaccataaggactctaatctcatctatactggttgtgttgatggatgggtgaaacgagtcagtgttcacgactcagctaatgactcaatcgtagaggattgggtcaataccggtggtagacctctcggtatcgcttttggacttcacggcgaagtcattgtcgccgacgcaaacaaggtttagacgattctttattttttgaaatcgaattttgaaaatcttatcttaggtttgatattgttggtgtgtgtagggattgttgagtataagcgatggcgggaagaagacggaattgttgacggatgaagcagacggtgttagatttaagctgacggatgcagttaccgttgctgataacggcgttttgtatttcacagatgcttcttcgaaatacgatttctatcaatttatctttgatttcttggaaggcaaaccacacggtcgtgtcatgagctttgatcctaccacacgtgccacacgtgttcttctcaaagacctctacttcgctaatggcatatcaatgtcccctgatcaaacacatttcgtcttctgcgaaaccatcatgtatgtgcattacatttgttatgtttctaactcaaaaccaattggtaattagtttttatttatagattttgtatattactttaggagaagatgcagtaagtattatattagtgaggagcgtgttgaggtatttattcagggcttaccaggttatccagataacattcggtacgacggagatggacattactggattgcattgatttcggtatttatactataattgaaatcttttcattaaagtttatgatgagattattatatcatctttaatcttttatttgatcattgtgttgtgaaaacaggaagtaacaacgtcatggaaactctcgatgaaataccttttcttgaggaaactcatatacatggcggctaagtatggcgtggaactactgtctataaagaatgcagccgttttgcaagtggatttggatgggaatcctatcgcaatgtaccatgatcatccattctctcacataacaagcggagtcaagattgggaaccatctctattttgggagcctcttgcattcctacattactagactcgatcttttaaagtatcccgcacaaaagaagctttaaacatcaagtttaggagtattcactgtcacaaaatgtaaagtcttcgtccctggcacatcatcatgtccttttgtcttcgtccctggcacatcatgtacggttgttgtaaggtcgagttttggtgttaaggtgttgttagtttataatctttgtgaatatggttagcttcttggtgcattgcaaggttaggtgaggtgaatagaggtggcgaataggttttagtggtttcacttttcgttgagctagtgtattagtccatgtttgctcgttcgttttgcgttagttttcggagaagctataagcttctatctggaggttttgtggacggtgttgttctcggaaaactaaagtatagcagaagattgcaaaatacttcgatggtttattgatatgaattgcatgcctttaaatagccatgactacaaagactacgtcgttcacaactaaacaatgagaaacttgcggaagtaagctaaagactaggaccactataacaactactactcgactcttaaagaccatgagtttattcaaacatgagaacaacttaacgacttattcaaaacccaacagacggagagtaatgcttgtgacaactcagatgaggattccagtgcttcggtattgcggcaacagcgtacttttccgagcttcgcggattcggtgtttctcctcctaacttggtcttgatcactcagccgcgatcttttgtacttagagttatagtgttgttctttaattttctgtagattgcttctctctccttctattcttctttgtcaaaaataaaaatggtataaaacttcatcttttacccaaaaaaaataaatgtaaagtcgtgtacagtgaatattactctgttttcaactccagaaaacataattgggcctattgggaatataattaaagcccacgagattcgactagcgagagttgttgttggttacgtaatttagcgcactacggaacaaagaagaccaaatttatacgagtcaacactcaacagcgatttgatctgcgatttgatcatcaacaacaatcactccaaattttgtctgctcaccatttttccacaaagccaattctcttgtatccaatgcctatgttctactcctctcgttttctcttcttcttcaccatcgtccccttactcgtctctatcgctctctaccaactcgacacatttgacccagctccggttccttccgaggcatacgcctcctctactacttcaatcccgccgcttatcagcgacaaatatctcaccggagctgagtttattggcgtcggtcttctcgataaacccgaagatatcgcctatcatcaagactctaatctcatatatactggctgcatagatggatgggtgaaacgagtcagtgtccacgactcagctaatgactcagtcgttgaggattgggtcaataccggtggtagaccgctcggaatcgctttcggagtccacggcgaagtcattgtggcagacgcatacaaggtttggattcgtgaactttttagaaatcgaattttgaaaatctcgatcttaggttgattagtgtgtgtgtcggtagggactgttgaacataagtggtgacgggaagaagacggaattattgacggatcaagcggaaggcgttaaatttaagctgactgatgtagtcgccgttgcagataacggcgttttgtatttcactgatgcttcttacaagtacactctgcatcaagtcaagtttgacattttggaaggtaaaccacatggccgtctcatgagctttgatcccaccacacgtgttacacgtgtacttctcaaagacctttacttcgctaatggcgtctccatgtctcctgatcaaacgcatctcatcttctgtgaaactcccatgtaagtccactgactctgttggattttactaatatccgactcataccagttagcaatgtgttaattcatcgatatactatatctaggagacgatgcagcaagtattacattaatgaagagcgtgtagaggtgtttattcaaggcttaccaggttatccagataacattcggtacgacggagatggccattactggattgctatggtttcggtatgtaaaccagttgaaatattttctttaaggtttatgatgatgagcttttgtatagttttgctcatagtgttgtgaaaacagggagcatcaacgttgtggaggctctcgatgaaataccctttcttgaggaaaatcacagccatagcggctaagtatggcgtggaacttatgttcatgaagaatgcaggtgttctgcaggtggatttggatgggaatcccatcgcttactaccatgatcagagactctctcacattaccaccggtatcaagattgggaactatctctattgtggaaatatcttgcattcgtacattatccgactcgatctcctgaagtatcctgcacagaagaagaagctttgaaacatcaaagtttatacaagcactaaaaatttccactttaggagtatgcactttcacaaaaatgtaaacgtatcgtcccttagaataaatgtatgataatgtctcttaaggagtacatagtagcctgaaacaatgaatacaaaaccaatcaaccatacaagccattccaatgtgtcataaaacttaacaaagtttagtgcgcatgttctttatatattaatgattagaagacgtcccctgactacggttacggttattacgtttacggtttattaaccaccggttacggttataaatttttgttaatcttaaccttaaccgttacatgtacggttaaaacggttacggttaaatacggttacggttaaatacggttatggttaaatacgattacggttatttgataattatgatatagttaatatacgaagtaaaatattatattttttaaccttcataataaaaaaataaataaatagtaatatatcaaataatatttattttacgcgattatgtgcttcaaatatctatagtgaatcatctatctattttcttaagtaaatcaacgaataaacaaattaatggtcataattataataatttaattacattttcgaaacaaaaataattctaaagagaagatgttgtgaacattaaaaaacaattttaagagtataaataataataatatgaactacttataatttaatttatggtcaaaagagtagtggagtaacttcgattgtagtagtgacatattaaacgatttaaggtgatgttttagtaaaataattattcatttaaaattatacacaattacaactatattttaaaagttttaactatacggttaaccgacggttttgatacggttacggttaattaacggttacagttagtatatttttttaaccgtaactaatctattttcacggttaacggttacggtcaggttacggtcagttaattaacggtccggttacgatccgaaatacggttacgattagattttggtcatgcgccttgagctcctctagaaaaatattgggcctactgggaatatggttaaagcccataagattccgtaacataacgtactacggaaaagaagaagtcaacgatttgatctgtgattgtttttctctcaatcaacttcaaaatttgttgattcaccatttttttccacagaaccaatccttctacaatgcctgtattcctctcttctcgttttctcttcttctgcatcatcgtccccttactcatctctatcactctctaccaactcgacacgtttgacccagctcatcatcccgctgactcactcatctcctctactgcttcaatcccgcctctaataaacgaaagatttctcaccggagctgagtttatcggagtcggtcttctcaatagccccgaagacatcgcctaccatgaagactctggtttcatctacactggttgcgttgatggatgggtcaaacgagtcaaggtcgccgagtcggttaatgactcactcgttgaagatttggtcaacaccggtggtagaccgctcggaatcgctttcggaatccacggcgaagtcatcgtcgctgacgcttacaaggtttgggttcgtgacttttttgaaatcgaagtttgaaaattttcaattaataggttggtttctgtctgggtagggactgttgaatataagcggtgacgggaagaagacggaattgttaacggaagaagcggacggcgttagatttaagctaccggatgcagttactgttgcagataacggcgttttgtatttcactgatggttcttataagtacaatctccatcagtttagttttgatatcttggaaggcaaaccacacggtcgtctcatgagctttgatcccaccacaaaagtgacacgtgtacttctcagagatctctactttgctaatggtgtctctctgtctcctgatcaaacccatctcgtcttctgcgaaacccccatgtctctctcacatttcatctctgtttcttttattttccatctgtgttcattgaatcctcatgatctcaagttgttattttgttgttctcagaagaagatgtagtaagtattacatcaatggagggcgcgtggagttatttattcaaggcttaccaggctatccagataacatccggtatgatggagatggacattactggattgcaatgccttcggtaactataaaaattgaaacccttcttagagtttattgagttggtttaggtctcggtcatattcagtatgtgtgtcatcttttatatcatcttttattgatcactattgtatcatcttttattgatcactatagttgaaaacagggagtaacaacgttgtggaagctttcaatgaaatacccattcttgaggaaaatcacagctatggcggctaagtacggctatgaacctatgtttatggagaatgcaggagttttgcaggtggatttggatgggaaccccatcgcatactaccatgatcaggcgctctctcacataaccaccggtgtcaagattgggaactatctctattgtggaagtctctggcattcacacattctccgacttgatctcctaaaataccctgcacaaaacaagaagctttgaaacttcatgtttataaaaaaaaaagacttttacattttaggagtattcactgtcacaaaatgtaaactcattgtcctgagaatgaatcatgatgtttctctatctctaaggatattagtaacctgaaacaatgaataccaaacgaaaaaaatacaatgaagacaaaccaaatcatacttaagatgcacaattcctaaacaaagcagatatttttctttgtttagaactcaaggcaacccattgtccatacaatattggccctactggtaacatagtaaaaccccacgagatttcgactaatagttggttacaacttacaagggactagagtcaaagattattatgagtcaacgatgatttgcgatttcatcattaaatacacgtgtttaatttagttgtttttctcttcaatcacaagttcacaactacaaaattggcatgttcaccatttttccacaaactcaaatttgctccaatgcctgtacttttctcctctcgttctctcatactctccattattgtccccttacttatatctatcgctctctacaaactcgacacattcgaccccgctattgttccttccgatgcattcacatcctctgctacttcactcccgccgcttataaacgacgaatttctcaccggagctgagtttatcggtgtcggtcttctcaatatacccgaagatatcgcctaccataaggaatctaatctcatctacactggttgtgttgatggatgggtgaaacgagtcaaggtcgccgactcggttaatgactcagtcgttgaggattgggtcaatactggtggtagaccgctcggaatcgcgttcggaatccacggcgaagtcattgtcgcagacgtacacaaggttggggttttgaaatcgaattttgaaaaatcacaatcttaggtttgactttgttgttatgtatagggactgttgaatataagcggtgacggaaagaagacggaattgttgacggacgaagcggacggtgtgaagtttaagctgacggatgcagttaccgttgcagataacggcgttttgtatttcacagatgcttcttacaagtacactctcaatcaattgagtttagacatgttagaagggaaaccttttggacgactcttgagctttgatcccaccacacgtgttacaaaagtacttctcaaagacctctacttcgctaatggcatcaccatctctcctgatcaaactcatctcatcttctgtgaaactccaatgtatgtgcattggatcagttaaattttttataaatttccgactcagtttgatttggcaataagttaatttatctatatctgttatatactactttaggaaaaggtgcagcaagtattacatcagtgaggagcgtgtggaggtattcactcaaagcttaccaggttatccagataacattcgttacgatggagatggacattactggattgcattgccttcggtaacgttacaaattgaatttcttttcttttctttgaggtcatgttattaactcattacatgctaataaaggatcatctttgtgttgtggttgtgcaaacagggagtcacgacattgtggaatatctcgttgaaataccctttcttgaggaaactcacagcaatggtggctaagtacggcgtggatcttatgtttatggagaatgcaggcgttttacaggtggatttggatggaaatcccatcgcgtactaccatgatccaaaactctctcacatagccacatgtgacaagattgggaaatatctctattgtggaagtctctcgcaatcacatatcctccgacttgatctcctgaaatatcctgcacagaacaagaaactttgaaatattatgttttcacaaataaggaaagtttccattttaggaaggagcattcactgtcacaaaaaatgtaaactcatttcctgagaatgaatgatgattgtatctcttttttttttttttttttgtctctctcgtagatttgtatcattgattccaaaagcatatactatctagcatgatgtgagtgttattgttcctttaattagactcgatacattcctttaattagacttggtcataattaaaggaataataacactctgtgatatatgaaaagcatataaatggtattaagtaagaatcgaacctgtgacctttaagaagttaagctggcttggaaaggtgtatgaggtggtcgtccactaattagattcagagagtcaggacttgatccaacgattaacgcaaaatcatttgcacgttctacgcaactccataatttcaattcctctcgacgtttcacggcgaagcttcagatctacttttccccagctcaggtgatcttttccatcttccatcatcttcgttcgctgttagagattatcttcttcttcgtcttcgtcttttcctttacgatttctgaatcttcttttgtctcttgtttgattttagtatggagacggttgattctcggaacaaattgcattcccggttacgtttatgggaattccccgatcagtacatcatcgagccagctgatggctcaggctcttcatgtttggatattagtcgtgttgatgcttccatgaagctcatcggttggttttttctgttcacaacattttgtttgattccgtttactggcaaatgcttgttatctcaatcctcttcccttgcgtatactgtgctcagatcaagtcccagaaagcaattccgtgcgtgtccctaaaatccgttccatttttggtgtggttgggatgttgaagctccttgcaggttagtaacaattatcatgtggaacaatactgtatatagatagagccttgtgtatgctgcaggtgtttctgctctatttccattttagatctgagacatattcgagagttttgattagattgcgtatttatttacttaaggatcatacttggtggttgtaactgagagtgaacgtgttggatcgtttctggggcatcctatattcaaagttacaacgcttaaggttcttccttgtgatcattcacttaaaaactcgcctgaagaacaggtaaattctgtggtgtccagttttctgtggaatatattggtagtaatgatggatctcaaaatctcaaagaattgtgtattatttccggcagaaaaagatggagaccgagttctccaagctcttaagtgtagcagaaaagacaactggtctctatttctcatatgaagttaacttaacattgaggtaaaatggtttatttctttccttgtgatgttttatgtttactcattgatgttgaaaattatgttgtattactgtactaaggcatgtacaaaccaatttagctataatagctgacattagtctgaatttcagtagttatttccttttagtttgatctttatttttgcgatttcagctcacaacgcttgcatgaaatgggtgatgagtctaagtcacttcctctgtggagacaggtgaccatataactacttctgggaagtttattaaacttccttggaagcgttcattagtttttccttgttgcaaactgaaaataacttctgctggtggttcgttctttttttacaggctgaaccgaggtttctttggaacaattacatgttggaagttctcatcgataataaggtgtgtatctttgaggtcctttaaatatatcacatccccttgttctgtacttgcagaatttcttaccctttctttcttatgttgtcttaaatttgcagcttgatcagttcttgcttccagtaattcaagggaatatcctttgttatcagttgtttcacttccttttcttctattttcgcttcatggttacgtttatttgtaaaataaatctttccttaaccctgattcacgctttaatagctttgaaacagccattggaagagatattgttgacattactctgattgctaggagatgcactaggagaaacggtacttgtctctatgtgcttttttttacccattattcttcgatttcaagttactcaatcttttttattgcattaaagcctagtgtgaatctgtaagtaggtcagtcatttgtttgactgttagaatctttctactagacatagcaagaaattcagatattgacagcacttgatgggacttgtttttaaaataggaaagcatgatgtttggcaccttaacttcagttgaaacttaattcttttagatagataagagagatatatgtccttgcctgctggaaatttaaatgctgagtattgtgttgtgaatgtgtcttctcccttatcctggatcgttttacaaggtacacgtatgtggagaagaggagcggatcttgatggctatgttgctaattttgtggagactgagcaaattgtacagatgaatgggtatacgtcatcatttgttcaggtagcttttcttacatgcttgcatattgtgaattcccttaatgctgcaaatctttggtcattttataattacctttttttttcatacaacttttctcgagactgagttatccacgattaaactcttaatgttattttgcttcctacatttgcaggtcagaggatccatgccttttatgtgggagcaggttgtagatctgacttacaagcccaagtttgaaattgtccaacctgaagaagctgtgagtactaatttctgactaattacctactcttttagtaatttatctatttctttcaagtaaattgcatagggtgcttttcttgtagaaacggatagctgagcgtcactttttggaccttaggaaaaaatatggatcagttttggcagttgatctcgttaacaaggtacaaattctttcaaattgacatgaatacttgtgtagttatgtgactcaagatgttgtacaggtcatgtttgtgagctcaccttggtctttaaattaattgcattgcataaatctactccaactttttattccttaatttctctaatcagcaaggcggtgaggggcgcttatgcgagaagtatgctactgttatgcaacacattactggggatgatataaggtagtcaatctgttcgtctaatgtgtttcttagacaacttgcttattgttttgcaactcattaaaggaggttccttatcctgtaggtacctgcactttgatttccatcaaatttgtgggcatattcattttgagcgcttatcaattctgtacgagcagatcgagggttttctcgaaaagaatgggtatgattctttgtacatttctatttatgtaatcttgaaatctgaataattataaataaaaaatggcacgtcattttgcattctctgaaatacgcaggtactttctgttgaatgaaaagggtgagaaaatgaaggagcagcttggtgttgtccgatcaaactgcatagattgcttagaccgtacaaatgttacccaggttagccataagaaaactatgatgcagctaatatcatattggcctttgctcatccatgctgcatacttcctgccaaatgcagagcatgataggtcgaaagatgttagaagttcaactcaaaaggattggagtttttggcgctgaagaaaccataagctcacatctgaattttgacgaacactataaaatatgtcagtctcttacctttgtaggaaatctattgtagaacttagatgtaaaattccgaatttattcatgttgcttatgtgctttcgcctttcagtatgggctaatcatggtgatgaaatcagcattcagtactctggtactcctgcacttaaaggagatttcgttaggtacttttgccatatgtttaatcttgggtctgaataagtcctggctataaagcaatataagggagtgttttgtagattactctacattgcaatctaatgcgtctctaaccggctcaattgtaggtatgggcatcggactgcccatggtgtccttaaagatggttggagctccctcagacgctattacctgaataactttgctgatggaactaagcaggtcagtgaattttcattctcagtaactctagttgtatcatctaataatgttcagttgcaactgtgtgcgactacttttggtgtcacttacccctgtaactggaatgtgtcctgacgcaagttaatatggctatgtgcaataggatgcaattgatctcttgcaagggcactacatagttgctgtgagccgagacatggctcctgtacctcaaaagggaggccttgaggctgtagccgtaagcatttatcaattaagattagaactaatttccactatattagcatacaaagaattctagtcttataacaatgtaaatttcatgtctcagaacttcccagtggcattgttcgtggttctgatgagtttctggtttgcaacaatgtctctaaaacaaagtaagtatggtatttcttttgctggatagttaagattttctttcaaacttaatctgaaactgtgtaaaatttgctgagcagctgggagtgattataagcataagcacttgttcttctcattgttgtggacgggaatttgcgtgggcatggctgcactggtgagggccaatggcaggatcttctgtaaccgacctcgtctgcacaagcccagaggctgattcatttcgtgagatcaattaattaaagacatggaactcaagtcggagacaaaagttttctcccttcgattgttttattttattgtatcaaaattggaccttgtgacaccatctagaggcaattgtctcaggtttggatccctcatgatttaatactcccacagccatcaaatgactcgatacagttacacatctttcttcatgttcattctatgattactcggtccgacaaatggctttctaaatccctacttcttgttgagtgattccattgtagaattcatcatgaggcatgatagaccaatggcagacaaaggaagtgcatgttctaggttgtttagccataacctatgcgcatctttgttattcaggctcagtccctagatggtcaatcgttatattagtgttaggatccattattttgtggcagatgcacatctaccctctgttaaatcttttctacggttgtttctgagagattgtgctccattgttgcttgatcattttttggatatttggtaaggattcaaacaaaccaaaaagaggcctcacaagttcaagaagcagttcaatgaggcatttttaaattatgaaaccaaatattaatcatttaaatatggttaagatctacagtacaaaaaatggaatcaatcaaaacttggaaaaaccagagaaaaaagcacacaaccttgaatatctctctgactttcctatcaaaagaggaaacaaaaaaagaataaagtaactcttcttacctttttccaacttgctctcagttccttcacaactcgttcaaaacacctttgaggagatccaatccctctgcagagatgctcctcctcttatgcgacttgggaatctcaatccgaggaggcgcttcgggcgagaaacagacaaccactacagtaagattgtcacagctgtttcgttgaagagcctccttaaccaaagcttgagagcatctctcaggatcattatgctgcatcagctccctcctcaccatcgtcactgcacactggctactcatcacatcccagagtccatcacagcccattataagatactcatcctcttccgtcagcacaatctcttccagctcaggctcgcagctgagcgggcagagtgaacctttagttcccttaatgtgccaatctcctaaggctcgagccacagatagctgcccgttaaggtaaccatcgtagatcacacctccaagcttctcaatacgtagccgctcggaagtacagttaggtttgtggtcctttgataactcaatggctctgcctcgtttcccaagcaccgctctggagtcaccagcgtttgcaatcaacatagtcttgtccaaaatgagagcagtgagtgcagtagtgccagaggatctatcaagagaagaagcatcagccaaagcatgatcagtcttcacaaaagcactccttgttgccttctttgtgctggttgggaaatgtttgtcttccattacaagcttcataatgttcttttttgtgaatgatgcagcatcaacacctccgtgtccatcaaacaccttcataaacaaacaatcattttaaaaaagagaacttttttgaaatattcgatgaagcaaatcttatataccccatagaaagctccagtggatgatccaatatactcagtgagatcatcaacacaaatgaattcatcttccattgattgttttggtcctttatcagaccaacttccagatctaaacacaggctggaatgttgaatttactccttccggagattttgcaccaaatctctcatctccttcctgcaaacaaatcattttcacattgtaagtttcaaactttggattgtttttgagtcacgagatccgatctaagctacattatcttatctgttcgtgaccgtgcaattacaatcacaagcatttgaatttaaaaaaaaaaaaaagcaaagaagagatgaaccaacgtaatcggtcaaccaggcagtgctgttgcaatggcgcattgcagagatgtttcttggaggtttcccagaggaactgagattcgtcattttgtcatctgcgacttccaatgtgttgatcatcggagaaacttcagtcaccggtgccatttccagattccgatcaaaagctttctttttttgtcagagtcatctcttttaaattataaaaatagcttctttcttcttcttcctccttattttactcaccaatcagctctctggatgccacgtgtgcttccaatctccatattttttttttagtttgaatataaaagagaattaaatcttttattagtttcccattagcgaaagatgaagattgtgtctgggttttactctcaagcaaacccatttctttttggtggtgtcgtcggagtctttgtatcattttacttagagaaccctaatggtacattttttcatttctgctccgatttttgttggtttgtttgttgctatctactttacagaaaatgacaacatttttgtgaatttcggtctctatagtgctacaattagccattaaacaattgcaaaagctcgcatttgtaggggtattagatagcaaaaaaagtgttgacttgagatgtttgtttatgcgcactaactcgattgtgtaaaagctgagttttttttcaagtatctatcatctgagtggtctttttggtatttgaaggagcttctgattttgatgtggaagtaatcatatgagattgatagtaagttggggagatatgaattgatggttccactgagacacaaggatatgagtgagtgagagttgaatctgtgaacgagttatggactgtatgcttatgacactgtatggctgcttgcttacgccattgatgattttgagagcatcttacaggttgacagaatcggcttaaccgctaggataaagtttactagagacaggaaccttgtaaatccagcttttgatttgcttaatgtcattggcactggttacaggaccattggttactggtataataatttaggcttgtctgtgacgccgactgacgagctggagaacacatccttttcgggacagaagcttcatagtgttgtctggccatgacagaatttgaacaatggaaggcatttgaggagtggagttccaaatcgttccgaagaggttgtctcagtcaaaagcaacgggatgatctctggcttctgtgttgatgttttcattgctgctctcaacttattaccttatgcagtcccgtttgagcttttagcttttgggagtggtcatgacaatccaagcaactctgagctagtgcgcttgataaggactggggtgagtacataagcactcttttagaacttgttttgatgatccctctgttagcataactcaataataagtatacctctttgttgatcaaaactctgtttgtaaaatagtaaatcatttcgattaatgaatatttaaagtttaatattttattagtttctcttcttctttttgtcactttcatcttcctcagtcctcacgcttgtacatattatacagtagacaaaagcttgaacgaaatatgaaggttgtgtctggctttttgatcaacctttgaatcaatttccaaaacccttaaggtatacacttttttttatctcggtctctatggaaaagctttgattttgtgaatctgggtttctttctttctacatttagccaattatcactttttagggtatagaaagccaaaaaaggtgttcacttgagagtttctttttgcgcactaacttgattgcgtgaaagctgagatttttcatctgagtggtatgtttagtatttgaaggagcttctcactgtgatgtggaagtaatcatatgagattagaagtgggttgggggaaatatgaaggatttgagtgagtgagagttgaatctgtgagtaccattacataaagaagatctccactttacacctactataatgggcactcaattacttcctccaccattgcctcatgcttagtgagagaaagtgacaggtcaagcatctttcttccctcaaacattctatatctgctcgtaatggtggctaaattcagtgacttgaccttcctctcttttttactttgtgaaacaggaatctcctgaaattgagaagatgaagtggtttctgcttatgctcatcatctgcaatgctgttcctttacaaggactcaccaaaattgtctctgcgagaccccaagttgtgaacatcggttcggttttcacatttaattctctcattggtaaagtcatcaaagttgctatggatgctgctgttgaagacgtcaatgctagccccagcattcttaacaccactacacttaggatcatcatgcatgacaccaaatacaatggattcatgagcatcatggaacgtaagtgagacaactctgtgattattggatgattattatgtgtttgtctgtcgaggttcaatcatttcctttttatgttttgctcacggattattcgaaaggtctctactcctctggtcttctttacctttgaatcaactttttatgctcgctgattcattttcatgtcttggattgttctgctatctactttaggttatgatactgcaacatgcaagtatactcatgtccatattctggtatccggttaactgactgattgttttatgtatcatattaaaagctctgcagttcatggaatctgagacagtggccataattggccctcagagatctacgaccgcccgtgtagtagctcatgttgcaacagaactaaaaattcctatactatccttctctgccacagaccctactatgtctcctctgcagttccctttcttcatcagaacttcacaaaatgatctctttcagatggccgccatagcagatattgttcaattctatggttggagagaggtggtagcaatatacggcgatgatgattatggccgaaatggggtagctgccttgggagacaggttatcagagaagcgctgcagaatctcatacaaagcagctttgccccccgcacctaccagagagaatatcaccgatttgctgattaaggtagctttgagtgagtcaaggattatcgtcgttcacgcttctttcatctggggcctagagttgttcaatgtggctcggaatcttggtatgatgagcactggttatgtgtggattgctaccaactggctttctacaattatagacacagactctcctctcccattggacaccataaataacattcaaggggtcattacactgcgcctgcacactcccaactctatcatgaagcagaacttcgttcaaaggtggcataacttaactcatgttggacttagcacttatgcactgtatgcttatgacactgtctggctgcttgctcaggcgattgatgatttcttcaaaaaaggtggaaacgtttccttttcgaagaatccgattatatctgagcttgggggtggaaacttgcaccttgatgctctgaaagtctttgatggaggaaagatatttcttgagagcatcttacaggttgatagaattggcttaaccggtaggatgaagtttactagtgacagaaaccttgtaaatccagcatttgatgtgcttaatgtcattggcactggttacacgactattggttactggtttaatcattcaggcttgtctgtgatgccggctgacgagatggagaacacatctttttcgggacagaagcttcatagtgttgtctggccaggacattcaataaaaataccacgtggctgggtgttctcgaacaatggaaggcatttgaggattggagttccaaatcgttacaggttcgaagaggtagtctcagttaaaagcaatgggatgatcactggcttctgtgtggatgtcttcattgccgctattaacttattaccttacgcagtcccatttgagcttgtagcttttgggaatggtcatgacaacccaagtaactctgagcttgtgcgcttgataacgactggggtgagtacataagcactcttttagaacctgttctgttgatggctctgttggtgggtgtgtatttgacatattttgtggctcaaaaatctttttcacaggtctatgatgcaggtgttggtgatatcaccatcataacagagagaaccaaaatggcagattttactcagccgtatgtggagtcagggctagtggtggtggctcctgttcggaagttgggctccagtgctatggcgttcttgaggccgttcacaccccagatgtggcttattgcagctgcgtctttcctcatagtcggtgctgtcatttggtgtcttgagcacaaacacaatgacgagtttcgaggccctcctcgtagacaagtgatcactactttctggtgaaaacataataagctccaactggatgaacgtaattccaaacactacaattttttctctgaaatatgtcgttgtttacttgtcttgcaggtttagcttttcaactcttttcttctctcatagtaagtgtactgcccacaccccctattctatcttaagttgttttccatttttaaattggtttccaattttctctgctgaatttatacaggagagactaccaccagcaacctaggaagaatagtgctgataatatggctattcgtagttctcataattaactctagttataccgcaagcctcacgtcaatcctcacagttcatcagctgtcttcaccaattaaaggcatagaaactttgcaaacaaaccatgatcctattgggtatccacaaggctcctttgtcagagactatctgatccacgaactcaatatccatgtgtcaagacttgtccctctccggtctccagaggaatatgataaggccttgagagatggtcctgggaaaggtggtgttgcggctgttgttgatgaacgtgcttacatagagcttttcctctcaaacagatgtgagttcggcatagttggtcaagagttcacgaaaaacggatggggatttgtgagtattgttctgaatataaacaactccctacttgtttgatgatagataattaaggaagaaacatcaggaagttcttccatgcataactttttagaatttgataatgcgatagtgatttatgatatgtattttttctctcccactgttcaggcatttccgcgtaactcgccattggctgtggacgtctccgctgcaattttgcagctatcagaaaatggagatatgcagagaattcgggacaaatggttgcttagaaaagcttgctctctgcaaggcgcagagatagaagtggataggctggagcttaagagcttttggggattatttgtggtgtgtggagtggcatgtgttcttgctcttgcagtgtatacagtgttgatgatacgtcagtttggacagcaatgccctgaagaagcagaagggtcgatcaggagaagaagctcaccatccgcgcgtatccactcctttctctcctttgtaaaagagaaagaagaagacgccaaggctaggtcctctagggaaaggcagcttgaagatatctctgcaaatggttcaagtcgctgcaactaaagtatttccagcaaattagttgcaccaaagagacctcataatggctctagtatgtacatatccctctttgttgttacactgtttgtatttaatctcctggtgatttgacttgtacaacaaaaaaataaaaatttggttaatgtctagatctcatctcatggttacaaatgtgaagaactcccaatttgcagctacaacaccaagaatccaggaaagctttatacagcctgaagaagcatgctagaagaccaaacaaatggtatggatttgttattattaatgttctcaacttcaaatacagcaggaatgttgaaaaagacagcagagaatagaaagtcatccatcagagagaaatgaagctgcagcgtcttgctgttttgcaccgacggagaagaactcagagataacttcaaggggcattccctttgtctctggtaccttgaggtacacaaaaacccacgcgacagcacagacgattgcataaatgccaaagactcctgcgatgccaatggatttgagcatgactgggagagtgtaagtgacgattatgtcacagatccagaaagtgagggcacatatggtgatgcagagaccgcgcacagaagtagggaatatctctgagcagaggatgtttggaattgccccaaaacccatcacgaaacagcttaggtacaccgtaacacttgctgtcgatatcaacgcgtttattgaacctccaagattcactaagcttcctatcaccagtgttaccagcgacagtattagaatggggatagtcgaaagcatcagagacctgcaatcacgcttctggtattgttactctttcaaattataccattcagctataaaaaaagagaagggaaagcagagaaaactcgccttctgccagttacatccattaacctcatggagacaagaatgcagggaagcatcaagagtgtggttaaggcgcttatgagaagcgatgcagactctgcacttattccaaggtttgtcaaaagacttgacacacctgtttcttccaatatttgaggtgtataatacatcactccatttattcctgcaaactgcaaacatgcttcttttccgttatttacttccttatttgttttgtctctttactacagacaaagatctgggaaaaaaacattacctgttgcagtatctgaagcccaactccaaccatcaaagctctcttaacccctggttctttcagctccctccagcctggaccatccttaacctcctttggcaacattgcggtctcgcctttacctcctggcatcatcgaagcttggctcacaagtgcagcagcctgaacgtatccattcacctgatcatgaccatcaccctctgggtggaaggagagaagtgatccacgtcgcgaaaaaggaatgttgttggtgttgttgttggcggtttcctcgtgaatatacattctctgtaaccctccattgactctcttaccatctgcaccaaccttgtcattatacttccacgccaattgccatccaccgcctatgcttgtagccgtcgctgtctcacccacgtttgccataaacaagctgctctgtcgcctatgcatggtaccaacggtccgctggtggtagtcatccggctcagtggtttgcggagaaagcagaggactgtttaagttttcatcttggtcagaactatcttcattgtttctctctggatcccactgggactcctgccttcccatcattcccagtatacttcccatattggggaagagcatgctgcgggatgatgcgttcatgttctcggaagggagattctcatgaatgctaccaaagagagtgacaagtgggtccatgagggatccgccacgcggtaacatgctgccttgtcgggaagccaatgcgagagaactctgtcctttcactggcttagccatccatgactgtccatcctctggaccatatagttttatctgatctttcctcggcagttcatttccaccctcgttttcctcgttgtctggtccaatcacatattcttctatcgacgtgtcttttcccaccccaagcccttcaaccagcagagcaagctcgcctaaatcataccccgagttagtataagttcaaagatcgataatctagaggtcttagtgttcatcaagacaaacctgaaacatcttctctgccacggagtctctgcagaacctgtctagcttcatccatacggcctttgctgacaagccaccttggagattcaggcaagaagaaagccgcaagtacaaagtaggcaatggacggaattgacaaaacaccaagcatcagcctccagcttggtgattcttgaagcgacatcccaaacacaagacaatacgacaaaaacatcccaccggatccacaaaactgcgggaaagtgttgagtaatcctctgatctcagaaggtgcggtctcagagatgtagattgggacgagagtgacagctaaaccgatcccaaaaccatcaagaagccttgcgaaaaggagaacgtagacattgggagaccaaaacataacaatgctactcagaaaatagagaacagaggagagtataagcattgatcgccttcctactttgtcagagacaggaccagagaaagttgtgatcaaagtggctccaatgagagacattgccacgatcagtccttctatctttggttctttctccaaatgaaattctttcttaatgtaaattacagctcctgccaccaagaatcaacatcaaatcatagtgagatttcgttagtatgcaaaggaaaaagaaagagaaatatagaaagagagatacctgcaatggtggcattgtcccagccctgcaacatattccctatcgcagcggctaaagcaacaagcactacactcctcatctttttctcttttacagtgattttactttccacgaatcaataattctgttgatagaacatcatatgtttctttcccttctgcaatgtcccagattcatttcacaaaccaaaaaaacgagttgttaaagatattttagtgattaatcaaagcatgtagcagtttgagaagtggtaataacggtaggagagtgaaaaagagttggtcaagcagagagatataaggagaaagtgacattgttattttgaccgattcttaagtcttttatataatggaattacctgataaacaaaacaaaaaggaaatattacaacaactacttaaccatatgaggatcacatttcttcttaatcacacaaatgtctaaatacagttgagtttggaaacctctagtcggtccagagtgtcttacgcttttggacctttggtcagccaattattgcaatctttaaaatcagaccggacattaaaaccggtataatgtctaagcccctttaacggggttttacggtttgaagtcaatgtcggttctacactaaaaatcataaaagccaaaccgaactcaatcttcttcccgcaacttcataatctgctttcccaattctctctcgtcggcgaaggtcctgtgaaaccctagacaaatcgcaggtaagttcgactgtagaaatacacactgatatctcaatttatgttctattctctgcttttgaattgagaccatcgaattccattgtttctctgatgcttttttaatctcacaaaattgttaattttgatgatctttgagcagagatgcaagattcaaagattccacctttctctgaagcaaaaagaatgaagattcctactccaaaacaacccttgactcaactaccaccacgtatcgggaaaaaagtttcaaatcggagcaaatcgaaccaggttcatgcgatttcacatcaacttgagatgtctccaaattcagattcatctccaggaaacgagtacagagcactgagacgcaagtatttgctgctagaggaagatagtttcgcgttggagagagagttaaaggaagcagaggatgaggttaaagcacttgaagatgagaaacttgagctcttggacaaactcgttgttatggaaggtttagttgatccttgattctatagcttagcacttgttttatttgccacattcatatgtaaaaaatcgccttatctagtaacattgtttctgcttatataacttataagcttttgttgtgtgttgagagaattggagatggtaaagaaaactgttgtgttcacttgttgtgtctttcgagttaatacaatggtttgggagtaaagacttaaacttgctacagtttttactagattctagtgctaaatttaaccaaaactgtgaccaaatgtcgtttatttgcaccacgtgtccttcatccacaacagaatgatgatggattagatatttctattcaaaaactataacgtgtggctgcaaatcgattcaccgcttcagactctgttttagaccaaagtcgagtgagtgctttcatcttcttcttaagcatctatggccgcgtctctaacatctcttccgaccggtttttgtcttagccatggtgatgaatgttgcaaccgttcacctaccaaatcaccatttccaggccatcatcctctggctgggaggaggaagggtcacttgctccattacgaacgtagtacagtgaggagattggttgtgacggcggcgacggagggatctaaaaaatctaaagaaagtgaaccgtcttgggcgaatcctgactcagatgagccacctccttgggctagaaacgaaggtcgttcttctacgtcccaagagagctttgaggttcctttctttgtttatctgctagcttccgcgattactgccattgctgctgtatgcttcttcttctctctctttcactccttttgttgtttgcattgctgattctcatatcaaagatgttatcttaattatgcatcgtttggtcactgtagattggttctgttttcgagtacacaagcaagaatccagttttcgggatcttggaatctgacagcatcttttatactcctgtgcttggattctttgctcttactggaatccccacttctgtgagttccttgtctctctcttttcgtttttatccatttgatctgtatcagctgaaaaaatggtttttttgcgttcaggtgttcctatggttcaaatccgttgaagctgctaataaggaagctcaagaacaagataaaagagatggctttctttaaaatccttttgtgtgattctgcaactcatacagtgatgattgttgtctccacatatactttgaatataattctgcatttacaaaggagcttgcttctgttcactgtttatcacccgctagattttgtttgtaatttcaacaatatgccatgttccaacgagtaagtgcctgaaattcgatgatcagctgtcctctcttttatttgcccctgtgaaagatatgaatccacaaagaattcgatatgccatcctgcggtttgaatgtctgaagctgatggtaatgtcaccatttgttcaatgagttgatattcagatcaacaatttgttctggaaagacattgcctgctttcatttgttggtaggagattggagtcaaaatatcagttgaaagttaattccttggcgcttgaagattgtgcttgagcagaggctgtttccggggaatgatcacatacaaaatcatgtgtttaattggtttgtctatgaatgtattttcagttgaatataagtcgagctctaggctcaatttagcagccagaagtgatacctttggaaggaagatatctaattggtaagcaaaaactgttaaaagcacttacatacagataaatcaatgtcctttggcccaatattagctttaacaaaggcttaaccttttgaaaactccagttaggcaataattattacgggtcaaatgacaaagaatgaaccttgtcgggctctttaaagatgggttgttgtataaaaagttgggtagttaaaagattggttatttgggctctgcactcaagtgagagagaagatagatagatctgagtagaatcttcgattcattattcgttgtcgtcgttcatctgtgagaagcggacaaaccaaagaatccaccggagctagtgatatgggtggttccagagagttccgagctgaggaacattcaaatcaattccactctatcatcgccatggccatctggcttggcgccattcacttcaacgtcgctcttgttctctgttctctcattttccttcctccttctctatctctcatgtatatacatctctctctctatctctctctgtttgctgttacaagtctcaaatttaaactctttgaaatcctctgtttttctcagggtcttgggcttgctctctctgtttatctttatcccaatcgatcatcgtagcaaatatggtcgtaagctcgctaggtacatatgcaagcacgcgtgtaattatttccccgtctctctgtacgtcgaggattacgaagctttccagcctaatcgtgcctatggttagtcacaatctccttcttactccaaagtatcaaactttaagatgggtttgtgatatcgttgacttttttaacttgtgattacagtctttggttatgaaccacattcggtgctaccgattggagttgttgctctttgtgatctcacagggtttatgcctattcctaacattaaagttcttgcaagtagtgctgtgagttcattgctgcttaatctctttgtgtagtatcttaaccttcttgtccgcaaactcattgttttgcaaatttgattttagatattctacactccctttctaaggcatatatggacatggttagggctcaccgctgcttctaggaagaatttcacttcccttttggattctggctacagttgtgttcttgtacctggtggtgtgcaggagacttttcatatgcaacatgatgctgaggtagctttattgtagctcaattagtagcattcacttttgctttcatgaaatcattttcttatgagggatttggattacttagaaagcttcaagatttccgtttggtatctcatgtatgtgtagcttgtaaactgaagagaaaagggtttgtttctcctgcaacagtctgatgatttccttattgaactgtatctcacattgcagaatgtcttcctttcaaggagaagaggatttgtgcgcatagccatggaacaggggagccctctggttccagtattctgctttggtcaggtaggggaaaagagttgctcacaaagtgttatgctctatgtagttgtctttatgtacctgaaactctcaaactaatcagttggtcagaaacgtgattcgaattttgtaccgtttctgcattccagttttacgtttcatatgtgcgtttcttttgcaggcacgcgtgtacaaatggtggaagccggattgtgatctctatcttaaactatctagagcaatcagattcaccccgatctgcttctggggagtttttgggtaagcgtatacctttttttgggtcacttccatttgtgtacacttttgcctgcaagatcttgaaagaggtaaactactcccatttcttttctagatcaccattaccgtgtcgacagcctatgcatgtggtcgttggtaaaccaatagaagtcacaaaaactctgaagccaactgacgaagaggttagtcttcttcttgttttcatagcttctgcttagaatgggattgtgctactagacgttactatgcacaatgcttacttgtgagttcagcattcattaacttatgatgttttgggcatctcagattgctaagtttcatggccagtatgtggaagcgcttagggatctgtttgagaggcacaagtcccgagtcggctatgatcttgagctgaaaattctttgaacaaaatctccaatggaaataattacttgtgtgtatccttcattaattgttaccttggagctggatttggacttaatataaatgactacatcatgtagtctacatgtattgcatgtctttagcatcgactgttgaagtaatggaatacgtttataaagcctgtaaattacatgtcgtcttgcacaagagtatgtggtaataataacatttgacccaaaaataatactagttaaatttttccttgacttctctgacaaaccaaactaatttgttcatgaatctctctaagcaaatgaaagtaacaccacgtagtaaaagctctgcttgatgagaaggattcttacacatataagatcattcgaattcaaaaacaaggtggcatgaattggaagtcatgaccacaccatccaattcctcgcgcatcttacgtcttttggccaatttacagagcctcttcgcttcaatgggatccgtagagaaagttgccttcttcagctgtcttgcgttccttagaatgtacgtcgccacttctttctcttcttctcttccccaattgcaatttctccacataaacgtttcgagacattcagggacatactttggttgattccatttcccttggtccttgtattttttgtcgaattctagattttcatgacgagtctcacgctaccaaaagggaaatgaaatgtatattagaattagtccttcaaaactaaccccaacgagagaccatcaacaatagctagctaactaataatgaaatgtcttacatcaatgagcttgaggacttgtagtttaggagagctatcaagcatgtgcgtaagtagattccaccactccactttatgtgtatgcatctccagatataccagctgatggtacataacttcagtaggatatgtaatctattcatgagacaactattagtatatacagaaacaacaaacaagtcaagtgcgataaaagcgaagttaccttcaaaggtgataagtccaaggaaagacgtttggctgacttgagagatcccaaaatattctcattgactatcttagaaacgtttctaatatttgcctcaactagctcggttacattctcaatcagaaaatactcaaaaccttctacactttcaattcccaagtacttcaaagaaggagcttttatcacatatcccctactactctctcgcgcactaaagggatcggaaagcaaaagtgtcttcaaagatggcgcatcaatgatgaaattcactacagcatcaaagaagaaacctcgacgcaggaccaaatgttcaagattagggcagctagcaaaaagattatgaccagattcatcgcctttgtagaccacagatagaaggtgaagagttctaagggacttcatagaaaccggacaaggaacataaatataaacgtaatcaagtttcaaggtctcaagtgtatcaaagcaaaacaagctagttggaaatctgactcgagggccatggtaagaactaagatcgagtacgaactcacgaacatggcgtgtaaatgcaattgtagcccatactccaacataaacaccatcaaattgatctccaactttcagatgcaaactctctagaactggagctttatgtgaaagcaaagacctggtaacgttttcagcaaagtcatatatgtttcgagaagattcaaactcgagtctttgtaccattttccaaagagatagccatcgtttggacaaaacacttgtggatatgacaagttttgtaggaagtgaagacagtatctgcagaagcaaaacttcaggcaactcactgattctgtcctcactcataaaacctggctttctcgaacttttgccactaaaataaaattaagaattagggtttcggaggttagattattaaagaacagttcaaagaggatgcagagaaaagaaacaaacccttgttccatcaatggctttgctgcagaaaatctttcagaatttttcattccccaagttggttcccagtgatatcgtaatgcaaacactccaaacgcaataacgatcaaaactgaacctgttgtgagagagacatacgacgacggcgatatgactagagaagaacgattaaaaaaatttggagacggatgacgacaactgttgagaaaattagggatccatttttaattgtaaaccggttttgttaaggtggaatttttaaaccgaaccgaatctaacacgatcagccaaccatggttactttccggttggtttttaaatccagctctagaataaatgataccgacccggtttaataagtagtgatttgaaatatagaccccttaaacagattttcgtttggttacaaattttttttaacacgaaagcttcaacagagaatcagaagctattttcttcggaattgaatataattgtaaccttttggcatctttgtgaaataaatccgcggtatagttgtatttttgaaaaattggtaaacagaaattggccgaatcaaagcaaaccgaataaattagattatcaaataaatgtaacacacacatgtagataactactttatttccgtgcagcatatattgtgacacgtctatttacacgtcataatataatcagctaatcttaagtttctatgttcacattatcttcctctcatgctttataaaaaatggaagaaaatgacatgaaaaccaaaaccacacgggaatggaaaatgcctttgttttattttatttaaccaaattttgaaacattctctatctctatctctcttttgtctttatatgacttctgttttatttccctgttctttgatcgtgtgtttttaaaccgtcgatgagtgatcggagtctgaaaaagtctctccccggtaaaagcaatcgccaggcggatgagaatttggatctcttctcagtcaaccgtggaacttctttggatggtatcatcatctattatttggtccatttgacttatcttttgcttttctacaccaacacacattgttattgttcttccagttgtgtttagattgctatcacgttttgcattctaagatcgctttcatgctattctcatttcaatttgctagttttttttgccaatctttgtatacaataattcgtcttccaataagtcatccatattaatgtgatctagcatgttgatctatatggtatgcagttttgattaaaccaggaagacattctttccaacaagctaaagttgctaagcatggacctgatgatgacaataatcacaatatacatgcaaatgaaccgtaagaatttatgtaatccctcatttgaatttatacgcaataataaacctgaaatagacaatgcaaacaagttattataatttataatctttgttccttaggctttataccattgcagaagttccattaggagatctttctagattggttctagaagctagaaacacaacttccaagcttcagtccataaccactacaagggttcctttaagggtatgatgcaacaagctcgctataatttcatgtatcatatatgctcatgtaatatttttatattttttcatgtagagcgagagtgatccatcttcaagaccaacgagaagcggttcaacaattcgtccctccaacattcccactatcagatcctcttcggtccccaagaagacaacaacaacacaaattcaagcttcagcttcggtttcttctccaaaaagaactgtctctcgatctttgactccctcatcacgcaaaacaccatcaccaacctcaactccttcaagaatcagtacaactacttcaaccactccttccttcaaaacagctggagatgctcaaagatcaagatcgttgactccaagagcaaagcctcagattgcagcaaatgcaagtagtaggaccaatgtgcgttcttcgtctgtaacatcacgtcctgatagaagcacaacagtttcagcaacacctcggacaccgccaagactaaaagaaacagtcactctagcgtttggtagaccagtgggtcatgttaactcgccaaaacgaaacacctcaccggatgttacaagaacgaggcctaaaggacgctctgcttctccttctctgattccgactttttcaggcacctcacatacaacaacaactcccaagtctataaagccatctgccactgttgccgattcaactaggccaggaaggaagttgtcaagagcttctgttcaaatggctatcaatcacttggtaataacgttctcttgtcattatttgattatagctaaatatttttgtcatttataacgtttatcgtggtcaatagtatagtaacgttttttatgaggttttgcttgacgataatagtgtcacttcaaatgcaggacttggcacgaaatggtaaagttagtacacatacgttttcaagcccaatgttgtatccacacagcatcagatcttcttcttcgggtctaagaaaaccgtgtggtagtagtgaaggcagctgcagcagcagcaaccatgaagaggaagatggaagaagcttaacgaaagaagggaacaacacagagaacaagaacgatagtgctcgttacgacgcactcttgaatgttaaagatgtcaaggatacaaactggctacttaacattgatgatgaatctcctcaatctctcatcttcgacaatgcttttgactctcctcctgatctattctctcctctctgagactctgactccttttgagttttctttcctgtttgttgtagttaaaaacaagagagctgcttggaaaaataatcctgtttcactctttttaaattcttatgcaatcaagagaaaaacattacacatagttcttctactcgttgtttttttctttcaaagtgtttgtttgtattgatcagcagaaatatacaactttgacccttcttgtttaaatcaaaatatttgcaagaaaagacactattggtaggattccgttaaaatgcgtctatatagtaaaacagagaagtgattgatgtacttccgtttatgttcataagagtacgactttgtaataaatgggtactagtttgttcataagagtacgacgtgtaatagagtaaagatgcaacaattaccaaaaacgttatagataacaaaccaaatagtacattgacgcgattcatgtttaatgtttttgtagaaagaagaaaaaaaaatacattattttttacactctccatcgtggcatcaaatacacaaatccaaaattctaaataaataacagcaaagagaataataataaatagttaagaggaaaaaaaatataaaaaagagaaacgaaccggtctcctttggatggagccggtttagaaaggtagtagtgttgtaccgtgttataagacttctctaacgtccctttggattcatgatctgagaaaacacagcacttggagtgagtccatctgaatcttcgctggccaaactcctaccaccgatgctcatatctattccactgctcctcgagtccgtcacattcccttcatacacatcagaactcttgtcgttctttcctttacagtttccatcatcgtacttaatctcatccatgtccatgtcaccgcatactccttttccgttctcttctgcgctttcctggagctgcaacgcaaattctaagttccacagaacatctcccattgatggtctctcaatgccctggtctagaacacacttcatcgcggtttcagcaaactttttgaagcattctggtgtgatcttgcccttgaggtagggatcaacgatttgatctagcatgcctttcttgtagcagtatggtgcccactcagctaagctcacttgttcctttgcaagtgttgggttcaaggctggacgagcgcatagagcttcgaatagaacaacgccaaaggagtagacatcggatttctcagtcagttgctgccgtctgaaatactctgggtcaagataaccgaaacttcctttcacaactgtgcttacgtgtgtgtggtctagtgtaggaccagtcttcgatagaccaaaatcagagaccttggccacccatttctcatccaatagaatgtttgttgtcttcacatctctatggatgattgtgtgttttgcaccagtgtgtagatagtgtaaacctcgggctgctccaatgcatatctcaagacgttgcttccatggaagagaaggattctgggttttgtagagatgctccctcattgtaccatgagccatgtaatcatagactaagatcatttcgcagttctcttcacagtatccaatcaaggacacaagatgacgatgtctaagctttgaaagcatttcaatctcagtctggaactcatgtacaccttgctcggacattgggttgcctctcttgatggctacctttgtagttccgccatcaatctctcctctgtaaaccttgccgaaaccaccaacaccaagcacccgggactcatcaaagtttttagtggcagctttgatctcagcaaacgagaagtgacggcaaagatttgacggaagggacgaggcataacttcctgttgtgtttgtcttcgccgagccagcagaatgtgagtttccatacagagatagtggaagccaccctgatgttgcatcactagcaggctggtaatcaccacgcttacgtctgcggtaagcaccaaacacacaaaacccaatgataagggccagaacaactgcaccactggctgcgcctgcaataatagccgtattgcttttcgatttcctagtagtcgggcgtaggactttagatggatcagcagtcacctgtggaccaggtataggattggtaccagccagattaccatcagaagtattcatcttgaatatctccactccattaagaagagaatcataatactccggcttgttaactgggttaggatgaagagcaagccacaaatcttgctgtccatttccctctggaggattcaccacgtaatccttgtgaaacggaaccccgtttgaactagtccaagcaatcacatcagcttcaggctcagcagtttgattgttgaggtagattgtaaacacccgttggttgatcttagtgatattcgaagaaacctcacagaaatgaagtctaacaaggtaagtgaaaccagagtcaatgctgaaaatccaagtaagattgtagttgagattgatctgagctgttggacccatagacctcgcggttgaataaacatccacaggagcaacataagtaggagtccccgtaggatacttaatcgtcatgttgggatcagcagtctctggaataccaagtcctgcaccaaatatataaggctgatcatcataccacgacctatacaaacccgtatccgcggaaggcgagatatcattccctccaacattgagcctatacacattctcaagagcagtactgttatcaatagtaacagagccagatgatccaaccatagtcaaagtcccatcagtactactatacatatcaggcattgaagtaacctcaatcccattaacaaacgcatacgcattagacggagctgattccggtgtaaacgtcatgttcaacgttccaccttcaacgttgacaacaaactctttgatgatgaaagcgtaagtcaacgcctccgccgtctgagaagcactgaaattcttgagaagagtgtaaggaccaaaggagacggagaataacgagttggtagcgttgagaccgtcgtacgagtttgggtagaagtagagacgcacgaatttacgacctgatgctacagggaaagtgtaagtgaaaggagatcggaaaactctcgccgtcatgtaaggaacttcgggaacggaaggatcttgtgttaacgctggtgatgttttagagtcttcagaggaagatgataagaattttgatttgacatcggagatccatatacggttatctgtgtcggttagattagaagcaccaccaccgcaattcaataggattttctctgttggagagtaatcagcagctgagattaaagttgctgcagatatgagaagaagaagaagaagaagagagagacggaatcgtccctctgtgatcttcatcgatcaagagcacttctccgggaagatcttcttctcagatctatcaaacgaaagaaaatcgaaactataaacttcacagatctaaaaatggaaagtgctagaggtacatgttcgtttggttacgaaaattgagcttaagaaacagatgaaattgaagtttgaatacagtagtaagggagagtgaagtgaggaagatgatgatgatgattacatacctgaagaatcggggaagaaaccctaagcgatgaaatcggagagagtttttggagaagacagagatattttgggggagagagagagaaaatcaattaatgagtggagaggtaagtatagtcaagacgacgacaaaacggacaagcattgttgcttccctctacgcgttaacgttattttaatttcaataagattaaattaagatatagttatcgggtttaattaattgaagccggcttgaaggtgggtgaagtgacgataatgacctttgagtatcaacagctggaattatatatgtcttgaccattcgaaggataatgttgattggtatggtttggatgacagttcataaaatgtgagagagtaaatccattaaactaaagaaaagacaagagaattttatgaaacgcgtatttttgtgtgcggtggtgactgctcgtggctgagctggtactctatattatactataaagggaaagaatggggcctgctttgataataactcgttagttagttaggatagtttacgtaatcatgggctttttactctgatttcagtttatctcctatggcccagttataagtgggccttatctaacgtgcacatgatatatgtttatgacaatcggcgtagcctccttttgatcgatcatgtctaaggtaaggagtaaccttgatctccgatgtcaaatccaagtaaccttgaatacaaataaaccgtggttaaggccgaacgtgtgcaatttttttggtctacaccttcttgattcaaaacagagtttgtgatccttgttttctcagtctttcaaaataaaataaaactttaaaccattacatcaaacatgcactaaatatttacattaacatatcattaattctctttcagacaacacatttttttttgtttatgccaattttaaataataaaaattacatttcaaacatacatgtttctgctacttcgcatttgggcacgcatgagacgagtcacatacatacactcttcccagttcccactcttaacttttcttcactctaggcaaacacaaccaccaaacctaccaactcgcttaaatcgaagcttaccaatcacacttgaaagcttcggagaatgattcttacttaaactcatatccttacttgcatttgttacactcagactcgctgcaccagttgcagctgttataacacaaacatcacattctgtcaccatgcaattaccgcctaagaccttgtttcttccatttactgcttggaattcaaattcaacgtgatcagccattatatttggtttgtttccctcaccaccacctcgatgcatttcggcatcctcataaaacacaaacatgtgatccctttgaacctcaggagcttctctcggagcccaacacctaaacactttctctgctttaccagtgaccacccttttctttgtcttccatctgcttacgcacctaacgccaagcccagcgttgttgtgactatcatccgaaaacgatactacaacgaagatagcaaaccccaagagtgtctttcgcagggaaggagttatctctatcgttgcaaatgaacctgcccgcaaattataagaggttgcctgatctgctcctgcaggcccgcaaatgctgaatgcaagtgctttgatgagttcctggtcccaacaagaaaaaggaaaattacatatacgctaaagtatgtatgagtgagaaagaagggacatgagaacgagagagttacctgctgatgttcgttgccaatgcttgctactttagccaggccttttacaactcgttttctagccacttttggagacttattgaagcaatcgctgaaggtgtaatgactaggaaactgctcaaatccccaagaaactgactctagagacacacaaccatgcacgttcaacagtttcaggctttggggaagcgccggaagcaatatgaggtttctacaatgtcttaatctaaggctatgtagtttagataactgctttatgctttcagggattttgctgaaaccattccgaccaagatccaacagcactactgaaggcaaggaacaaatctcttccggtatatgcatcaaggatgcattgaagagggataaagatactagggcataaaatcttgggaccaagccatgtaaacttgaagatggcagccttggtcgaggcaaatattctctacgctgctctgcattctcattgaaagtcaagagaagataattcaaattactgatgccaatttctgatataccattctggataattgatgttgatacttctcttatggacatcccagatggatccgttagcttaagtgtgacaagagattttaagttactaatctccattggaagatgttgaagccttttgcaattctgtaaatctaaaactacaagttctgagagatgcttgattaacgatgtcacttcctgtatagcggtgccagcaagatataactcttccaagtttcttgggataccttgaatatcctcaagttctgagcatccagagagatttaacaccgcaagagaactcaagttacctattcccattggtaacttgtgaaggcgtttgcagttctccaaatctaatacaaccagttcagaaagatgcatgagcgaaggcagttcttttatggctgtaccaccaagatataactttcttaggttttttggtataccctgaatatcctcaagctctaagcattgagaaagatcaagaactttgaggttgtctagataaaccatgattgacagactttgcgaatcagacgagacctcccgattcaagaatttgtgatctttatgatcataaataaatgagttatcttgtggagagaaggtcacagttggtattgatcttatgccagtttgtttgagatacagctcctcaatattaggtggaacctctgggaaacttttgatctttatgcaaccagagagatttatcacccgaagatgctggaaatgacctgttgctagaaatctttgtagtcttgcacaaccttggagatcaattacctccatatttagagcaatttggagttcttgaataccaactagctgttgtgaatgacaaagcatgatcctcttcagcatcccaagttcctggaaaaacaaattgttaaaaaaataacaacagagacgcaaaatagtaattggttttcaaatgcatatagactttcttaccttggttccttcccaaagtctctgaagtttactgtaacacatgttgagtataacaagatttctagtgttaaaatcttgtggtaaggataacaatggaaaatgttcccagtgcagtaaccttaactcctccggtagggatttgacgcccttgggaaggtgtagagcataatggtttccaggattggaactgcaaatcttcagatatctaagattatacatattctcaaacgccataggattgacatcaaagcttaaggcagatgggtccagaaatatggcttcaatatcttcactaccctgaaacaacaagggaaatagatggatcaagaacttggctcaaattccaatattgagctttgtgggaaaataacagaattcaacataccaaaacttgtctatcttctagaaaatacttaattatcaaaggtttccacagtctggaacgcctctttcctccattgataattttgcgacctatggattggatcaaattatgcatcacaaccctgccttctgccatactcaccaaacacttctcaacaagaacattgatttcaacacgtggaaagaaaccacatccctcaagcagatgtattacacagtcgacattttctcctctgaaaagacacgcaatatcaagaaatatgttcttctcgttggaactaagcgaatcatatgtactcttgactgcatcatgaatctcatgtgccagatatttcttgactttggggaatgcaatctctataggtttaggattcttccttgacatacatccaaaaaaaatcagagctaaaggatttccattagcataatcaatcactttctttgatagtttctgcaaactctcatgtataatctcctttccgaatgcacaccgcgagaatagctgcagagcctcttcctcatttaaacctggaacctcatatatctgatcgacccgacatatagaaaatacttgtttatctcttgaagttatgatgatcaagcttcccggacaaaaccaatcaaaccctccaagaaaggactctgcatctagaggcttacacacatcatcaagaacgacaagaactcttttatggcgtaaaacatttctaaggaggatcggtcttgtaatcgaactttttatgccaagctcttccctaagaattttcccaaagtgtgcctctaacaaaccataaagtcccttctcatgaaacgccttgttaaagtctttgatgaaacaagaagcctcatagtcaccagagagttggtcaaaagcagctttagcaagagttgtcttgcctatgccgggcattccccatattcctatgctgcggacaccccacggttgcttgtaaatcaatgtttctatcttccccaactttgagtagattccaatattgtctgacatgttgagcttttcacgcacatcagccacaatctcctccacaaagtcagagtcactgcatatttttgtagagaatgagtaaatattccaaagtggtctaggtctagtgaagttaatgatttaaaaatgcttcaaagttcaaacctttgcgtatcgtataactcgtggcctggtaagtctacagtttccaatagagcacttggccaatcgcttctaacatcgcccaaattccagatttgtttcttcataaacgatttcgtgactgggtaaaataccggaaccaccgcgagacagtttttccgccggcgttcggaaaccttgaccagctcctccatgcatgacttggatgacgagtatttctcagagaaaaccactacagaagccctagacgtctccaacttggagaatccattgctttccgaatcggagccgttttctctgatgaacgaagatattcctctgcggcggaaagcggcgcagaggtggctgacaaaagagtaccgcaccgtatcctcacttctgtcgaagctgatgtaaacatcgctgcaatccaccatgattgtttaggcgcgtttttcttgcacctagatttaggggattttcagttttttttttttttttcatttagactggatcaagtcggaattagtgaattcgtaaagagacgtgcctcacgatgaagaagtcgttccgagtagagtgttgacctagtttttcttacaaatttcttggaattgtgttttttgatcgaggccggccaagttcttctcggaagtttcgcttattctctttgtcacaacacctcaacttgaacttaaataaaaccagaatgatagttaagttttatagtttgtttaattcgtagcaattctttttgttttgtagatgagtagaacaggtcaagattttgaaaaatggtatctctaaggttgtttgtgcaagcatgtcgtcttgtatctcaaaaggaaactcaagaacgatttgtttccaaacaaactccgatggaggaggcctcttcctcttccgaggtaaaagcacttcctttgccgccgcagcatcaagtgtttgtaaatttcagaggagaagagttgcggaacagctttgttagccatctcagaagtgcattggttaggcatggggtcaacatcttcatagacacgaatgaggaaaaaggtaaacctttacatgtgtttttccagaggattgaagagtcgaggatcgctttggccattttttccgttaggtacaccgaatcgaaatggtgcttgaacgagctagtgaagatgaaggaatgcatggacaagggaaagctcctcatcattcccattttctacaaggttaaagcatacgaagttcggtatcagaagggacggtttggttgtgttttcaagaatttgcgcaatgttgatgttcacaagaaaaaccagtggtctgaagctttgagctctgttgcagaccggatcggcttctcctttgatggaaagaggtatcttttttttagtttcctaatagagtttatctagagcacaagtttgagactttgttagagtttgaccttctcaataaggatctgcctggctttttttcttactgatttttgtagcgacgagcacaacttcatcaatggtattgttgaagaggttaaagaagcgctgagcaagattttgttggacaaaaccaaagatgctttcgtctatcattcgaaaaacaattcaatgtccgtaggaagagaaaagcacgagatttatggactcaaacaacggttagaagaattaaaggagaagctagatcttgattgtgaggagactcggattttgggagttgttgggatgcccggtattggtaaaaccactcttgcaagggagatttatgaaactttgcggtgcaagttcttaaggcatggattaatccaagatattcgtagaacatcgaaggagcacgggttggattgcttgcctgcattactcttggaagagttactcggtgtgacaattccagacatagaatctactcgatgtgcatatgaatcttacaagatggaactacatacacataaagttcttgttgttctcgacgatgtgagtgacaaggaacagatagatgttcttctggggagatgcaactggattaggcagggaagcaggattgtcattgcaacaagcgacaaatcactaatacaagatgtggctgactatacttatgttgtcccacagttgaaccacaaagacggcttaggtcactttgggcgttatgcctttgatcgtcattccaacatacacaacaatgaagtcatcatgaagctatcgaaagagtttgtgcattatggtagaggtcatccactcgttctaaagttgttgggggcagatcttaatgggaaagacgaggaccattggaaaacaaaattggctacactagcagaaaattccagccatagtattcgagatgtgttacaagtaagttatgatgaactgagtcaagtgcataaagatatatttctcgacatagcttgttttagatcggaagatgagagttacattgctagtctactggattcatctgaagctgcaagtgaaataaaagctctcatgaataaattcatgattaatgtttccgaggaccgagtagagatgcatgatttgctatatactttcgctagggaactttgccgaagagcatatgctcaagatggaagggagccacataggttgtggcaccaccaagacataactgatgtgctaaagaacatagaggtgagcctaaaccaagaaaacttttcatatattttacaaagttcttcaagacttactgtatataatgaataatagatttgacgaccgtgacttgtctcccaggaaggcgcagaagtcagagggattttcctaaacatgaatgaaatgaagagggagatgagcttagacagttgcactttcaaatcgatgtgtggtctccgatacctcaagatctatagctcacattgtcctcagcaatgtaagcctaacaataagataaacctccctgatgggctaaacttcccactgaaagaggttcgctatctccactggctagagttcccattgaaggaaattccaccagatttcaacccgcaaaatcttgtcgaccttaagcttccccacagcaagattgaacgaatctggagtgatgataagcataaggtgtgcctcctcctatcatttgactgtatgagtaaaactataatgaatagttttttctactggtggctaaaacttgtgttgtcacaggatacaccaaaattaaagtgggtcaatctcagtcattcaagtaacttgtgggacatttcggggttatcaaaggctcaacgtcttgttttcctaaatctaaaagggtgtacaagtctcaagtctcttccggagataaatttagtctctttagaaattctcatcctcagcaactgctcaaaccttaaggaattccgggtgatctcacaaaatctagaaactctatacttggatggcacttcaattaaagaacttcctttgaacttcaatatactccagagacttgttatattgaatatgaaaggatgcgcgaagctgaaggagtttccggattgtctcgatgacttgaaagctcttaaagaactgatactctcagattgttggaagctccaaaattttccggcaatctgtgaaagaatcaaggttttagagatattaagattggatactacaaccataacagagattccgatgatatcgtcgttacaatgtttatgcttaagcaagaatgatcacatcagctcccttccagataacatcagccaactttctcaactaaaatggttggacttgaagtattgtaagagtcttacatctattccaaagcttccaccaaatcttcaacacttagatgcacacggctgttgctcacttaagacagtctcgaatccactggcatgtcttactacggctcaacagatttattctacattcatcctcacgaactgcaacaaactcgaaaggagtgctaaagaagaaatatcttcctttgctcaaaggaaatgtcagctacttttagatgcacaaaagcgctgcaatgtcagttccttgatctccttcagtatatgttgctatatatcaaaaatattcgtgtctatatgcattttcttgtctatatctatgcagaattctgattcggagcctttgttcagtatatgctttcctggaagtgaactaccttcatggttctgtcatgaagctgttggacctgtattagagctcagaatgcctccacattggcatgaaaataggcttgccggtgtagctctatgtgctgttgtcacatttccaaaatctcaagaacaaatcaactgtttttcagtgaaatgcacattcaaactagaagtaaaagaagggtcgtggatcgaattttcattcccagttggaagatggagtaatcagggcaatatagttgcgaatattgcatcagagcatgtctttattgggtatatcagctgttcaaagatctttaaacgtcttgaaaaccagtattttagcagctctaatcctacaagatccacgcaatctagtaaatgtagtcctactaaggcctctcttaattttatggtcatagatggtacgagtgagctaccgagaatcgaagtgctcaagtgtggcttaaggttagttctttaattgaacctatttaaaccgtcttttcttctgattttttaagagttccttcactcttcagagccttcttaggaaatttagaatccattttttatgttgcaggtttttcaaaggtgttgggagcagtggaaattatttaaagaagttggaagtgaaagaagctgaacaaaatctaagtgctgaaaaagtgtcagaagattggacgtatggatcaagtagcagatgcaaccatgctgtcaaaacatgtccagaacagaggcaagtgacagtcaccgcagaggttgaagcttctcctgaaaaagctgacaatgcagaatttcaaatcaagatcaccccacgtgaagctcaaccacaaccacaaccacgcccatgttcaaaaactttgaaatgggcatgttttacttgttgtgacttccaaaaacatctatgattaatggaggaatatgatagctcaacactacagaagagtagccaagaactacccagtgcacataaaagatcccaaagagtcagattttggggtggttagaggaagaaatcaaagaatgaagacttgggagaaaaaaaaaaactcttttgttggatgtatctctatcactcctctttatgctggtttgttttgtgcccacctaaatggcaaacttcttatatgtcttcagggttacactttttatttgtttggcaccaaaagattgagtttatctatagattttgttggtgtatatttaagttaatggcttttaaatgaataaaaatatatttgagtaaaaaatgaagctcaatctaacgaaaaaccagtcatcaaatcaatcgatcgactttggtaacaacggggaaaaaataagtgttggcagttttgtacaaacagtacacgagaatctgaaaaggagagtacaaaactaaatgtgttcgtataaatgatacaaaatttggaaacaaacacaggttttggttgggagactgtagtaaaaaactttgacatttcaacttcgcaaaaaaaaaagaatttgaacatatttatatataggcgaattgcgtatacattaacctgttttcctgtcttgccttctttgcagtaaactgtatccaagtggttttgaatcttctgtaatggtatccaatgattataacacaaacactctagtcgtcccagtcatgatcccagccatctcggtttggagccctcgctgttaagccattggcagatatgctaacactctttgctgcactacccggcgatttcacagcattattctcatcccaatcatcatcccaaccctcgtcccagtctgctgtctccacatcatggacccctgactcgttttccaagcctggtcctccactcaattctagctcacggtaaggcactccactgcctgcacggcgattcttccggcaaagacagaatgcccaaattcccccaaaaataatgacggatactattaagaaataagcgccgttaatgggcgtcactagtttttcatatgagggaaagtggaatggtaaggtgctttcttctgatgggtacatgtgaagcgcacactgtccttttccagtatctagtatgatcttgtttgtatctccactaatggatatgtttacctgtccaagtgaagatcgattcagtttagtaccttggaataactagagtaaagtttgcgttgtatcattaaaaatcacaaaaagaaaatcagacttttatatatatatatatatatatatatatatatatatatatgtcatgtcaaagataacacttttatctatagaatcaactcggaagaaccgaaagacatactttttgactctggtgttttggcagtgtcagctcttgtaaagcgttaaccggaagaacaatttttgcttttagagatgtttcaccttcattttgaactagaatcaaccagttagcagcacctgcaatcataaaacagagctttgaaatgaaaattcaatcaactcaaacaaaacctagtggagaaaacagaacatacaaagcaaagaccttgcaaattgttggggaataactataatgtctaggaaagtttcatatccttgagatcacaatcatttacaaattaacacaacgtaataactgaataaagtaaaacatatcctaaaccatcatcccagcgaattacaacttatccaactatgctacaaacagcacctgcaatatgacttttattcaagaagctaacacgactaatactattgcattgtcgataaacaggaacgcacatgctagagataccatttcaagtaaactttgaaaccaagaataccaaagaaaacatcactacaagaaggcgcaaatatacctttatcaatgctcaaagtgcacgccaccaatgaattctcagttctacatatgttagactttcctacacaggtatctacactggcagactctgagctccccttatcatcctttcccttagcaggatctttagccaaaggaggactctccttacctggctctgtctcatttttcccactctccaaactctttggaggcggtgccatgttagccggtagctttccactatcctgactatccgttaggttcgctggaggcggaggcgggctcatcggctcggttgtatttaacactttagtatcattcttctcatttacaggtatcagtggaggaggtggactcattgaatcaggctctttaggattagtgttcgtcgaattactagttggcagagttggttctgatgaggtcacattagattttccatctccgatgggttgaggattaatcaacggagactcctgaagcataaacacagagtaaattcaaatcacattgttcaaaacccttaaaaacacataaaggaatcgaattttacttgtttagtggttgaatttgaattatccttttgtgtttcttcatcaactagctcacgaaatctatcgaaggaggaagcattggagatgaacaaaatcaatagaagaagtgttaagaccgaacttctatccatcgcaataagagtcaaaccctaaattatgattcgttcgcttgatttattcgccggtggtgctcttgatttgatccaaagatacttactggatttgaaaatttgcagcagcagctcatatttcagggtatcagtggtccaaaacgcatcgcagatacgcagatcacagttcaggcgattgcgaaaatcaccaagcttagatttcacgcaaaggattggcaacacagtgggagagagatggatgatcgatgtaaacagagttgttgaaaccgaagatcgatgagagaagacgaagagtggctctggctcgtgtcgtgttggtcgcgtctgaaagaaattggatcaaatcgcagagccaaagtagtgtttcacgatccctccacctccacggagccgtcggagaattatttgggccgtaattttaaaagcctattagttgtttcacataagtccaccaggcccatttaccaattatttgattaatctagggaatttaatgaaaaaaaactctcattggtcagatccatttttaaaccctgaactatgtttttagtaaaacaaatcccgaactaaaacctgttaataaacttaacctcacagtaattaaatattaatgggatattaatttccaaaaatcgaccaaagaacaatgacagaatccgtgatccaactgaagatcgtccacctcaaaaagttccttatacacgtgaaaaagttcaaatggtaaaatagagaacaatgaattatgtttcacaagatcttccttttcaaattatttaatttaatatttgcatatttagacttgcagcaactgtcaacaagtcggacgcaacaaacgttcatgcaagcgtaaagcagtgccaaaaccacccaagaaacctcaaggacgaccaaggaaaaaacagaaaacaatggatgaagagaaccctatcactcagccaatacaatcttttcttcaaagttaatgcttgacaagtctttactttagaatatcttgtccctctgaaacgattgtttttttttgtgacaaatattgttgtgttgcaactgcttcgatagttatgttggttggatttatttaagtatgactctttggattattttaagttgttgtgtctttctttcagcttctaaaatccaaactaattaagcaattcaaaatcatttagaacgtttttttgtaataaattcaaaacagttttaaagaacatcatgtggtttttgcgctaaatacaaatgtctcgttgtttttttttttgaaattaatatcccattaatatttaattactgtggggttaactttattaacaggttttagttcagggtttgttttactaaaaacatagtttagggtttaaaaatggatctaccaaagttgagggtttttttcattaaattcccattaatctattactaccttagcggcttagcttaactaatcgaaccttataattatgttgtatcacataagtccaccaggcccattgactaattatttgaataatcttttagttttcttttgaaaacgttattatgattttttttttcttttttttgataaactctttcggctgattcggttagtcccggtaaaaagcaccgaaatactttagagtggatttctctccaaagaaccaccacattgtctgtcccgaatttggaatgttttccgactaatgccaagaaaccaccttcatttctaactaccagataaaccaattggaacaaaatccaactgacagacttcccaaacaaatgtgatttttgtttccaaggaagatcgaactcaggtctggaagttgcacctttctctaaaacttccccaaccactagacaacaaatgcttggatgcgatcataccaacactattattctctttcccaacatgtcaacatttaagaaacttttacatgtttgaacagtgaacttgttatggtaaatcatgtacgtgttaagaatataacatttggtacactctattcaagtaacatgttcatgttttcctatcattctaatgttccaacatttcattgttcattctaatgttatacaattatctaataatctcctcgctagctctaccgtaacgatttatcgcagttccctcatcttataggatctaattaacaacatcgtactttcttagatctttattgtcttacctcattaagtctctaaatccaacatgtctttgtcgaaacttcaagttttatcgacatccaacgtctctcactgcctagatgattcatttggtggatcagactctactgccacgcgctaagttaattcttatcaaggttatctctccgacagcgcacaacaaaatattggggacacttgaggttaattctttgtttgccattacatgtttttataagctaaataaattcttatatgtgcatggttgtgtgaaatttaggatcatcttgcgatatcttgatcacatattcacatgtactgaaaagcagtcaatgttattctttatagtacatatacgtatgtattacacccaaatttctttcatacgtatagatccttgctaatggcaactgtaagcaactatatatacatatatgttcaactgttcaagcacatagatggagttgccgagttggttttgctttcttcattatcaagaaacatgagagaatgagagagagaaagatccgttgtcattattagcatatgaaatcgtgtggttacatagataagaagataaaatcataaaatgggaaatataagcagaatacttttatttaattaggttaaaagctggcaagtttgattagtcgtacatctgatcactagcctctttcacacggcagtcgatatactgcaacattcgaacaaccaaaacaaatatctatcatgagtcatgacattggaaataactaaactccaaatggttttattcatacaagcattaaaaatgtacgttagtccattcttcttattacccacaacatttgaataagttacaaaacgtttgttaaatactcgatcatgtcacatattatatatttttatgtttaaaaagagttgtattagtgtttgaatttttaattaataacttctaaagtgtgtttgtataaatgttttaaaaataaacgtaacaagatagtgaccaaaatttttaatataaaataaaattgatatctcctaatttgattaaataattagttgaattcattggatcctagctatatagtttttggattcaagagtatattaaaactagttatattccaaacaaaacaaatcaacctaacataaaacaaaaataaagttatggagacgtacctgtcgcaattggtgctaaaactgatggggtagggaattgaaacaccacaagtggtaggaagtgcggccacaaggtcggtgttgaggcccttgatttctttacccgctagtttaaggcactcacatacttgtttacggtccggtgtggtctgagccaattggtacaatgacttgactcccacgcagcattgtgatggcaatggaccactgttggtcaagtaggtcaggcactgtgccagtgtgctcgtcactgtcccacactggatggttgactctgttggggatgccatgtagatcgtaaggacaatgaggcatgtgatgatcttcggagtaaacgccatttttgttttttattgcttttactttgttgaggtcggtagggattttataattggaaacactcatgaaggtcatgcgtacccgttaattatgcttagttccatatgcatgcaaatttaatgaaaattttattttttttgttgaattaagattaaaatacacatattccaaagtaaatacgttgcattccctatcgcttaattgagtttcaagaagttgttacatcagaaaactagattcaactctggacggaattataaattacaaatttcggcgattgaaaagaaactaattaacttttttttataatccgaatagatattatgggtttaagtcttaaacttatgactgatggaaaaaattgtaatggttttgtgttaagtaattttcttcttgattaatagtaaattggactgtccttgttatttcgaatcatataacaatattttctgaaataactagataagaaaatcatgaaattattatagtgaatttgttttatgatcaacagaaaataaagtggaaacatatgattaatccttctttttacacaccaagtagaaacatatgcaaatacaacggaattgcattgcatcgattttgaatagaaaagaaatgagtgtacttatgttattcttgggtacatgtcaaacaaggtggtcataaggctaagcacatatttatgaggccacacgatttcaaaagagtaatactattgccaatagtctattggacatgtggaccaaaaatggtgatcaagtggcagttcaaggaagtaatggaatagagaagaaaaaaatggtaatggtccaaagcatcatcaaatggtaaagagttggagacatcaaaggaaaatgacaagagaggaaagcatggaaaacaaatagacggcctaagagatttatatatttatcgaacaaggactcttggaggttatacggtcacacgtacttggagaaatccaaaaggatctccacaagtcctaggcaagttatttacaaaaaaaaaaaatcagaaaaagaaaaaaaaaatgtcgtaggcaactcatattagaaaatagatataatctgtataatcgtaaatcgatctagtgcatgataaaaccatttttttgtttttcgttttatacatgcatggtaatgtaatcgttgtaattaatttatgcttggaaaacacactacaaacttcaataaaagaattcagtaaaagttctagggtcgatcgacattttaattgttttggtatgtttctggtttttcacttttaaaaaggtaacgcttacaagagaaagaaaaaaggtaaggtgtctttagcaactgcatgtagggtcgatcgacatattacacactcaccgacgaaaatattacgaatgatagagtgagaagtgtaaatgagcaagttgtgagagtttgaagaagtagataaggattggttaacaaagagtgatgagtacactcttgaggatattttagagtgaattttgaggatatttgaggatgaattaatgaaatcaaaccttatttcagtgatattctatagtttgttggttccacatgtattagggaatcgaaacatagttttactttctttctttttacaaatgagtccattattggactatcttaattaatatttgattataacttattctatttacatctacacaagtcaactgataataatcgtgttaagagaattgtgtacggactgtggagaagaagaaggaataggatgcatccaaaagcagaacgtgaccaaagttaatggcaagagtttgaagataatacataatcgtaaattcaatatatcattagaggagtacataacacagacgaccaattaaatggaccgtcatatacaaagaaagacatgaaaacacaaaatctagaaacacaacaataataacagtaaaaggatacactagtgtgtatatagtgtgacatcttaattatttttaatactctctcatcgattatatgaaaacccttcaacgtctatcttcttttgatcacctgacgctgcaaccaaccaaatacatcaatcatatggttactaccactccattaaatattaggacctcaagtaaaaatgtaataaatatagagtgagatagaagataacgtacgtgttacagttggttctggcactgatggggtaagagatcctaacacggcaagcaccagggagacgagcagcacgaccagcgttaagtcgagaacccaaggctctcgctgctccctggatacaacgacaagcttgttggcggtcacgggtggtacgagccaagctgttgagcctctgaacgccagagcaacaccctctaggaatgaaaccgcctcgggtcaagtagttatagcattgacctaagctgccggtgactgcgccgcacgagattgctgcctcggacgccattggagcggtcactaacatgcacacaatcaccaaagttgacaacttcaagagtccctccatatcttaattttttttttttctctttttacttagtaagtaatggattggattggataatgaagaatggtaatgaaggttgggtttatatagagagagcttatgagtgcaaatgcatgaaagtagaaggtgtgaggttagttggtggttggtttcatttattgcattgctttctcttctcttatctttcgcttttgtagttttaattactacgtactctccgttttgtcagatctatactatatactatataaaaatgtaattcactcttgtatacacatcctttttttttttttttttctgaaactgtgtctggcctcgctggtacaaaataagaaacgatttgtcttggatccctcaaactatagacaatttaagactagactaggtaattgatattgaaccaaaaccatggttgatggttcagtaacttttaagaaacgtaaatctattaaaccataatgttacaaggacaaagtttttgctttcgactattcatgtttgatgaaaaatcttttctgagagttgaacggccaattccatattccaagtatctaaaattgtagaaacatacatatacttgactatgtgactcaatcccccttgccaaattctccaacattcatgctgctgctctccaccaccgtctctcttacaaacctacaacaacattttcaagaataaggttcaagaaagaaagatacaagtatgaattggaggggacatgaataccatttaccttgccagcttctctcgtgacgattgtaagacgtaaatggagagtacaaaagaaaatgtgagagctgatcacaagtaaacaaaaaaatgagaatacataagtgtatgagcttattgtcccttatttaattaattgtttagcaagacgaaaaatggtttacctgagccaaacaggacatagaatcctgaggatacatcaatctctgactgctccttcctgcatcacaataaagtatctcagccacgtatcagtaacgtggtatccttaagctttgtgattcgaccatatgcacaaacttattagctaggagagataggaaaagaggtgagaaaagttattgtaccatgtgtatctaacaagaacatgttttggccagtgttgaggatcccaaaactgtttgcggatctccgggtgtgtattcagatctgttcatgggtaagatctcaactcaattaaactataactgagtgctactctaaggcaagcagaaatgaaaattcaataatcagagcagagaaagtatgagattcattagttacaagaaattttcaaagccactattaacataaccatgaaactgtaaatttatttagtaatgccaccagacagacagattgaatcagtctatgtaatcgacacaaaaaataacaacagaaaaatggactataatgcaaactgccaatatattagcacccagtgtctctaagaaggtgaagatgatattaacttacaccagatactgtaagactctggatataataagaatagtgtcaaattgaagccagcttaactagggccataggctttgcaaccaaacatcacaacaccgagaagctatcacctaatatatcatataatctagagttttcaaatatgaacgtaggacttggcatatttggtttggccagaccagacaattctcttattcgctcagaaaacagttgttaataaacaggagcacctaatcaggacacaatatagctagataggtagtattacgtacagctatgaggcatgtcgataacttgagctgtgactccaagcagatctcctccagaatatctctgcgcaaatgaaaaaatcaacccacaccgaaaaatccaaaaactggtattacataaatctgccttttttcctggtagcaaataatctaatcaatcaaagcttagataaaaactcaaaatcaatgctaaacataccaaatttacatcgatcatcggaacttctgagctcttacgattaattaccaaaagccagtgaatcagaaatttctcacttccaacttggaattttctgcatgtaaaaatcatccataaacacacatcaggcacaaaattactcttaatttgcatatgaataatgtacaaacacgataaagatgtagccatgtcagtactccatgttcagcacagataagacatcagaaaaacacaaactgcagtaagacagagctaaaaaaaacatacgaaatggcttaagctaatcaaaagagatgagagaaatggcgaaaacatcacagtatcttcatcatttcctttcagagtagcaacaatcgaaattgctaaatacaatctaaaagctggttaaaccagtaatgaactaagcaagtaaactcaattcaaaagcaccaaatagagctatacaaaattttcatttgaaatgcaatcaaaataaataccagaaaattctcacatcttataaggatcagttcctgtgtagccaattggtttcgctattgggatcaacacctaaaaattggcaaagaaaggcaagcttcaatctaaatttccaaattatccatcaaatgtcttaagcctatttgcacacagtacctcgcgattgacggcgaagatcgggcaatgctttccgatcacatcatgccaagtcgttctcgactgccagagaatcaatagatccttagtctccgatcaaattagaaaataatctcagctaatatgttaaagagaagtacgaacagagtgatactgccccatcttgctcatccggacgatatctccaggtcggtaagcgctggagagaaagggaaatgatagagatatcagaactagagcttgaataaaagcgttccacggtcgtaatcctgccaccgcagccatgcccgccataactccgcttcgttggcgaggtttctccgtgaaatttgccggtaattttcttcgccgggagatttagaattgaagcggaggatgtcaaatgtgagaactgagaactctcatccgtgttattattgggccaaaatatcaggcccaactttattgtttccaactcagttttgaccaggtatagggcctagtaactgatatttgttttggtcggagggcctggtaactgattattgacgaaaccaaaaaatcaacttatatcagaacaaaaaaaaagagacatggtttaacatattttagtgatgtatataatttcgttttaaatcattaccaaaaaaaaaaaaaaaaaacacgaccatctgatctgtagctaaacggattgtgttatgagattttagataagaaaattttacacaaagtattagaatacattagtacattgcttcctaattttgatttaaaagaccgtgttatatatttcgaaatagaaaagtattcacaaaaaattatgaaaatatagtttcggggtgaaatgtcgttgttataacgactaaatgttaaaacaaatatgttttgttatatatatttaagatataacgatgttcatttttggactgttatattcacatcagtaaaatctgttgctttaaatattatacataagtttttaatattccatgtaaaattcttaaattttgattttgttttgcagattttctatattgttttgttctgtgtataacaagattttgatttttgttttcaaaacgggactaaaattagagatttttatatatttttttttccaaaacaaaacgtttactagatttttgtaattggagttttcaatttaaaattcttttatagaacaaaattaattattaatttatctaattattggagttatttattttgttttactaaccatatcattatatgtggataccacgtcaaaacaaaatcatattcgagaataacaggtgatcaaatttctggaacacgtgaaacacagttggatccccttataacttaactcgaataaaggattttgaagacaatgattctcaaatgttacctttttcgtttttaaaagcataatcagttatgataatcgagcttattcaatagaaaaaagcgcgactgcgttagttaaatcataaaaaaaaatttatatttgttaaggtacatgagaatttagtatgtcatagaaaaaaaaagttaaaagtttctaactttttgaatgataaaaaagataaagctaaaccatgaaaacatgtattaaaatctttgacatttctcttaaaacattcataagaatcacaactctataaaaacttaatggaagaatatctgaactttacaatttaaccaactatagtgaaatcaaaattctgaacaaataacttcccaagtcactctaatcaaacttcaaatgatgtcttaagaatttaatgctggtcgttgtttctaaatactgcatcgttaaggtaaataaaaaggtacacaaaaagagcgacatctaaaagggtttcaagttgcatacacaaagttaagacaaatttgttttttttttttttccgatgcagtgaaaacaaaaaagagagagaagaaagaacaatcaaataacacaaaatcggtcctcaacagtaatcacttgggatctttcaaaacctagaagaaaaaactcatctttcttcttcttcttcccctgagacatctctcgattctttgtactcgcttgttttgttcgaactcaatcggattttcaatttcctgggcgtagtttacaacgaactgattccttggtttgatcaatcggtgtgttcttgtatcaatcgatttttttggttagtttttaggtttttgttgtttttcatggctgcggatctcgatgatttggaagaagagagttcttcctcattatcaccaccgcttcttccgccgcctcggtctccgttgaatcagccggagttgtggatgagagttgaggaagcaacccgtgaaattatagagcaggttcatccaactcttgtctccgaggatcgacgaagagatgtgattctatatgttcaaaaacttatcagaatgacacttggatgcgaggtaaatttgaataaaacattctctgtttgcattaacatttggataaaaactttaaatgttggaactttacttgagtcggcgatgttgttctgcattttattgagttctcttgatgcaagttgatggctttttaatgttgtcttgtgtctttttattcttaagttgatggcttttcttgttagattatctcaagtcatctacttgttgttttatatttcgaaagtggtgtgcaaaaagcagaccttttttctattactgaccagagattctgcaatgttgcggcttataactttgattgactatgagtgtggtttgcaaagttgtgattttttctactggtatgtgtctttcaggtacattcttttggatcggttccattgaaaacgtatcttcctgatggagacattgatctcactgcttttggtgggctgtatcatgaggaagaactggctgccaaagtttttgctgtacttgagagggaagagcataacttgtcctcccaatttgtggttaaggatgtgcagttaatacgggctgaggtttgtttacataatctctgtgttattcaaattccagaaactagagtctgcagtgaccaatgagtattccaagtttgtatatggtgtttatgcatgcttatcattttgattgttatctcctcaagtacctaaatttcttttcttttgcaggtcaagcttgttaaatgtctggtgcaaaacatcgtggttgatatctctttcaatcagattggtgggatttgcaccctctgctttctcgagaaggtaatctgtcctcttcagtatgaccaattgaccatgctgtgtcaaacaaatttgactaatttttttaaaaggtaaatacagtttaggcttagtttatctgtttaatagtatatgaaagcagaagttgaatgtcactaacctgccataatgacattggttccacctaactgcctgatgggtttctggtaactcaatagattttcttgaatattgcaaatcgtttgcaatatcacatacacgcaataatatgtttgaggcgcatttatctagaagaatattcatattagcaattttcgaagtacgcgtttgtataagataaagatttacttctggaaaattgacgttgactatatgattacgcagattgatcacctcattggaaaggaccatctctttaagcgaagtatcatactaattaaagcttggtgctactatgagagccgtattctcggggctttccatggattaatatcaacatatgctttggagacattggtcttatatatcttccatctgttccactcatcattgaatggaccactagcagtaagggtcttcagcaattatgagggatgcttcatgttttagtctcatcttgattcacttaactttttttatcccataggttctatacaaatttttggactacttcagcaagtttgactgggatagctattgcattagcctgaatggtcctgtctgcctttcctctctaccagatattgttggtaaggatttcctctagtatacagaaaatttagttctttttgcgatttcagtatctgcaatttctttctttaatttctgtagttgagactccggaaaatggaggggaagatcttctgctgaccagtgagttcctcaaggaatgtctggagatgtactctgtaccatcacgaggatttgagacaaacccacgcgggtttcaatcaaagcatcttaatatagtcgatccgcttaaagaaactaacaatcttggacgcagcgtaagcaaaggttgactgccttcttcaaccatcacagtttttattgtcctactgctatctctctctttatggatttagatgtttgagtctttaagaggcctaagacagtagcttttgacctgtccctgtccagagtattagcgttatagaatatttatggtgggtttacctgaaattcttgggctagggtatgtaggttttaagcgcaggctaaaataaagattgtgatattctggtatgtattttcaccctggaaatgaagaaatgtatcaacatgagataaaaaaacctctaaattttagtttgctctggtaatcccgtgaattttatggtctagatgactctctttattggtaaatttttaaagactatggattttactttcttcttacacaggtaacttttatcgtatacgaagtgcattcacatatggtgctcggaagcttgggcaactttttttgcagtcagatgaagccataagttctgagcttcgtaagttcttctctaacatgctactcaggcatgggagtggccagaggcccgatgtccatgatgctattccatttttaaggtacaacaggtacaatgccatattgccagcttccaaccatttccaagaaggccaagtggttaatgaatcagaatcctccagttcgtctggtgctactggaaatggtagacatgaccaagaagactcgttggatgcaggagtaagtataccgagtacaactgggcctgatttaagtggatcacctggtgaaacagtgccttcggtttcagaggaacgattttcgggagacgcaaaagacttggctactttgaggatccaaaagttagagatttccgatgatgcaatgaaatctccgtgccttagtgataaggaaagtgactctcctttgaatggtaagcatcattcttttaatcagatgagaaatggagaagttttaaatggaaacggggtggggaaacagcaagagaattcctggcatactggttccagaagagttaaagatatacatattaatgagaatgagaatgagcatgttggttatgaagacctgccattcgcaagtgcagtaccttggccacaggaggacatgcatctccactactcaggtcattgtgtttctggcactccgaatatgctgtctgacctctcaggcgattacgagagtcagcttaacagtttgcgatttggtcgctggtggtttgattatgtccaaaatggtcctatgtctccactatcacctcctgggctgcctcagctgccgaacaacaattcatgggaagtaatgcggcatgctctgccattcagacgaaatgcgcccactccagtaaatgcaaatggagttgttccgagacaggttttctttcatgtgaaccctcagatgattccaggtcctggttttggtatcgaggaattacctaagccacgaggaactggaacatacttccccaatgcggtaattacttatttgcctctctaacatctcttacagacactccgtaaatggccaagcttctaacgtctcctttatgcagaaccattacagggatagaccgttctccccaagaggaaggaactcacaccaagctaggtcgccgcgtaacaatggccgaagcatgtcacaagcgcactcagaaatgaattttcctgacagaaacacccgtgagagacagcttcattatcccaaccaaacaaatggttcatgcgatatgagtcacactgattcacttgatagctttcctgataccaatggctctacaaatcatccatatgaaaaggctccagactttaggcctacagagcctctaccagtggaagtactctcccctcctgaggacagcaagccaagagatagcattgaaggtcatcataatcggccacatcgtccaaaacctagaccctcctcaacacaggaagaacggtacagcatatatctcttacccttaaaaacatattgtcttcactgaattattaccatggatcaccaaagccactatctaattcactgtagtgatgtacatgtagggtaacacctacacagtcataccatttgacggatgatgatgagttccctcctttgtagctctggcctgaattacaaatgcatgctctctagaccgttataggaacaggtatagttttctaacttggtttgtctcctaagttatttgtttttacctcctgcaagcgcaaaaaaaaaaaaaagaagaagaatggagctgatatgttttgggctgtggttctttcttgtatgttatctctggtgctatagaataatttatatgtatctttatcaaactctctggacaaaacctttgcagagctttgtattttctacttagacaggtttgctgagtgtattataggatgtttttttttttctctcagtctctattctatcttggtaattctccttcttgtttcttgattcttcttcctaatggatgataaaaaaaaaagtaacaaggttttggtcattataagttgattccatatcatgtcttcttttagtaaaatatgtcattagttgaaaagtgcatgaaatagtaaagagttttaaaaaaaaataaataacagcttttaatatggctaatgcgttcagtttttgtgattggtaactatcaaaatggtaaggtccaattgttgacatcaaatcgtaagatttttttagggtgagcagaagtataatatcgctattttttccgcttttgtgattggtaacaatcaaaatgataaatcattcattgtgaaaatcatcactgaattc

SEQ ID NO: 97 - DNA, 79867 bp, Arabidopsis thaliana
aagctttgaaagcatttcaatctcagtctggaactcatgtacaccttgctcggacattgggttgcctctcttgatggctacctttgtagttccgccatcaatctctcctctgtaaaccttgccgaaaccaccaacaccaagcacccgggactcatcaaagtttttagtggcagctttgatctcagcaaacgagaagtgacggcaaagatttgacggaagggacgaggcataacttcctgttgtgtttgtcttcgccgagccagcagaatgtgagtttccatacagagatagtggaagccaccctgatgttgcatcactagcaggctggtaatcaccacgcttacgtctgcggtaagcaccaaacacacaaaacccaatgataagggccagaacaactgcaccactggctgcgcctgcaataatagccgtattgcttttcgatttcctagtagtcgggcgtaggactttagatggatcagcagtcacctgtggaccaggtataggattggtaccagccagattaccatcagaagtattcatcttgaatatctccactccattaagaagagaatcataatactccggcttgttaactgggttaggatgaagagcaagccacaaatcttgctgtccatttccctctggaggattcaccacgtaatccttgtgaaacggaaccccgtttgaactagtccaagcaatcacatcagcttcaggctcagcagtttgattgttgaggtagattgtaaacacccgttggttgatcttagtgatattcgaagaaacctcacagaaatgaagtctaacaaggtaagtgaaaccagagtcaatgctgaaaatccaagtaagattgtagttgagattgatctgagctgttggacccatagacctcgcggttgaataaacatccacaggagcaacataagtaggagtccccgtaggatacttaatcgtcatgttgggatcagcagtctctggaataccaagtcctgcaccaaatatataaggctgatcatcataccacgacctatacaaacccgtatccgcggaaggcgagatatcattccctccaacattgagcctatacacattctcaagagcagtactgttatcaatagtaacagagccagatgatccaaccatagtcaaagtcccatcagtactactatacatatcaggcattgaagtaacctcaatcccattaacaaacgcatacgcattagacggagctgattccggtgtaaacgtcatgttcaacgttccaccttcaacgttgacaacaaactctttgatgatgaaagcgtaagtcaacgcctccgccgtctgagaagcactgaaattcttgagaagagtgtaaggaccaaaggagacggagaataacgagttggtagcgttgagaccgtcgtacgagtttgggtagaagtagagacgcacgaatttacgacctgatgctacagggaaagtgtaagtgaaaggagatcggaaaactctcgccgtcatgtaaggaacttcgggaacggaaggatcttgtgttaacgctggtgatgttttagagtcttcagaggaagatgataagaattttgatttgacatcggagatccatatacggttatctgtgtcggttagattagaagcaccaccaccgcaattcaataggattttctctgttggagagtaatcagcagctgagattaaagttgctgcagatatgagaagaagaagaagaagaagagagagacggaatcgtccctctgtgatcttcatcgatcaagagcacttctccgggaagatcttcttctcagatctatcaaacgaaagaaaatcgaaactataaacttcacagatctaaaaatggaaagtgctagaggtacatgttcgtttggttacgaaaattgagcttaagaaacagatgaaattgaagtttgaatacagtagtaagggagagtgaagtgaggaagatgatgatgatgattacatacctgaagaatcggggaagaaaccctaagcgatgaaatcggagagagtttttggagaagacagagatattttgggggagagagagagaaaatcaattaatgagtggagaggtaagtatagtcaagacgacgacaaaacggacaagcattgttgcttccctctacgcgttaacgttattttaatttcaataagattaaattaagatatagttatcgggtttaattaattgaagccggcttgaaggtgggtgaagtgacgataatgacctttgagtatcaacagctggaattatatatgtcttgaccattcgaaggataatgttgattggtatggtttggatgacagttcataaaatgtgagagagtaaatccattaaactaaagaaaagacaagagaattttatgaaacgcgtatttttgtgtgcggtggtgactgctcgtggctgagctggtactctatattatactataaagggaaagaatggggcctgctttgataataactcgttagttagttaggatagtttacgtaatcatgggctttttactctgatttcagtttatctcctatggcccagttataagtgggccttatctaacgtgcacatgatatatgtttatgacaatcggcgtagcctccttttgatcgatcatgtctaaggtaaggagtaaccttgatctccgatgtcaaatccaagtaaccttgaatacaaataaaccgtggttaaggccgaacgtgtgcaatttttttggtctacaccttcttgattcaaaacagagtttgtgatccttgttttctcagtctttcaaaataaaataaaactttaaaccattacatcaaacatgcactaaatatttacattaacatatcattaattctctttcagacaacacatttttttttgtttatgccaattttaaataataaaaattacatttcaaacatacatgtttctgctacttcgcatttgggcacgcatgagacgagtcacatacatacactcttcccagttcccactcttaacttttcttcactctaggcaaacacaaccaccaaacctaccaactcgcttaaatcgaagcttaccaatcacacttgaaagcttcggagaatgattcttacttaaactcatatccttacttgcatttgttacactcagactcgctgcaccagttgcagctgttataacacaaacatcacattctgtcaccatgcaattaccgcctaagaccttgtttcttccatttactgcttggaattcaaattcaacgtgatcagccattatatttggtttgtttccctcaccaccacctcgatgcatttcggcatcctcataaaacacaaacatgtgatccctttgaacctcaggagcttctctcggagcccaacacctaaacactttctctgctttaccagtgaccacccttttctttgtcttccatctgcttacgcacctaacgccaagcccagcgttgttgtgactatcatccgaaaacgatactacaacgaagatagcaaaccccaagagtgtctttcgcagggaaggagttatctctatcgttgcaaatgaacctgcccgcaaattataagaggttgcctgatctgctcctgcaggcccgcaaatgctgaatgcaagtgctttgatgagttcctggtcccaacaagaaaaaggaaaattacatatacgctaaagtatgtatgagtgagaaagaagggacatgagaacgagagagttacctgctgatgttcgttgccaatgcttgctactttagccaggccttttacaactcgttttctagccacttttggagacttattgaagcaatcgctgaaggtgtaatgactaggaaactgctcaaatccccaagaaactgactctagagacacacaaccatgcacgttcaacagtttcaggctttggggaagcgccggaagcaatatgaggtttctacaatgtcttaatctaaggctatgtagtttagataactgctttatgctttcagggattttgctgaaaccattccgaccaagatccaacagcactactgaaggcaaggaacaaatctcttccggtatatgcatcaaggatgcattgaagagggataaagatactagggcataaaatcttgggaccaagccatgtaaacttgaagatggcagccttggtcgaggcaaatattctctacgctgctctgcattctcattgaaagtcaagagaagataattcaaattactgatgccaatttctgatataccattctggataattgatgttgatacttctcttatggacatcccagatggatccgttagcttaagtgtgacaagagattttaagttactaatctccattggaagatgttgaagccttttgcaattctgtaaatctaaaactacaagttctgagagatgcttgattaacgatgtcacttcctgtatagcggtgccagcaagatataactcttccaagtttcttgggataccttgaatatcctcaagttctgagcatccagagagatttaacaccgcaagagaactcaagttacctattcccattggtaacttgtgaaggcgtttgcagttctccaaatctaatacaaccagttcagaaagatgcatgagcgaaggcagttcttttatggctgtaccaccaagatataactttcttaggttttttggtataccctgaatatcctcaagctctaagcattgagaaagatcaagaactttgaggttgtctagataaaccatgattgacagactttgcgaatcagacgagacctcccgattcaagaatttgtgatctttatgatcataaataaatgagttatcttgtggagagaaggtcacagttggtattgatcttatgccagtttgtttgagatacagctcctcaatattaggtggaacctctgggaaacttttgatctttatgcaaccagagagatttatcacccgaagatgctggaaatgacctgttgctagaaatctttgtagtcttgcacaaccttggagatcaattacctccatatttagagcaatttggagttcttgaataccaactagctgttgtgaatgacaaagcatgatcctcttcagcatcccaagttcctggaaaaacaaattgttaaaaaaataacaacagagacgcaaaatagtaattggttttcaaatgcatatagactttcttaccttggttccttcccaaagtctctgaagtttactgtaacacatgttgagtataacaagatttctagtgttaaaatcttgtggtaaggataacaatggaaaatgttcccagtgcagtaaccttaactcctccggtagggatttgacgcccttgggaaggtgtagagcataatggtttccaggattggaactgcaaatcttcagatatctaagattatacatattctcaaacgccataggattgacatcaaagcttaaggcagatgggtccagaaatatggcttcaatatcttcactaccctgaaacaacaagggaaatagatggatcaagaacttggctcaaattccaatattgagctttgtgggaaaataacagaattcaacataccaaaacttgtctatcttctagaaaatacttaattatcaaaggtttccacagtctggaacgcctctttcctccattgataattttgcgacctatggattggatcaaattatgcatcacaaccctgccttctgccatactcaccaaacacttctcaacaagaacattgatttcaacacgtggaaagaaaccacatccctcaagcagatgtattacacagtcgacattttctcctctgaaaagacacgcaatatcaagaaatatgttcttctcgttggaactaagcgaatcatatgtactcttgactgcatcatgaatctcatgtgccagatatttcttgactttggggaatgcaatctctataggtttaggattcttccttgacatacatccaaaaaaaatcagagctaaaggatttccattagcataatcaatcactttctttgatagtttctgcaaactctcatgtataatctcctttccgaatgcacaccgcgagaatagctgcagagcctcttcctcatttaaacctggaacctcatatatctgatcgacccgacatatagaaaatacttgtttatctcttgaagttatgatgatcaagcttcccggacaaaaccaatcaaaccctccaagaaaggactctgcatctagaggcttacacacatcatcaagaacgacaagaactcttttatggcgtaaaacatttctaaggaggatcggtcttgtaatcgaactttttatgccaagctcttccctaagaattttcccaaagtgtgcctctaacaaaccataaagtcccttctcatgaaacgccttgttaaagtctttgatgaaacaagaagcctcatagtcaccagagagttggtcaaaagcagctttagcaagagttgtcttgcctatgccgggcattccccatattcctatgctgcggacaccccacggttgcttgtaaatcaatgtttctatcttccccaactttgagtagattccaatattgtctgacatgttgagcttttcacgcacatcagccacaatctcctccacaaagtcagagtcactgcatatttttgtagagaatgagtaaatattccaaagtggtctaggtctagtgaagttaatgatttaaaaatgcttcaaagttcaaacctttgcgtatcgtataactcgtggcctggtaagtctacagtttccaatagagcacttggccaatcgcttctaacatcgcccaaattccagatttgtttcttcataaacgatttcgtgactgggtaaaataccggaaccaccgcgagacagtttttccgccggcgttcggaaaccttgaccagctcctccatgcatgacttggatgacgagtatttctcagagaaaaccactacagaagccctagacgtctccaacttggagaatccattgctttccgaatcggagccgttttctctgatgaacgaagatattcctctgcggcggaaagcggcgcagaggtggctgacaaaagagtaccgcaccgtatcctcacttctgtcgaagctgatgtaaacatcgctgcaatccaccatgattgtttaggcgcgtttttcttgcacctagatttaggggattttcagttttttttttttttttcatttagactggatcaagtcggaattagtgaattcgtaaagagacgtgcctcacgatgaagaagtcgttccgagtagagtgttgacctagtttttcttacaaatttcttggaattgtgttttttgatcgaggccggccaagttcttctcggaagtttcgcttattctctttgtcacaacacctcaacttgaacttaaataaaaccagaatgatagttaagttttatagtttgtttaattcgtagcaattctttttgttttgtagatgagtagaacaggtcaagattttgaaaaatggtatctctaaggttgtttgtgcaagcatgtcgtcttgtatctcaaaaggaaactcaagaacgatttgtttccaaacaaactccgatggaggaggcctcttcctcttccgaggtaaaagcacttcctttgccgccgcagcatcaagtgtttgtaaatttcagaggagaagagttgcggaacagctttgttagccatctcagaagtgcattggttaggcatggggtcaacatcttcatagacacgaatgaggaaaaaggtaaacctttacatgtgtttttccagaggattgaagagtcgaggatcgctttggccattttttccgttaggtacaccgaatcgaaatggtgcttgaacgagctagtgaagatgaaggaatgcatggacaagggaaagctcctcatcattcccattttctacaaggttaaagcatacgaagttcggtatcagaagggacggtttggttgtgttttcaagaatttgcgcaatgttgatgttcacaagaaaaaccagtggtctgaagctttgagctctgttgcagaccggatcggcttctcctttgatggaaagaggtatcttttttttagtttcctaatagagtttatctagagcacaagtttgagactttgttagagtttgaccttctcaataaggatctgcctggctttttttcttactgatttttgtagcgacgagcacaacttcatcaatggtattgttgaagaggttaaagaagcgctgagcaagattttgttggacaaaaccaaagatgctttcgtctatcattcgaaaaacaattcaatgtccgtaggaagagaaaagcacgagatttatggactcaaacaacggttagaagaattaaaggagaagctagatcttgattgtgaggagactcggattttgggagttgttgggatgcccggtattggtaaaaccactcttgcaagggagatttatgaaactttgcggtgcaagttcttaaggcatggattaatccaagatattcgtagaacatcgaaggagcacgggttggattgcttgcctgcattactcttggaagagttactcggtgtgacaattccagacatagaatctactcgatgtgcatatgaatcttacaagatggaactacatacacataaagttcttgttgttctcgacgatgtgagtgacaaggaacagatagatgttcttctggggagatgcaactggattaggcagggaagcaggattgtcattgcaacaagcgacaaatcactaatacaagatgtggctgactatacttatgttgtcccacagttgaaccacaaagacggcttaggtcactttgggcgttatgcctttgatcgtcattccaacatacacaacaatgaagtcatcatgaagctatcgaaagagtttgtgcattatggtagaggtcatccactcgttctaaagttgttgggggcagatcttaatgggaaagacgaggaccattggaaaacaaaattggctacactagcagaaaattccagccatagtattcgagatgtgttacaagtaagttatgatgaactgagtcaagtgcataaagatatatttctcgacatagcttgttttagatcggaagatgagagttacattgctagtctactggattcatctgaagctgcaagtgaaataaaagctctcatgaataaattcatgattaatgtttccgaggaccgagtagagatgcatgatttgctatatactttcgctagggaactttgccgaagagcatatgctcaagatggaagggagccacataggttgtggcaccaccaagacataactgatgtgctaaagaacatagaggtgagcctaaaccaagaaaacttttcatatattttacaaagttcttcaagacttactgtatataatgaataatagatttgacgaccgtgacttgtctcccaggaaggcgcagaagtcagagggattttcctaaacatgaatgaaatgaagagggagatgagcttagacagttgcactttcaaatcgatgtgtggtctccgatacctcaagatctatagctcacattgtcctcagcaatgtaagcctaacaataagataaacctccctgatgggctaaacttcccactgaaagaggttcgctatctccactggctagagttcccattgaaggaaattccaccagatttcaacccgcaaaatcttgtcgaccttaagcttccccacagcaagattgaacgaatctggagtgatgataagcataaggtgtgcctcctcctatcatttgactgtatgagtaaaactataatgaatagttttttctactggtggctaaaacttgtgttgtcacaggatacaccaaaattaaagtgggtcaatctcagtcattcaagtaacttgtgggacatttcggggttatcaaaggctcaacgtcttgttttcctaaatctaaaagggtgtacaagtctcaagtctcttccggagataaatttagtctctttagaaattctcatcctcagcaactgctcaaaccttaaggaattccgggtgatctcacaaaatctagaaactctatacttggatggcacttcaattaaagaacttcctttgaacttcaatatactccagagacttgttatattgaatatgaaaggatgcgcgaagctgaaggagtttccggattgtctcgatgacttgaaagctcttaaagaactgatactctcagattgttggaagctccaaaattttccggcaatctgtgaaagaatcaaggttttagagatattaagattggatactacaaccataacagagattccgatgatatcgtcgttacaatgtttatgcttaagcaagaatgatcacatcagctcccttccagataacatcagccaactttctcaactaaaatggttggacttgaagtattgtaagagtcttacatctattccaaagcttccaccaaatcttcaacacttagatgcacacggctgttgctcacttaagacagtctcgaatccactggcatgtcttactacggctcaacagatttattctacattcatcctcacgaactgcaacaaactcgaaaggagtgctaaagaagaaatatcttcctttgctcaaaggaaatgtcagctacttttagatgcacaaaagcgctgcaatgtcagttccttgatctccttcagtatatgttgctatatatcaaaaatattcgtgtctatatgcattttcttgtctatatctatgcagaattctgattcggagcctttgttcagtatatgctttcctggaagtgaactaccttcatggttctgtcatgaagctgttggacctgtattagagctcagaatgcctccacattggcatgaaaataggcttgccggtgtagctctatgtgctgttgtcacatttccaaaatctcaagaacaaatcaactgtttttcagtgaaatgcacattcaaactagaagtaaaagaagggtcgtggatcgaattttcattcccagttggaagatggagtaatcagggcaatatagttgcgaatattgcatcagagcatgtctttattgggtatatcagctgttcaaagatctttaaacgtcttgaaaaccagtattttagcagctctaatcctacaagatccacgcaatctagtaaatgtagtcctactaaggcctctcttaattttatggtcatagatggtacgagtgagctaccgagaatcgaagtgctcaagtgtggcttaaggttagttctttaattgaacctatttaaaccgtcttttcttctgattttttaagagttccttcactcttcagagccttcttaggaaatttagaatccattttttatgttgcaggtttttcaaaggtgttgggagcagtggaaattatttaaagaagttggaagtgaaagaagctgaacaaaatctaagtgctgaaaaagtgtcagaagattggacgtatggatcaagtagcagatgcaaccatgctgtcaaaacatgtccagaacagaggcaagtgacagtcaccgcagaggttgaagcttctcctgaaaaagctgacaatgcagaatttcaaatcaagatcaccccacgtgaagctcaaccacaaccacaaccacgcccatgttcaaaaactttgaaatgggcatgttttacttgttgtgacttccaaaaacatctatgattaatggaggaatatgatagctcaacactacagaagagtagccaagaactacccagtgcacataaaagatcccaaagagtcagattttggggtggttagaggaagaaatcaaagaatgaagacttgggagaaaaaaaaaaactcttttgttggatgtatctctatcactcctctttatgctggtttgttttgtgcccacctaaatggcaaacttcttatatgtcttcagggttacactttttatttgtttggcaccaaaagattgagtttatctatagattttgttggtgtatatttaagttaatggcttttaaatgaataaaaatatatttgagtaaaaaatgaagctcaatctaacgaaaaaccagtcatcaaatcaatcgatcgactttggtaacaacggggaaaaaataagtgttggcagttttgtacaaacagtacacgagaatctgaaaaggagagtacaaaactaaatgtgttcgtataaatgatacaaaatttggaaacaaacacaggttttggttgggagactgtagtaaaaaactttgacatttcaacttcgcaaaaaaaaaagaatttgaacatatttatatataggcgaattgcgtatacattaacctgttttcctgtcttgccttctttgcagtaaactgtatccaagtggttttgaatcttctgtaatggtatccaatgattataacacaaacactctagtcgtcccagtcatgatcccagccatctcggtttggagccctcgctgttaagccattggcagatatgctaacactctttgctgcactacccggcgatttcacagcattattctcatcccaatcatcatcccaaccctcgtcccagtctgctgtctccacatcatggacccctgactcgttttccaagcctggtcctccactcaattctagctcacggtaaggcactccactgcctgcacggcgattcttccggcaaagacagaatgcccaaattcccccaaaaataatgacggatactattaagaaataagcgccgttaatgggcgtcactagtttttcatatgagggaaagtggaatggtaaggtgctttcttctgatgggtacatgtgaagcgcacactgtccttttccagtatctagtatgatcttgtttgtatctccactaatggatatgtttacctgtccaagtgaagatcgattcagtttagtaccttggaataactagagtaaagtttgcgttgtatcattaaaaatcacaaaaagaaaatcagacttttatatatatatatatatatatatatatatatatatatatgtcatgtcaaagataacacttttatctatagaatcaactcggaagaaccgaaagacatactttttgactctggtgttttggcagtgtcagctcttgtaaagcgttaaccggaagaacaatttttgcttttagagatgtttcaccttcattttgaactagaatcaaccagttagcagcacctgcaatcataaaacagagctttgaaatgaaaattcaatcaactcaaacaaaacctagtggagaaaacagaacatacaaagcaaagaccttgcaaattgttggggaataactataatgtctaggaaagtttcatatccttgagatcacaatcatttacaaattaacacaacgtaataactgaataaagtaaaacatatcctaaaccatcatcccagcgaattacaacttatccaactatgctacaaacagcacctgcaatatgacttttattcaagaagctaacacgactaatactattgcattgtcgataaacaggaacgcacatgctagagataccatttcaagtaaactttgaaaccaagaataccaaagaaaacatcactacaagaaggcgcaaatatacctttatcaatgctcaaagtgcacgccaccaatgaattctcagttctacatatgttagactttcctacacaggtatctacactggcagactctgagctccccttatcatcctttcccttagcaggatctttagccaaaggaggactctccttacctggctctgtctcatttttcccactctccaaactctttggaggcggtgccatgttagccggtagctttccactatcctgactatccgttaggttcgctggaggcggaggcgggctcatcggctcggttgtatttaacactttagtatcattcttctcatttacaggtatcagtggaggaggtggactcattgaatcaggctctttaggattagtgttcgtcgaattactagttggcagagttggttctgatgaggtcacattagattttccatctccgatgggttgaggattaatcaacggagactcctgaagcataaacacagagtaaattcaaatcacattgttcaaaacccttaaaaacacataaaggaatcgaattttacttgtttagtggttgaatttgaattatccttttgtgtttcttcatcaactagctcacgaaatctatcgaaggaggaagcattggagatgaacaaaatcaatagaagaagtgttaagaccgaacttctatccatcgcaataagagtcaaaccctaaattatgattcgttcgcttgatttattcgccggtggtgctcttgatttgatccaaagatacttactggatttgaaaatttgcagcagcagctcatatttcagggtatcagtggtccaaaacgcatcgcagatacgcagatcacagttcaggcgattgcgaaaatcaccaagcttagatttcacgcaaaggattggcaacacagtgggagagagatggatgatcgatgtaaacagagttgttgaaaccgaagatcgatgagagaagacgaagagtggctctggctcgtgtcgtgttggtcgcgtctgaaagaaattggatcaaatcgcagagccaaagtagtgtttcacgatccctccacctccacggagccgtcggagaattatttgggccgtaattttaaaagcctattagttgtttcacataagtccaccaggcccatttaccaattatttgattaatctagggaatttaatgaaaaaaaactctcattggtcagatccatttttaaaccctgaactatgtttttagtaaaacaaatcccgaactaaaacctgttaataaacttaacctcacagtaattaaatattaatgggatattaatttccaaaaatcgaccaaagaacaatgacagaatccgtgatccaactgaagatcgtccacctcaaaaagttccttatacacgtgaaaaagttcaaatggtaaaatagagaacaatgaattatgtttcacaagatcttccttttcaaattatttaatttaatatttgcatatttagacttgcagcaactgtcaacaagtcggacgcaacaaacgttcatgcaagcgtaaagcagtgccaaaaccacccaagaaacctcaaggacgaccaaggaaaaaacagaaaacaatggatgaagagaaccctatcactcagccaatacaatcttttcttcaaagttaatgcttgacaagtctttactttagaatatcttgtccctctgaaacgattgtttttttttgtgacaaatattgttgtgttgcaactgcttcgatagttatgttggttggatttatttaagtatgactctttggattattttaagttgttgtgtctttctttcagcttctaaaatccaaactaattaagcaattcaaaatcatttagaacgtttttttgtaataaattcaaaacagttttaaagaacatcatgtggtttttgcgctaaatacaaatgtctcgttgtttttttttttgaaattaatatcccattaatatttaattactgtggggttaactttattaacaggttttagttcagggtttgttttactaaaaacatagtttagggtttaaaaatggatctaccaaagttgagggtttttttcattaaattcccattaatctattactaccttagcggcttagcttaactaatcgaaccttataattatgttgtatcacataagtccaccaggcccattgactaattatttgaataatcttttagttttcttttgaaaacgttattatgattttttttttcttttttttgataaactctttcggctgattcggttagtcccggtaaaaagcaccgaaatactttagagtggatttctctccaaagaaccaccacattgtctgtcccgaatttggaatgttttccgactaatgccaagaaaccaccttcatttctaactaccagataaaccaattggaacaaaatccaactgacagacttcccaaacaaatgtgatttttgtttccaaggaagatcgaactcaggtctggaagttgcacctttctctaaaacttccccaaccactagacaacaaatgcttggatgcgatcataccaacactattattctctttcccaacatgtcaacatttaagaaacttttacatgtttgaacagtgaacttgttatggtaaatcatgtacgtgttaagaatataacatttggtacactctattcaagtaacatgttcatgttttcctatcattctaatgttccaacatttcattgttcattctaatgttatacaattatctaataatctcctcgctagctctaccgtaacgatttatcgcagttccctcatcttataggatctaattaacaacatcgtactttcttagatctttattgtcttacctcattaagtctctaaatccaacatgtctttgtcgaaacttcaagttttatcgacatccaacgtctctcactgcctagatgattcatttggtggatcagactctactgccacgcgctaagttaattcttatcaaggttatctctccgacagcgcacaacaaaatattggggacacttgaggttaattctttgtttgccattacatgtttttataagctaaataaattcttatatgtgcatggttgtgtgaaatttaggatcatcttgcgatatcttgatcacatattcacatgtactgaaaagcagtcaatgttattctttatagtacatatacgtatgtattacacccaaatttctttcatacgtatagatccttgctaatggcaactgtaagcaactatatatacatatatgttcaactgttcaagcacatagatggagttgccgagttggttttgctttcttcattatcaagaaacatgagagaatgagagagagaaagatccgttgtcattattagcatatgaaatcgtgtggttacatagataagaagataaaatcataaaatgggaaatataagcagaatacttttatttaattaggttaaaagctggcaagtttgattagtcgtacatctgatcactagcctctttcacacggcagtcgatatactgcaacattcgaacaaccaaaacaaatatctatcatgagtcatgacattggaaataactaaactccaaatggttttattcatacaagcattaaaaatgtacgttagtccattcttcttattacccacaacatttgaataagttacaaaacgtttgttaaatactcgatcatgtcacatattatatatttttatgtttaaaaagagttgtattagtgtttgaatttttaattaataacttctaaagtgtgtttgtataaatgttttaaaaataaacgtaacaagatagtgaccaaaatttttaatataaaataaaattgatatctcctaatttgattaaataattagttgaattcattggatcctagctatatagtttttggattcaagagtatattaaaactagttatattccaaacaaaacaaatcaacctaacataaaacaaaaataaagttatggagacgtacctgtcgcaattggtgctaaaactgatggggtagggaattgaaacaccacaagtggtaggaagtgcggccacaaggtcggtgttgaggcccttgatttctttacccgctagtttaaggcactcacatacttgtttacggtccggtgtggtctgagccaattggtacaatgacttgactcccacgcagcattgtgatggcaatggaccactgttggtcaagtaggtcaggcactgtgccagtgtgctcgtcactgtcccacactggatggttgactctgttggggatgccatgtagatcgtaaggacaatgaggcatgtgatgatcttcggagtaaacgccatttttgttttttattgcttttactttgttgaggtcggtagggattttataattggaaacactcatgaaggtcatgcgtacccgttaattatgcttagttccatatgcatgcaaatttaatgaaaattttattttttttgttgaattaagattaaaatacacatattccaaagtaaatacgttgcattccctatcgcttaattgagtttcaagaagttgttacatcagaaaactagattcaactctggacggaattataaattacaaatttcggcgattgaaaagaaactaattaacttttttttataatccgaatagatattatgggtttaagtcttaaacttatgactgatggaaaaaattgtaatggttttgtgttaagtaattttcttcttgattaatagtaaattggactgtccttgttatttcgaatcatataacaatattttctgaaataactagataagaaaatcatgaaattattatagtgaatttgttttatgatcaacagaaaataaagtggaaacatatgattaatccttctttttacacaccaagtagaaacatatgcaaatacaacggaattgcattgcatcgattttgaatagaaaagaaatgagtgtacttatgttattcttgggtacatgtcaaacaaggtggtcataaggctaagcacatatttatgaggccacacgatttcaaaagagtaatactattgccaatagtctattggacatgtggaccaaaaatggtgatcaagtggcagttcaaggaagtaatggaatagagaagaaaaaaatggtaatggtccaaagcatcatcaaatggtaaagagttggagacatcaaaggaaaatgacaagagaggaaagcatggaaaacaaatagacggcctaagagatttatatatttatcgaacaaggactcttggaggttatacggtcacacgtacttggagaaatccaaaaggatctccacaagtcctaggcaagttatttacaaaaaaaaaaaatcagaaaaagaaaaaaaaaatgtcgtaggcaactcatattagaaaatagatataatctgtataatcgtaaatcgatctagtgcatgataaaaccatttttttgtttttcgttttatacatgcatggtaatgtaatcgttgtaattaatttatgcttggaaaacacactacaaacttcaataaaagaattcagtaaaagttctagggtcgatcgacattttaattgttttggtatgtttctggtttttcacttttaaaaaggtaacgcttacaagagaaagaaaaaaggtaaggtgtctttagcaactgcatgtagggtcgatcgacatattacacactcaccgacgaaaatattacgaatgatagagtgagaagtgtaaatgagcaagttgtgagagtttgaagaagtagataaggattggttaacaaagagtgatgagtacactcttgaggatattttagagtgaattttgaggatatttgaggatgaattaatgaaatcaaaccttatttcagtgatattctatagtttgttggttccacatgtattagggaatcgaaacatagttttactttctttctttttacaaatgagtccattattggactatcttaattaatatttgattataacttattctatttacatctacacaagtcaactgataataatcgtgttaagagaattgtgtacggactgtggagaagaagaaggaataggatgcatccaaaagcagaacgtgaccaaagttaatggcaagagtttgaagataatacataatcgtaaattcaatatatcattagaggagtacataacacagacgaccaattaaatggaccgtcatatacaaagaaagacatgaaaacacaaaatctagaaacacaacaataataacagtaaaaggatacactagtgtgtatatagtgtgacatcttaattatttttaatactctctcatcgattatatgaaaacccttcaacgtctatcttcttttgatcacctgacgctgcaaccaaccaaatacatcaatcatatggttactaccactccattaaatattaggacctcaagtaaaaatgtaataaatatagagtgagatagaagataacgtacgtgttacagttggttctggcactgatggggtaagagatcctaacacggcaagcaccagggagacgagcagcacgaccagcgttaagtcgagaacccaaggctctcgctgctccctggatacaacgacaagcttgttggcggtcacgggtggtacgagccaagctgttgagcctctgaacgccagagcaacaccctctaggaatgaaaccgcctcgggtcaagtagttatagcattgacctaagctgccggtgactgcgccgcacgagattgctgcctcggacgccattggagcggtcactaacatgcacacaatcaccaaagttgacaacttcaagagtccctccatatcttaattttttttttttctctttttacttagtaagtaatggattggattggataatgaagaatggtaatgaaggttgggtttatatagagagagcttatgagtgcaaatgcatgaaagtagaaggtgtgaggttagttggtggttggtttcatttattgcattgctttctcttctcttatctttcgcttttgtagttttaattactacgtactctccgttttgtcagatctatactatatactatataaaaatgtaattcactcttgtatacacatcctttttttttttttttttctgaaactgtgtctggcctcgctggtacaaaataagaaacgatttgtcttggatccctcaaactatagacaatttaagactagactaggtaattgatattgaaccaaaaccatggttgatggttcagtaacttttaagaaacgtaaatctattaaaccataatgttacaaggacaaagtttttgctttcgactattcatgtttgatgaaaaatcttttctgagagttgaacggccaattccatattccaagtatctaaaattgtagaaacatacatatacttgactatgtgactcaatcccccttgccaaattctccaacattcatgctgctgctctccaccaccgtctctcttacaaacctacaacaacattttcaagaataaggttcaagaaagaaagatacaagtatgaattggaggggacatgaataccatttaccttgccagcttctctcgtgacgattgtaagacgtaaatggagagtacaaaagaaaatgtgagagctgatcacaagtaaacaaaaaaatgagaatacataagtgtatgagcttattgtcccttatttaattaattgtttagcaagacgaaaaatggtttacctgagccaaacaggacatagaatcctgaggatacatcaatctctgactgctccttcctgcatcacaataaagtatctcagccacgtatcagtaacgtggtatccttaagctttgtgattcgaccatatgcacaaacttattagctaggagagataggaaaagaggtgagaaaagttattgtaccatgtgtatctaacaagaacatgttttggccagtgttgaggatcccaaaactgtttgcggatctccgggtgtgtattcagatctgttcatgggtaagatctcaactcaattaaactataactgagtgctactctaaggcaagcagaaatgaaaattcaataatcagagcagagaaagtatgagattcattagttacaagaaattttcaaagccactattaacataaccatgaaactgtaaatttatttagtaatgccaccagacagacagattgaatcagtctatgtaatcgacacaaaaaataacaacagaaaaatggactataatgcaaactgccaatatattagcacccagtgtctctaagaaggtgaagatgatattaacttacaccagatactgtaagactctggatataataagaatagtgtcaaattgaagccagcttaactagggccataggctttgcaaccaaacatcacaacaccgagaagctatcacctaatatatcatataatctagagttttcaaatatgaacgtaggacttggcatatttggtttggccagaccagacaattctcttattcgctcagaaaacagttgttaataaacaggagcacctaatcaggacacaatatagctagataggtagtattacgtacagctatgaggcatgtcgataacttgagctgtgactccaagcagatctcctccagaatatctctgcgcaaatgaaaaaatcaacccacaccgaaaaatccaaaaactggtattacataaatctgccttttttcctggtagcaaataatctaatcaatcaaagcttagataaaaactcaaaatcaatgctaaacataccaaatttacatcgatcatcggaacttctgagctcttacgattaattaccaaaagccagtgaatcagaaatttctcacttccaacttggaattttctgcatgtaaaaatcatccataaacacacatcaggcacaaaattactcttaatttgcatatgaataatgtacaaacacgataaagatgtagccatgtcagtactccatgttcagcacagataagacatcagaaaaacacaaactgcagtaagacagagctaaaaaaaacatacgaaatggcttaagctaatcaaaagagatgagagaaatggcgaaaacatcacagtatcttcatcatttcctttcagagtagcaacaatcgaaattgctaaatacaatctaaaagctggttaaaccagtaatgaactaagcaagtaaactcaattcaaaagcaccaaatagagctatacaaaattttcatttgaaatgcaatcaaaataaataccagaaaattctcacatcttataaggatcagttcctgtgtagccaattggtttcgctattgggatcaacacctaaaaattggcaaagaaaggcaagcttcaatctaaatttccaaattatccatcaaatgtcttaagcctatttgcacacagtacctcgcgattgacggcgaagatcgggcaatgctttccgatcacatcatgccaagtcgttctcgactgccagagaatcaatagatccttagtctccgatcaaattagaaaataatctcagctaatatgttaaagagaagtacgaacagagtgatactgccccatcttgctcatccggacgatatctccaggtcggtaagcgctggagagaaagggaaatgatagagatatcagaactagagcttgaataaaagcgttccacggtcgtaatcctgccaccgcagccatgcccgccataactccgcttcgttggcgaggtttctccgtgaaatttgccggtaattttcttcgccgggagatttagaattgaagcggaggatgtcaaatgtgagaactgagaactctcatccgtgttattattgggccaaaatatcaggcccaactttattgtttccaactcagttttgaccaggtatagggcctagtaactgatatttgttttggtcggagggcctggtaactgattattgacgaaaccaaaaaatcaacttatatcagaacaaaaaaaaagagacatggtttaacatattttagtgatgtatataatttcgttttaaatcattaccaaaaaaaaaaaaaaaaaacacgaccatctgatctgtagctaaacggattgtgttatgagattttagataagaaaattttacacaaagtattagaatacattagtacattgcttcctaattttgatttaaaagaccgtgttatatatttcgaaatagaaaagtattcacaaaaaattatgaaaatatagtttcggggtgaaatgtcgttgttataacgactaaatgttaaaacaaatatgttttgttatatatatttaagatataacgatgttcatttttggactgttatattcacatcagtaaaatctgttgctttaaatattatacataagtttttaatattccatgtaaaattcttaaattttgattttgttttgcagattttctatattgttttgttctgtgtataacaagattttgatttttgttttcaaaacgggactaaaattagagatttttatatatttttttttccaaaacaaaacgtttactagatttttgtaattggagttttcaatttaaaattcttttatagaacaaaattaattattaatttatctaattattggagttatttattttgttttactaaccatatcattatatgtggataccacgtcaaaacaaaatcatattcgagaataacaggtgatcaaatttctggaacacgtgaaacacagttggatccccttataacttaactcgaataaaggattttgaagacaatgattctcaaatgttacctttttcgtttttaaaagcataatcagttatgataatcgagcttattcaatagaaaaaagcgcgactgcgttagttaaatcataaaaaaaaatttatatttgttaaggtacatgagaatttagtatgtcatagaaaaaaaaagttaaaagtttctaactttttgaatgataaaaaagataaagctaaaccatgaaaacatgtattaaaatctttgacatttctcttaaaacattcataagaatcacaactctataaaaacttaatggaagaatatctgaactttacaatttaaccaactatagtgaaatcaaaattctgaacaaataacttcccaagtcactctaatcaaacttcaaatgatgtcttaagaatttaatgctggtcgttgtttctaaatactgcatcgttaaggtaaataaaaaggtacacaaaaagagcgacatctaaaagggtttcaagttgcatacacaaagttaagacaaatttgttttttttttttttccgatgcagtgaaaacaaaaaagagagagaagaaagaacaatcaaataacacaaaatcggtcctcaacagtaatcacttgggatctttcaaaacctagaagaaaaaactcatctttcttcttcttcttcccctgagacatctctcgattctttgtactcgcttgttttgttcgaactcaatcggattttcaatttcctgggcgtagtttacaacgaactgattccttggtttgatcaatcggtgtgttcttgtatcaatcgatttttttggttagtttttaggtttttgttgtttttcatggctgcggatctcgatgatttggaagaagagagttcttcctcattatcaccaccgcttcttccgccgcctcggtctccgttgaatcagccggagttgtggatgagagttgaggaagcaacccgtgaaattatagagcaggttcatccaactcttgtctccgaggatcgacgaagagatgtgattctatatgttcaaaaacttatcagaatgacacttggatgcgaggtaaatttgaataaaacattctctgtttgcattaacatttggataaaaactttaaatgttggaactttacttgagtcggcgatgttgttctgcattttattgagttctcttgatgcaagttgatggctttttaatgttgtcttgtgtctttttattcttaagttgatggcttttcttgttagattatctcaagtcatctacttgttgttttatatttcgaaagtggtgtgcaaaaagcagaccttttttctattactgaccagagattctgcaatgttgcggcttataactttgattgactatgagtgtggtttgcaaagttgtgattttttctactggtatgtgtctttcaggtacattcttttggatcggttccattgaaaacgtatcttcctgatggagacattgatctcactgcttttggtgggctgtatcatgaggaagaactggctgccaaagtttttgctgtacttgagagggaagagcataacttgtcctcccaatttgtggttaaggatgtgcagttaatacgggctgaggtttgtttacataatctctgtgttattcaaattccagaaactagagtctgcagtgaccaatgagtattccaagtttgtatatggtgtttatgcatgcttatcattttgattgttatctcctcaagtacctaaatttcttttcttttgcaggtcaagcttgttaaatgtctggtgcaaaacatcgtggttgatatctctttcaatcagattggtgggatttgcaccctctgctttctcgagaaggtaatctgtcctcttcagtatgaccaattgaccatgctgtgtcaaacaaatttgactaatttttttaaaaggtaaatacagtttaggcttagtttatctgtttaatagtatatgaaagcagaagttgaatgtcactaacctgccataatgacattggttccacctaactgcctgatgggtttctggtaactcaatagattttcttgaatattgcaaatcgtttgcaatatcacatacacgcaataatatgtttgaggcgcatttatctagaagaatattcatattagcaattttcgaagtacgcgtttgtataagataaagatttacttctggaaaattgacgttgactatatgattacgcagattgatcacctcattggaaaggaccatctctttaagcgaagtatcatactaattaaagcttggtgctactatgagagccgtattctcggggctttccatggattaatatcaacatatgctttggagacattggtcttatatatcttccatctgttccactcatcattgaatggaccactagcagtaagggtcttcagcaattatgagggatgcttcatgttttagtctcatcttgattcacttaactttttttatcccataggttctatacaaatttttggactacttcagcaagtttgactgggatagctattgcattagcctgaatggtcctgtctgcctttcctctctaccagatattgttggtaaggatttcctctagtatacagaaaatttagttctttttgcgatttcagtatctgcaatttctttctttaatttctgtagttgagactccggaaaatggaggggaagatcttctgctgaccagtgagttcctcaaggaatgtctggagatgtactctgtaccatcacgaggatttgagacaaacccacgcgggtttcaatcaaagcatcttaatatagtcgatccgcttaaagaaactaacaatcttggacgcagcgtaagcaaaggttgactgccttcttcaaccatcacagtttttattgtcctactgctatctctctctttatggatttagatgtttgagtctttaagaggcctaagacagtagcttttgacctgtccctgtccagagtattagcgttatagaatatttatggtgggtttacctgaaattcttgggctagggtatgtaggttttaagcgcaggctaaaataaagattgtgatattctggtatgtattttcaccctggaaatgaagaaatgtatcaacatgagataaaaaaacctctaaattttagtttgctctggtaatcccgtgaattttatggtctagatgactctctttattggtaaatttttaaagactatggattttactttcttcttacacaggtaacttttatcgtatacgaagtgcattcacatatggtgctcggaagcttgggcaactttttttgcagtcagatgaagccataagttctgagcttcgtaagttcttctctaacatgctactcaggcatgggagtggccagaggcccgatgtccatgatgctattccatttttaaggtacaacaggtacaatgccatattgccagcttccaaccatttccaagaaggccaagtggttaatgaatcagaatcctccagttcgtctggtgctactggaaatggtagacatgaccaagaagactcgttggatgcaggagtaagtataccgagtacaactgggcctgatttaagtggatcacctggtgaaacagtgccttcggtttcagaggaacgattttcgggagacgcaaaagacttggctactttgaggatccaaaagttagagatttccgatgatgcaatgaaatctccgtgccttagtgataaggaaagtgactctcctttgaatggtaagcatcattcttttaatcagatgagaaatggagaagttttaaatggaaacggggtggggaaacagcaagagaattcctggcatactggttccagaagagttaaagatatacatattaatgagaatgagaatgagcatgttggttatgaagacctgccattcgcaagtgcagtaccttggccacaggaggacatgcatctccactactcaggtcattgtgtttctggcactccgaatatgctgtctgacctctcaggcgattacgagagtcagcttaacagtttgcgatttggtcgctggtggtttgattatgtccaaaatggtcctatgtctccactatcacctcctgggctgcctcagctgccgaacaacaattcatgggaagtaatgcggcatgctctgccattcagacgaaatgcgcccactccagtaaatgcaaatggagttgttccgagacaggttttctttcatgtgaaccctcagatgattccaggtcctggttttggtatcgaggaattacctaagccacgaggaactggaacatacttccccaatgcggtaattacttatttgcctctctaacatctcttacagacactccgtaaatggccaagcttctaacgtctcctttatgcagaaccattacagggatagaccgttctccccaagaggaaggaactcacaccaagctaggtcgccgcgtaacaatggccgaagcatgtcacaagcgcactcagaaatgaattttcctgacagaaacacccgtgagagacagcttcattatcccaaccaaacaaatggttcatgcgatatgagtcacactgattcacttgatagctttcctgataccaatggctctacaaatcatccatatgaaaaggctccagactttaggcctacagagcctctaccagtggaagtactctcccctcctgaggacagcaagccaagagatagcattgaaggtcatcataatcggccacatcgtccaaaacctagaccctcctcaacacaggaagaacggtacagcatatatctcttacccttaaaaacatattgtcttcactgaattattaccatggatcaccaaagccactatctaattcactgtagtgatgtacatgtagggtaacacctacacagtcataccatttgacggatgatgatgagttccctcctttgtagctctggcctgaattacaaatgcatgctctctagaccgttataggaacaggtatagttttctaacttggtttgtctcctaagttatttgtttttacctcctgcaagcgcaaaaaaaaaaaaaagaagaagaatggagctgatatgttttgggctgtggttctttcttgtatgttatctctggtgctatagaataatttatatgtatctttatcaaactctctggacaaaacctttgcagagctttgtattttctacttagacaggtttgctgagtgtattataggatgtttttttttttctctcagtctctattctatcttggtaattctccttcttgtttcttgattcttcttcctaatggatgataaaaaaaaaagtaacaaggttttggtcattataagttgattccatatcatgtcttcttttagtaaaatatgtcattagttgaaaagtgcatgaaatagtaaagagttttaaaaaaaaataaataacagcttttaatatggctaatgcgttcagtttttgtgattggtaactatcaaaatggtaaggtccaattgttgacatcaaatcgtaagatttttttagggtgagcagaagtataatatcgctattttttccgcttttgtgattggtaacaatcaaaatgataaatcattcattgtgaaaatcatcactgaattccttatgttttgttttggtctatgtatagatttagttgaacccaatgtgacaagtttattattctctcaatcagtgctggattctgcaaatcactttcaaaaacattgaattcgaatattgtaataagaaaaacaaaaattgtggggaggggaaatagtcaaataaaagggtaatggtgtcaaagtcacgcaatcatcggttacatacattactcttacatatcgacatacttaacgttaatcaaatctcgtttgacaaaccatcatcaataaagagcacaagaacaaagaagaaggaaaaagtagagcttttttgggaatcagaatcatcatcgatggtgaatccaaagcgtggcaataggtttttcaaatacagaattgtgtaaattgctctctatcttcttctctttcaaattctcttccttttgttgtattcaataactttttccccactttgatgggctgcaaccacatattcttcttctatctttaacttttcccaccaaacttctccttttttttctttttttttgggttctgggtctgcttttttgttgttgttgttgttgaatgaaggtccgtaagggaagaagacagatgattgcgaaagagcaagacgaatacaaattacgccaacaaggtcttgtttttcaaatggcttctcttttcctctctttcgattactccttactcttcttttggttgctcttccgcgttttcttatacgagaatcacgaacgaaaactccagattttctagcacacctcttctctctgcatcgccatcttgttttttcccccaaattttcgattttttttttgtataacttttgagattctgatagatccggtacggagtcatgtatatggagatttcttctgcttccgatgattcgatcgcttacgttgagacagatccttctggtcgctacggacgtgtaagcttactctctttctcttagctgattgctattttgatcaatccccaaatttgattactttttggctctctctctttcgattatcttttgcataactttggcactatctcttccattggtgttgttctttggcttggtaatatacttgcttctagttgctggacatttgctttgatcgtagcttctcctctctttgcattttctagagttgatttgtttttgattactgggtttgctctcgaactttgggttgatttcagttcagagaagtacttggcaaaggggcgatgaagacggtttataaagcatttgaccaggttttaggaatggaagttgcttggaatcaagttaagctcaatgaggttttccgatcacctgagcctttacaacgcctctactctgaggttcatctcctcaagaatctcaatcacgaatccattattcgttactgcacgtcttggatcgatgtcaaccgcagaacattcaacttcattactgagctgtttacatcaggcacccttagagagtaatgagaatcccctacagtgtgtgttaaacaacaatataatcttatgcttgtgcagaattccttaaagagagaagcttgttgtgtgtgtcttacatctgcaggtatagaaggaagtatcaaaaggttgatatccgggcaatcaagagctgggcacgtcagatcttgaatggtcttgcttatctccatggacatgatcctcctgtcattcacagagacctcaaatgcgataatatcttcgttaatggacaccttgggcaagttaagattggtgacctgggcttagctgcaattcttcgtggatcacagaatgcgcacagcgtcataggtattctatgtctttctctatgtttttgaatagagttttgtgagttccataattaatctttgccttttgcttgcatataccattaggaacgcctgaatttatggcaccagagctatatgaagaagattacaacgagcttgtagacatttattcgtttggtatgtgtgtcctagagatgcttaccggtgagtatccttatagtgaatgcaccaaccctgcccaaatatacaagaaagttacatcggtaagctaatggcctgaggctcatatcaatcatcattttcttctcagaaaatattttgatatattaacttctttgatgcggatttgattcaggggaagttgcctgactcattccatctaatccaacacacggaggcccaacgttttgttggtaaatgcttggaaactgtgtcaagaagattgcctgcaaaggagctcttagcggacccattccttgccgcaactgatgagagagatttggcgcctctttttagattgccgcaacaattggcaatccagaatttggctgcaaatggaacggtggtagagcatctgccgtcaacgactgatccaactagaacaacagatatgtcaataacaggaaagatgaactcagaagaccacaccatcttccttcaagtacagattctagatggcgatggtaagttaaagttctacttactacaaatgtcttgcctggtttgattggaacatgaaatttgttgcgttgctagaaacttgctcagctgaaccgggctacaggatttgtagcacctttagtattagctattcatcataagatagaaatggacgattgtaaccttagcttctgatttttgtaaaactttgttagaagaatcaccaatggaaaatgtttttatgaatctgtttggctgtggcacaggtcacatgaggaacattcagttcccgttcaacattttaagtgacacacctctagaagtagctttggagatggtgaaggagcttgagatcactgattgggatcctttggagatcgctgcaatgatagaaaatgagatatctttgctcgtccccaactggagggccaatgactcttctatccggcacgaaagctttggtcatgaagatgatgaggacaatggcgacacagagggaagaacgcgccttttctcctctgcttcttcctctcacgactctcctgtagcagttagagagaacaatgacgattctagtaacgatgtgatcccagatatggatgatggcaatagaagctctaacaggttgctgaattcttcaacataccactactcacctgccattgatgatgatcaaaatcagcaacaacggagacgagtaaggctacaacagaaaatgagatcgctggtggacacgagaacacaggtgctacaccgatcgctcatggagttgatcaacaagcgtcgtgggcgtggctttgacccgaacacaaacgagctacaacctcaaccgtcgtccactgatttcattcgacgatgttgaaaatagtatgatgagagagcctatttgtgactctttcatgataaagacagatcttcatattggtactagcattttgatttgatgatactatatgaaataattgtttagagtgctttgtatatatgatattcttagggaagtgttacctttttagctctatctcgatttgaaagcgatgcaaaaccgctcgaattcgatttcaagtacgaaggtagcttcttccctgtgttaaagagacaatttagattacattttatgcattttccattacagtggtaacttaatattcaaataatcataggaattaaggatttttctaatcttgatacgaaagttgtttatcttctcgtatcaaacgtagaggcagttgaacaaatttacaaacgaaaatgttcttagattggtataaccattcgtcgaaaactataaagatttacttttatttaaccataagatgatatcatctatcaaaaagtgttaattatagttgatcatatataataagaacaaattataaaggctatatacaaaggaaatttgcgttaattaggttatctaaccgcatgcatccaaaacaaatcatgtatttaaaaacttgatcacaacttgagcaaaatatatggagagcaaagggccatcgccaatagttccacttgtgcttgtggtactcttcggatggttcctatgcggctcgtaccttgtctcactattagaagatgttgtattaccaatcttacaaaccggaacgttcattgtaggaatctttctcttgcttctccttttgcttctccatgtcttatcttcttcttggatctatccatggatcccttctcttcttcttttaccatctccggcttccacgacttctactgactcagacagctttggtcttggatcgtttcttttgttcacactttttctcatctctttctggttttttgggtcactctaatgtttattctacttgtgaattgtatattcctgattgatcatgcaaaatattgctatacactttatacatgcaaaatattgctatacatgttgtacatcatgcaagattccaacacaaaatgtttagcaagaatttgtttaaaattaatttattattaattactgcatcgctcttattccattttcaatgtaatacaacatatatcatccgtgaaaacaacataagagagacaacctagctactaggctactagctaggagcctaggagttgcataataatgagtcgaaagaagatgttatataataagtctccgtgcaaccacctttgacgaccaaccagcacgaagtacatgccacagacgaaagatcacatgcattgttttgggtttttacattataaatagggtcagattttgagtaatatgtgtgtttaaatgaggtaaaaatatataagaaaataaaattgcaagaaacttcttacttcattttattattttttccaaaacttttgtgaagatgtacaaaacatatccaagaaaataatttcaccaatttggtaaatattgcatgattggatatatgtgcaatgtgctatacaaatctttatcaatgcttaaacttcaaatagcttttaccaaactatgttataaaataactttaaaaaaaaaaaaaattaaaatgttttatatgtcatttgaacatttctttgatataaatgtccattattagtccattatatacttatgcaattttcacccaacaaaccgttggatatatgggtggggcgtttaagaggcgctcacttgacccgagtacccacccggttcgttcctttagttccggtttagccttgtaacattttctttcgtttgttttcttcttcatcttcttctcaaatctttcgcgtttacggtttcttcgttggcaggattcgaacgaaaagccacgagactacgtgattcaacccgaatacgatccgaatcaggaagctcctttgaacatatttcatccccaatttcaaagctcttctctttttggctgatgctttgttcaatggcctctctatcggtaagtctcctcttacaatctctcgattgattcacattgcacaacaaatcaatccgaactctgcgtacaagggttcatcgatttctatttgtagaacgttgtggttcgtctaatttgattccattgctgttgctacataggtatgttgctataacaatctttaactacagttgcttcgagctagagacttgtttacttcgatggtgtataaccttaaaataagattagggtttgggttttctgttgtgactacaatcatcccctcggttgaaatttctctaagtcattagggttcttccatctattgggtctaataagaagaagaaaaggtgttggcttttggaggataatgtgtatattgtgcggtatacaaaagtggtctcgtcaggttgcaacgatgctaccttggtttgtcatacctttgattggactatgggctctctctcagcttcttccaccagcttttcgttttgagattacttctcccaggcttgcttgtgtatttgtgctcttggttactttgttctggtacgaggttttgatgcctcagctctctacttggcgggtacgtagaaatgcccaacttagggagagagaaagattagaagctattgaattgcaaaagttgaagaaaaatgccacaaggcgttgtcggaactgctcaaatccttacagggaccaaaatcctggtggtggcaaatttatgtgttcgtattgtggacatgtatctaaacggcctgttttagacatggccttgtcttccggattagagatttctggttcagggattttgaaggatcttgttggaagaggtggaaagatgttgaatgggaagggatggagtgagaatggatatttgcacaggcaagagtggtctgacaacagcacatggactagcgggtcaagctattggcggaataatagtggcgatacgtttgaaggagatgaaaattgtttggtggagaaatcatattctggtggtgttgtttttgcttgcaggttgctgacttcttttttcatgagcattttgtggctttggagaaagatatttagatttagctcatcagttggtgattcatcacttgaccctgagcagaggcggatgttggctaggcagggtgagaacgggacaagctgtcatgaaagtagggtagaaaaggcacgtagaaaagcagaggagaaaagacaagctaggctagagaaggagcattcagaggaggaagagagaaaacaaagagaggaagtagcaagactagtagaggaacggagaaggctgagagatgagatacttgaggccgagaaatgcagcaaattatcagtggctgctaaggagaaggacactaaggaggcagaaaagaagcgtcaggagagaagaaaagagagagatagggcctcaagtaagagcaattctgatggtgaagaggttgacaagagaacaagaaaggaaaccgagcagaagcgtgggctttataagagtgatcatctggaacaggagaggcacgcacctgataatttaagggtccccaacatggaaaggagacatggacatggtttagaaaataatgtcaccagtaacggtacaaaatctggtggtaggtactttgatcgaatgaagggtacatttttgtcttcttcaaaggcttttactgatagtcgtttatttgggagaggtgttaatacttctgctacaattgcaagagaaaacaagcccattggttctgcagataattctcatacctatgctcattctagtcatactaatcctcctgaattcgtggctatgaaatatgtccctaatgaagaggaaaggaacactaataatccagtaagtaccctttccaaaatgtctcatctatttggggtctatagtttcgagtgactagtgtgcttaaagaataaatttcacctgtactcatatgttttctgttataaatgatttcgtcttgataaattttcaagtaaaatctaattcaatttacttgaaacttatttttgtcaatgaaaactgaatatttgatactgtttcctcaggttgtttctgagccaaaaccgagtagagaacctaaaaaatcatggcaccaactgtttgctcgttcaactcctgctcctgtttcctcaaatgttaatactataagtagacctagcacgaatccccagccaaatgttcagagctcacaggttcccagtcaagtttcctcaatacgaacctttgacaatcccatcagttttgggctcccatcgccattcaccataccggtgtactctagtggatccactaccagtagtttaggtttctcacctccaacagaacttgtttttcctcaacccggtgaagatgagcgttttgaagatccatgttatgttccggatccgatatctctactgggacctgtttcagaatcacttgatttaagagctgctgggtatgaaactggcataggacaggtaaaataccaggcgatgaagaatacaccttcttgtgaagccaacaagccatctccaattgagtctcccttgtctagatcacgggctgcggatgaaaaacaagctaatgatggaagctggcaaatgtggaagagtcctctaggccaaaacggtcttggtttagttggtgggtcagcaaactgggttataccttccgaaataagtagatctatcgaggaaagtgatatgcatcacgcgcctcagcatagaacagaatcattattttcaaaagaggattgccagcttcatcaaggtgcttattcacaaaggaaggactatcttgaacatgatcagagaagtggcgttttcagccccattactggtccaaccactactgatccttggtctcagaaaatgttcttccctgcattatctggtattgagagtcctttttctactaccacacaaacaaaaagcgtcttgaacaatgcggcagggtacagaagtccaacgggatctggttcagacaatccatttgaacatccttctcctaatcactggctcaagtaagtcctgaaaacttgttgtttctgtagttttctgagatggcaagacaaagtgtaaatcttgaaaagaagcagtaatgatttggtagaatttgtgaatgtacaggaaggtgaagagctcagggaatgggagtgggaagcaagttttagcggccggtgaagttgagaaccaccaaaaagatgtagaatcattctggtagtcacaaaattaaacaaaatgaggtcaaattttttgcagatacacacacgttgactgtgtctgtctgtctctgtcttttgtcctctcgggtcttcaatggagatatagagataatttagattacattttatgcatttaccattacagtgataacttaatattcaaataaataataagaattaaagtatatttctaatcttgatacgacgaaagttgtttatcatctcgtatcaaacgtagaggcagttgaacaatttaacaaacgaaaatgttcttagattggtataaccattcgtcgaaaactataaagatttacttttatttaaccataagatgatatcatctatcaaaaagtgttaattatagttgatcatatataataagaacaaattataaaggctatatacaaaggaaatttgcgttaattaggttatctaaccgcatgcatccaaaacaaatcatgtatttaaaaacttgatcacaacttgagcaaaatatatggagagcaaagggccatcgccaatagttccacttgtgcttgtggtactcttcggatggttcctatgcggctcgtaccttgtctcactattagaagatgttgtattaccaatcttacaaaccggaacgttcattgtaggaatctttctcttgcttctccttttgcttctccatgtcttatcttcttcttggatctatccatggatcccttctctttttcttttaccatctccggcttccaccacttctactgactccgacagctttggccttggatcctttcttttgctcacactttttttcatctccttctggttgtttcagtcagtgtaattaatgtatattcttcttgtacacaaatagtttctctcattggaatttgtattttcctgattgttcatgcaagatattattatacacttttttacatcttataggaaagaccacttgataaatcatgcaagattccaacatataatgtttttctttttgtaatgtttaaataattaattactgcatcactcatatttcattttgcttgtaaagaaactgaatacaacatatatatatcatctgtgaaaacaagatataagaaaaagaagtaggggtgaaacaaatcaaacacaataaaaaaacctagctagctagctaggatcggagttgcataataatgagtcgatagaagatgttatataagtctccgtgcaaccacctttcacgaccaaccagcacgaaggacatgaaatgaaagcaacaacatgacacagagggaagatcacatgcattgccttgggttttagattcaaattttagggtcagattttgagtactgtaatatgtgtgtttaaataaggtaaaaactataagaaatttttttaagaaacttcttacttgatttatcattttttccaatatttttgtgaagatgtaccaaacatatccaagaaaataatttcaccaatctggtagataatgaatgattcgatatagtatgtatgtgctataaaaacttttatcaatgcttaaacttaaaatagctttgaccatatctaaactatgttataaaataacttttaaaatattctttttttaaaaaaattcttaaaatgttttatatgttatttgaacatttctttgaaatgcccattattagtccattagcccaacaaaccgttggatatatgggtggggcggcgtttaagaggcactgacttgacccgactacccacccggttcgttccttggttccggttttgccttgtaaacattttctttcgtttttcttcatcatcttcttctcaaatctttcgcgtttacggtttcttcgttagcaggattcgaacgaaagccacgagactacgtgattcaacccgaatacgatccgaatcaggattctccttccatcatcttccatccccaatttcaaagctcttctctttttggctgatgctttgcttcaatggcctctctatcggtaagtctcctcttaccttctctcgattaattcacattgcacaacaagtcaatctgaactctgcgtacaagggttcatcgatttctatttgtagaacgttgtggttcgtctaatttgattccattgttgttgctacataggtatgttgctataacaatctttaactacagttgcttagagctggagacttgttaacttcgatggtgtataaccttaaaataagattagggtttgggttttctgctgcgactacatcctctgggttgaaatttctctgagtttagggttttctgatacatttggtttgataagaagaagaaaaggtgttgccttttggaggataatgtgtatattgtgcgttatacaaaagtggtctcgtcaggttgcaacgatgctaccttggtttgtcatacctttgattggactatgggctctctctcagcttcttccaccagcttttcgttttgagattacttctcccaggcttgcttgtgtatttgtgctcttggttactttgttctggtacgaggttttgatgcctcagctctctacttggcgggtacgtagaaatgcccaacttagggagagagaaagattagaagctattgaattgcaaaagttgaagaaaaatgccacaaggcgttgtcgtaactgctcaaatccttacagggaccaaaatccaggtggtgggaaatttatgtgttcgtattgtggacatgtatcaaaacggcctgttttagacatggccttgtcttccggattagagatttctggttcagggattttgaaggatcttgttggaagaggtggaaagatgttgaatgggaagggatggagtgagaatggatatttgcacaggcaagagtggtctgacaacagcacatggactagcgggtcaagctattggcggaataatagtggcgatacgtttgaaggagatgaaaattgtttggtggagaaatcatattctggtggtgttgtttttgcttgcaggttgttgacttcttttttcatgagcattttgtggctttggagaaagatatttagatttagctcatcagttggtgattcatcacttgaccctgagcagaggcggatgttggctaggcagggtgagaacgggacaagcagtcatgaaagtagggtagaaaaggcacgtagaaaagcagaggagaaaagacaagctaggctagagaaggagcattcagaggaggaagagagaaaacaaagagaggaagtagcaagattagtagaggaacggagaaggctgagagatgagatacttgaggccgagaaatgcagcaaattttcagtggctgctaaggagaaagacactaaggaggcagaaaagaaacgtcaggagagaagaaaagagagagatagggcctcaagtaagagcaattctgatggtgaagaggttgacaagagaacaagaaaggaaaccgagcagaagcgcgggcttaataagagcgatcatctggaacatgagaggcacgcacctgataatttaaggggccccaacatggaaaggagacatggacatggtttagagaataatgtcactagtaacggtacaaaatctggtggtaggtactttgatcgaatgaagagtacaactttttcttcttcaaaggcttttactgatagtcgtatatttgggagaggtgttaatacttctgctacatttgcaagagaaaacaagccaactggttctgcagataattctcatacctatgctcattctagtcatattaatcctcctgacttcgtggctatgaaatctgtccctaatgaagaggagaggaacactaataatccagtaagtaccctttccaaaatttctcatctgtttgttctatggttttgagtaaactagtgtgcttaaagatataaatctcaccttcactcatatgttttctgttataaatggtttcaaaagttcattttcgtcttgaaacttttttttgtcaattaaaactgaatatttgatactgtttcctcaggttgtttctgagccaaaaccgagtagagaacctagaaaatcatggcaccaactgtttgctcgttcaactcctgctcctgtttcctcaaatgttaatactataagtagacctagcacgaatccccagccaaatgttcagatctcacaggttcccagtcaagtttcctcaatacgaaccttcgacaattccatcagttttgggctcccatcgccatttaccataccggtgtactctagtggatccactaccagtagtttaggtttctcacctccaacagaatttgtttttcctcaacccggtgaagatgagcgttttgaagatccatgttatgttccggatccgatatctctactgggacctgtttcagaatcacttgatttaagagctgctgggtatgaaactggcataggacaggtaaaataccatgcgatgaagaatacaccttcttgtgaagccaacaagccatctccaattgagtctcccttgtctagatcacgggctgcggatgaaaaacaagctaatgatggaagctggcaaatgtggaagagtcctctaggccaaaacggtcttggtttagttggtgggtcagcaaactgggttttaccttctgaaataagtagatctatcgaggaaagtgatatgcatcacgcgcctcagcatagaacagagtcattattttcaaaagaggattgccagcttcatcaaggtgcttattcacaaaggaaggactatcttgaacatgatcagagaagtggcgttttcagccccattactggtccaaccactactgatccttggtcacagaaaatgttcttccctgcattatctggtattgagagtcctttttctatcaccacacaaacaaaaagcgtcttgaacaatgcggcagggtacagaagtccaacgggatctggtccagacaatccatttgaacatccttctcctaatcactggctcaagtaagtcctgaaaacttgttgtttctgtagttttctgagatggcaagacaaagtgtaaatcttgaacagaagcagtaatgatatggtgaaatttgtgaatgtgcaggaaggtgaagagctcaggggatgggactgggaagcaagttttggcggccggtgaagttgagaaccaccaaaaagatgtagaatcattctggtagtcacaaaactaaactaaatgaggtcaaattttttgcagatacacacacgttgactgtgtctgtctctgtcttttgtcctctcgggtcttcaatggagatatagagtttttacttaaaacatctcctatgaatgaacactcgacgcataattataatcaggtactcttcactttataacatcccactctcactaaacttgctttgggtttgtctctaaacacgtttctactaaaaacgtaaacaaactaaatctttatagtctttgataaactgaaaactgccaaagtaatagaatgtgttcccatctatgtcgatgcacgaagccgtaatattcctctatgtgataataaagcttatcaagcttagcagaccacaaattttagccgacaaaatcaaaagcgacggcccaacacaaaaaaaaaaacaagtcgtggccacttttctagtgttcagaaaatggcacaaatcaaaaaatgatcattcactataatatcactaaccatatttaaccaatgggattagtttttcacctaatcaaggaagaaaataatcaacaaaacaaatgtcacagtgatgtttgtaggtttttctgcatgtagtgagtttggttactctctacatctagatatacagtactattatttttatggcaactgatgccaaaagttaaagatattttggctgccaaacaaaatacgtagctttcaattgtttttaaaagataaatcatatgtcaatttacccacacaaaataaaaatataagtcatttggcatattatttgattagactttgaatatttttttatactgtcactgctgagtgctgacctctatttttttcaccgcaggtaaaagggagtgacatgtacccttttctggaaatttcttatacaagacgtatgaagattttctatcctttttttggaatttagattacttgttttcagacttgtgattgattttgagacttcattttctttttttttggattttaatcaataaaaataatttagctattgacctattgttcttctaatagcttgtacgtcttcacactgacctgtcaccactcgcacctttcatttgtttcctactccaaattatatcccacacccgatgaatttagtgtgaatttagtgtttcttgataggcaaaagattgttgattacgtacttagccacgctagtcagataaacgaggagacttcattccatttcgtgagttttgattgtaacattagactcgtcggccattgttaattgtagtgactgacttcataaaaccggttaaacgttgtctcaaaatgtttagcatttcttttacatgcttagttggattttgaaacctcatcttaaagttctctgcccttatttgatatctctaccattctattgtggtccaaaatcaagaacgtgtgtgtactataccaattgttggccccaatcatatgaaacaagaattaatctgtacgactaaagattttgtttttagaatattattttgtcaagtttcattcattcatgttagctcctatttgaaaataaacgatggaatcatagatttctactaaccggaaactcaatgatttcaaagtttgtttctaatcttcaaggagactacttcttctctaattcaaaattgttaagtagattaaaaattatgaaactatgaccaagtccaaagacttagtctttttttttttgacaatgacaaaaaaaaaaagagttttatattaagtttacaagtccaaagacttagtctatgtctctcagattaggacatctctcggtatgttttgtttcaagttttatattaagattatagggtcaagatctacatgaatgatgatataatagtaaaagatttgtaaacataaaaatagagaagactcataaagaaaagaataacatgtgagtctgtatataatttgtgtttgatgaacaatacaaagatcataacactaaagtttagaaggaagaggcaaagaattaatatcaaaaactttaaagataaaacgagtgggatgaatagaaaaatgagtgtgaagaatagaaccaacggtcgctatgagttctctcttaacttgtttggtgatgcctcccattgacacaatctctgcatatgcagctgcttctttgttccctccaaatactatctctactgatcccttcaacaccaccatcactaactgcaatggacataactcgtttattgagtaaacatatacaaattggaagatatatttgttatctcctacatcttcccaacacatagaatgatatttagaggaaaaaaatcttggccacatgctattaatatcgatgtttcctcttttgtacataaaaatatatcttggtttgaggggtcaagtatacatattaataaatcaataactgtgatgttgacttttttttcttcttacaattctgaagccaatttacgtgaaacctagtaaacaatgcttattatatgacgtctcaattatcttatattttctaatatatataaaaaagatagaaaaggcattacaataactttagaatggatagagtatttgatcactattgaattccattaaataacaaaagtgcatctgatatatgtaagtcaaggatttttttttttttttgtctgattttaaaacttaaaggaaatttctgaaggaaagagagattagtgtttaagagaggttcttacgttttgaggtcgtccgacgatggaagcgacggctttggtgacttcggagtagaacggatcggtgttaacgccgtcaaaattgacgtttgttgtaatgtaaagacaaggcattttctcaccgtgaatactaacgcccgttaagctttgtttgcaagaatctcaagaaaccaaatgagaggggatttaaatggtgtttggaagttgtggaagagaagatctctcacatggccaattatatatagagctaaattatcgcgtccaaaaattaatgaaagaaattattgtattgcattattttaaaatttcgttttgatgtgaacaatttttgaaataatatctttgagtttcaaatctgacaacttggggacgtgactcaatcaattaccgcagctacgtcgccctcgaagaaatttgatttcataccatattggaccacacacacacacaaaaaaccaagtccataattttttgttaataaaggtaaaggataaaaacttgatgttattaatatttgtattttctccgtaatgggttaggaaaatgtttacgagattcgttttagatcattgacctttttttttttttttttttttttttgggcaaatgttttagatcattgaccatttatttaaaattgtgtgtttcgtacacatccatgtggtgcgtatgtagcgccgctacttcgtcttaaaaagatttgtttatttcgcaactgtcactataaaccggttacccacaacgatacgtattatctgcaaattaatcttatcagttatcagttttaaaatgtggaaaacgttagatttatggttccatattttcgtattaacaacgattatgggttatctaacaacgactattacacatgtttatttcaaggtttggtataagttcgttataggacttaccatgagcctatatcgaaagccaacttttcatccatgtagagtcatacccggacaagttcggtatgttgaaccgtaaacatatcacctatgatccactgactaacacggtttgagtcgacttgtcataaaattcacctagtaaaaccgacaacctgccttaataattaaaccgtcgaattccggtttgtgtctcacaagtcacaaccgtccggatcccttgcccatttactttatcacgtgtttttccccataagtttatattttttattaattgatggacagaaagtttttggttttgggatgaagtcacgaggacaagaagaaatggaaaaggcatcatgacttgtaagggttaacaacaagagatagaggttatatgcttacgcggtcctaagcacgaatactagaagcttagggttaggaccactagagatataatgcaatttggaagtcaccacaatgtttaagaattttatcagcaactttggttgaaaataataaagaagaatctagttcgaagttttctctccatgattttttgaaactgatggaccatcaaaacatctttggcgtatggtggggcctcagaacacatgggccgggcttggttacacatgagaaaattgttgtttttagttagattttggtggactagtataaatggataaaagaagtcgttggaagaaaaccaaattgatagaagaaagaagaagaaaaatagcaaattgttgaaacagggacagaggctgtctttaaggaaaatcccgtatgattaaagtgtacgtaatcgattagtgttcctctgtaagcactaagtcaaaagtaaactctaaagccaaaggtttcaattttcaaacattgttaaagcgaagtctgtccacgagaattagcacatactggtccaccatgttatcaagaaacgccaaaccttttttttgacaatttatagtttttgaaatatttagtagaaatcttttatcttaaggaagagattgacaaaaatagataaataaacaaataagaataaaagattgaaatttttgaaattaacatatatttagccatagtggaaagaaaaatttataataaggttggtatatcaaaaatcaaagaacatgtgaaaaggtttaataaaataaaagctatagaaaattgataagttttgtccttatgaaattaatgtcatgatatatatatatatatatatatatattattgtactttttaattaataatccctttttgaaaagaaaagaaaaatatgtataagaattttttgtagtgttcatattcagttttctagaaaagctaggaaagcgaaagtggcctggcatggttttgtaatttccttttttaatatgatcataaaataaaatatgtaaaatgaaaaaaaaaactcattaacaaggtaaggaataatgagttgacaacaaaacaaaggtaagggataaatgatgaactattcggatgaacatattattgcaaaattcagttatatactatatggtccaacgctactagcaaagtagcaatacacatgttggtcataattattgaaattagttacaatttgcgtgaactttcttaattaataaatatttaatttgtaggttatgggaatgaactggaaagtaataaagttgaaccgcatgggtgaaaagatgattgtttttggctaaactaatgtgtttttatattgctaatttgatcggatccccatatattctcataatcactccctcttattacgttgaaacttgaaacaaaatgctaagctgcctaaaactcctttcgctttttagaatctagaggagagaactaacaaaataataacgaacttattttaagatcttaatatgcgaatatgcgattaccaaaactatgcctatatatcaccgtgagtctttctttttttgggattactttgccagtttgcctataaccatgtcattgagtctatgactacaacatggcattgggtttagatgtagtggtcaacatcttatagttattgagatattgagtccattggtaataaaaaaaactcggttaaagaaaagaaaaaccggtttaaaaacggtataaaacatgtggttgaatgattatgattagtgaaaacaaaaatttgactaaaaaaacttactaaaaaaactttaattagtatacacacaccttgcttccacttaactatcatgaagccatcatcactgggtttacatcggctaagtttatgaaagtgaatgtctctataaatgcttactctctttttaccatacatattagcctagagaagtatgtagagttcaagtttccaacatacattaatttgaactcaatacgtacgtgaaagcaagccttcctacatcaataaagaccgacctactagtttcttcataaatcagatagaggccgtgtttgaacgtagatgcgacttggtgtctcaatgagtgtaaaataaaaacctaaaaaaggaaaaaggtaggaccaaacacgccccatcccttaatctcattattatcacctcttccacacgttacctccctgcaaacctcacgctccttccctcataacacgtgactctcacgctcctccacctctcaaaaaaaccaaattttccttgtaatttacttgaaccaaattcatatattcacctaaacataactaattcttgatctaactttcgaaaattttcaaattaaaacatctcattgattccaaaaacatactttattgttttatatggttagtattttaatctttacgtaaataaaagacgttggaattggaaattactactagtagattgctttatcagaattttataatctatacaatgtaaaaagccgcgtcatctgttcaaaaattcagaagatcagagtcacgcctatatttctctctctcccgtcactctcactcttcctcttctgcttcttattattacatcgatcctcgttgtccctcctctgtttcttcaatatctctttctctccaacaaaatcaaaatcaagaaaacaaaaaagaaaaactctcaagaaacaatggatgcttcattgtctccattcgatcaccaaaaaactcaaaacacagagccaaagaaaagcttcattacctcactaatcactctccgttcaaacaacatcaaagaagacacatacttcgtctcagaactcaaacccacggagcaaaaatcacttcaagaactcaaagaaaagctctcagcttcatcctccaaagcttcttcaatgtggggagtctcactcctcggtggagacgacaaagctgacgtaatcctcctcaagttcctcagagcaagagatttcaaagtagcagactctttgagaatgcttgagaagtgtttggagtggagagaagagttcaaagcagagaaattgacagaagaagatctgggttttaaagatttggaaggtaaagttgcttacatgagaggctacgacaaagaaggacacccagtttgttacaatgcttatggtgtgtttaaagagaaagagatgtatgagagagtgtttggtgatgaagagaagcttaacaagtttctgagatggagagttcaggttttggagagaggtgttaaaatgcttcattttaaacctggtggtgttaattccattattcaagttacagatcttaaagatatgcctaagagagagcttagagttgcttctaatcagatcctctctctttttcaagataattaccctgaattggttgctactaaggtaaagaaaatttctctgtcttttgtttttctcttatgtttctattggagacagaaaatttatgtttctgtacttgttgtctgaattgttacggttttttcatgtggttttgctctgttttgcgtgttggggttgcttctctttgcatttaaacagaaacgaatctcattcaagaaaatctgaaatgtgtcaaatgcttaatggggaatctaaaccatgtttcatgaaatcttttctttattaaattgttggtttatttgtgtgcggtttcttgagttcctaagaaatatgaatggttttagatgttttctgtgtggcgttattctatgtattgtccattttgattctctttttgtcttactttcttaaaattacttccatagctttgtcttctactgctacagtaaaattgaagcattctttgtgtggccgtacaatgaagttattataatcatgtctctattctcgattactacacaaaacattttgatgaatccatttttttcactatttcagatattcataaacgtgccttggtacttcagtgtgatctactcaatgttcagcccattcctgactcagagaacaaagagcaagtttgtgatgtccaaagaaggcaatgcagcagaaacactctacaagtataacttaaaactctaaccattctattttctttttggcttattttaacctttttggttaaatatatacatatacaattgttgctatttcaggttcattaggccagaagatattccggtgcaatacggtggtcttagccgtcctactgattcgcaaaacggaccgccaaaaccggcgtctgaattctccatcaagggtggtgagaaagttaacattcagattgaaggcattgaggtaatatcagttataagcattttacagaaagccaagtgagtgaaaaatgatttgatgaattctgaaaaatgtgtttgtgtgtggttgtaacattacagggtggagcaaccataacatgggatatagtagttggaggatgggatttagagtacagtgcagagtttgttccaaacgctgaagagagttacgcgatcgttgtcgagaaaccgaagaagatgaaagctacagatgaagctgtttgcaactctttcactacagtagaagctgggaagctcattctctctgttgacaatactctctctcgcaagaagaaagttgctgcttaccgttacactgtccggaaatctactacaaccgtctaatctataaccggtttttcagaagattggttgctttcttactactactttttgtgggtgtgttgaggggttttctttcttgggtttgagtactaggtttgttttgcttactcaacggttcatgttgaaccggaaatatcgataaatttgcgaggaaatcatatgtataaaaactatgatttgtatgacatttgatgtttggccttaatattttaactagagattgaagttttagtctgcaaagtgtaagcttatgtactctcttgtaccatgtttagctattgaagaccagtggtccattgcttatgtttgttgcattctcagttattgtattcagttgttttgtatcagaagctgaactaagcaatggaatttcatacacaatacgactctttaacagccaaaataggcacccaaacttgaagaatcaatcattgttgcatcatattaccaatcattgaataaacttgaagatccaaatttactaattgaattgtgggaagaaaatgtacatcttcatttcccaaatgagcagtttccattttcagcagcgaacctacgtcaagaccgattcgcacggatgaataatgactacaatgattgtagtagtacaatctgaacttatcagagaacacagtgactacggcccgacccaaaatccctgtgtatttttaattagtcgctgctacacagcccggcccaatataaagtctggctatgagtgagaggaaaatttgttttatggttgacttttgaatgtgaggttaggcagttcagttttttaatttcaatttgagtgtgtattttattttattttcaaataaactcacaatgttaataaattttaaattttgttaactgaaaatccaaacaccaaacacaaacagagaaaaaaatcgtttttgtttatattttgtgaaattgtttttatgaaactatgagaatttttgtatccttcaaatctgaaatctttttgaattctttttattactttaccctgtgttatcaagttaaatgagaaataaaaggaaataagtataaacctaaagagaactcatgagttgatttttttattagaaaaaaagtactagaatccgatcttggttgtactcctaattaattgtagttgattgagcttataatagtgtaaaaaaaaattttaaaaaaatacgagattatgatatgttttgagtcttagacctaaactcatctcctcttccttacatttctaagaaatccgagttaacaaatcaaatcttaaataataaatattcttattcctaacaatagccaataggtaatgttgaagaacttggagtttttgtacaatgttttgttctgacatgatcacaactttttggttaggacttgggaggtttctacgatcgaacctctttaaacattacatactttaacataagcaaatcaattccaatgagttttttttttttttaatttagagaaacaacgtgttatcagtatgaaattggtggtgaagaagtgaagagatgtttcacatctatgcttttgaggcttatgtatttcaggttcgttggggataaagaacttttacaaaagtgaataatagaccaaatagtcaaatctagctatcgaagaaagcgaattcgtcggtttcaagaaatggaggctacacaaaatttaatattatacgttcctctttctttaaatgaagaaaagtgtctatatagctgtgggtttgaccaattgggaaccaatctttacttcttgattttcttataattttccaatctcagctaatgattccacaattacgacataatcgcatctgatttttaaatattttcgttgatctcatatgtgttacaacccaatacacccttgcattcattaaattatatcgctaacatcgaacccttttactttatcaagaaacaaaaaaatatcgaacctttagcttcgactataaaactcaatttgcatttaaaaactaaagtgtaaaatcaagaataatacgtggattatcaaaaaagaataatcggtggatgttaaaaggaataaaagaaagtacaaaacgttgtatattattgctcagtataacaaaacaataaattctgagatattcgtattccatccttcaaattaattattatattcttttccagagaaattgttcctaaaaaaaagattgcataggtcggttttttgttttgatttcgaaatgtaaatttattaacaaactctctgcgtaatcacctttaactaactctgtactttggtctgtaatgagtttattttactatatatggtatcttaattagtactttggcatttgtcaattaaaaagctacattactatttatcaaaactaaacttgcatttacacattattcttcctgactcaacgttaaaaaatcatttttaatcaatttaatatacatgcactgtattttcacaactactaagctactgaagtttgattgtttaagacgataatttgtcttttcgacgttataatattaagccacttacatatctatatatactaattacagatgtaacttaattatataaataactcaactatcagttaaaaattcggaatctgccatatatggtaatgtcatggatgattttttatgaacaaaacttttattttattttgccgttgacatctacaattcaaataactgttttattaattcaccagctattcaaagtttaaacaagaagaaaaaaagatttaccaaatccagttaaatcaattagaaagacaaaaaaaaaacacatttgatgatcacaaaccaacacagtttcttgcagtcgtaacaccaccgtcaacgacaagattatgtccgttcacatacttagactcatcactcgccaaatataacgctgcttcagctatatcattcgctctcaatgtctctcctttcaaattagccaaactcctcacaaactcctccatctcctccacgtcatcatcttccacgtcaccaccactcgtctttcgccacgcgttaaccagcatcgacgtggcaactccaaacggtgatatacaattaaccctaatcccatacttgcctagctcacacgctgcgttcttggtcaaaccaacgatcgcatgtttcgaggctgtgtaagcgtgtggtcccattccacccatcacaccggctacactcgccgtggagattatgcagcctttgaatcctctcttgatcatagcgcgtgccccgtgtttcatgccgagtcctacgccacgtacgttcacacgcatcacgtggtcaaactcgtccgcgtcgaagtctaatatgcttttgtgtttcttctgatctccgagaactcccgcgttgttgaatagaatgtcaagcctaccgtaccgtgcaacggttacgttcacaaggttttccacgtcggcttctacggagacatcgcagctaatgaatgccaccatcggggaggttttgtgggatgagagtgacttagccagggaagagccagctacgttgtccacgtcagcaatcaccactgtggcaccgtgtctagcgaataacatgacggttgctttgcctattccatgtgcgcctccggttatgatggctacttttccttccaacctatatacggtgtaaacactattattataggtcgtatactttttgagaattaaccaacactatagtatataagtgacatggactatagttcattcttgttaattaatttcaagttcgtgggacaaacaatgtacctcttaggatataaagttgtattcgtctcctccataatggtgtcgtggacggagtgaaaggtggtctgctcagcgatcacttgggcaggcatggcagatttttttgtgagagaagtacagatggaaagaagtgatgagagggagcttttgaagcttaaagtggaattgaatagtagatacacacatccctgagtctatttatatacacattggtagagaggtgaagttccgaagaccagtgggaaacatccaattatgctcaagttttggaatcattctagataaataatttagtatgtacaaaaagctaaatggtagaagaaagacaaagaaaatgagtattttaatatgtaaattggatgcttataaataaattggatgagtaaaattgtgtttagagagactaataataaaacttttttgtgtcaggccgatcttcttgtgatatctgtgtgtattaatgcaaaataattttggataaatcattgatgatttgatatcagatttatttttagaaagaatctagaagaaaaatactaaatactactagtagtaattagatatgccatctagctcatatttattatgtttgctggcaatgaaaaaagctatagttatgacttatgagatacatatcttgtattaattacaggattccgtatcacactcactccctcaatttaaaaaggactgaggtagatacttaaagattaccgtacaaaacacaataaaaatattagcattaattttctatcactgatactcatagtttaatacgagaaggttctgattttgcaaatgctaagtgtatcatcaaaaatactctatttaaaactgttaatggttgttgtatgttgggagttaagtgaccttagaaaatggatcgtttctttggcggatcaagacaaatagtttaggtaaacaatatcaaacattagtttttacaacaactctattgtttctccagatgtgaaatggtggtggcgatggtctggcaagattcctaattctagaagaaatgcgacttagtctatatagtgctttgtaaatagtaatatcaatgaaaaaatggttttcaatatgatattagaagtccttaaccacaataaatctaatgttcttgaagcttttaaactaatggtcaacggtgttataggttccagtttgatcgatcaagatatatttttttttatatgtactaacattttcacacggatcctaatctagtacatgtatgtgctgtgtaatttgatcgatcaattgcgtctcatacaatatacgaatgatgcgattaacgtaccaagaaccattggaccacttagctttatatttattaagtgcaggactatatgtacattcattagcaaaatcttctctcactaatttatatatagtagacttatgtacatctcgctatgcaaatcttttaagatcgaatcatatatagcctcaatcattcttgattagaattaagtagtgttgataaactaatttctatcacatataaaaagggaaaacacagctcaaccaaaccttttccttgttgtccaaaacacgattcatctcaatacacaactaacattatataatttcaggttattgttttacttgaaatactttttgggctatttattgcacgttggttgtgatgaagcccatttgagttcaatcaatgctttaaacacttgtacgcctgaacttaggccaattgcaatgatctcctttgtataaattgttaaaaggctttcgatgggatttcacacatttcggtacaaattctaatacacatgtagcagtcgataaaaccaaagtcttaattatgcgatgttttgaagaaaaagaaaaaacaaagacctgtagactaaacgttccaaaacaacttcttcaagacaacattttcggcttctacctgggatttctcagcttcttctgcgataagaaattgggtcaaaccagttccggccttaactttggatatggcaagatacctttgtccaggaaagaacacttgttttggtagatacagaccaactttggaaaatgtttggcctcgactctggtctatagtcatggcaaatgcaagtgtgaaaggatactgcgtaagccagagaaagatttaacaaaaaaaaaaaaaaggtcaaccaaatgtcgacgactaaatgttttgaaacaactccttgaacacaacattcttggcttcttcctgagggttcccatctttgtctgttataagaactttcaaaccagctcttgacttcaccttggatatagcaacaaacatctgtcgtccatgagagaacacttgtcttggtagatatagaccaactttggaaagtgtatgcacttgactttcatctatagtcatcgcgaacgcaagtttcaaaggatattgcgtacgccgcatttgaagaggaaaatttgtttctgtggggtatgaagctatcctagggatccagattttcttaccatgcttattacctgctataatcatagcctcaagcaaaaacccacacagccgagtaatttgaagtcttgtccccgtaaaaaaaccacggctaggatcaaggtccctaagtaacatgacaggagcaccaacctttaacctcagcttaaaatcaggcaatccggggactttgatgctattcaaaacctctagagggacaaacatgtcgtcatttgggcttggagaaatactgtcagtgctgagacattctttctcttcacctgatatgatataatgatgtcgtagttagtatgtgcataaaaaggatatatatataagtataaaagagaaaagcaataaacgtgttacctggtaatagtgaaagcatataatcattaatctgatccacatcgtcatcacgatgacacaaaatagcactgtcgtgacaaaaatcaggattgtaggactttgcaaaatattctccataaacttctttcagtaaagttttgataggatctttggattcagttatcaacaaatctttggaaatatcaatttcagtttctccatcatttggattgttgatattatcaccactaatgttcataatccatctagaaagagcttcatctatagttgtgtgaattcttgtctcctggaattcaattagcaaaacattaaaatatagaaattatagtactacaagtatttctttctacaaagtaaagtgaacagcatgatcattataatatataatgatttccttttttacatgtcaaaacgagtcatgtgcaatcaatcaaaccttacaaaacctaagtcattgcatgaataatcgattattatgtaccaaagtgcagagcatctgattaatttgcaactattacgaaatatataactataacaaaagatacatgttaaaggtacataattcagataaaaacataccgacgaatcgagtaaaaccaagtcgatggagttgtctgattctttcttatttcccttcgacgttctaactatctgcactttgatcttccatggtctgatctcaccgagagaagcagaagggtgattacgaattagagccattactgtagcagtttgtgaattcgttttcttttctttttcttttgtgatgaatttggctgaaaacgaaaggttatgtagcttttataagcgtataaaaaactagaatcacgatctaaacggttacggaatttaatcagtttaattaggatttcctttttatatacttttcccaaattcaaaaggaaattctaattaattgtttcttaagttaacagtaacggaaatcttttttttgtcaccacctggtaactggaggattttttatgtacttaaatttaattttccactttaaattgaaagggaatttaatgaaaaaacccttaactttggtcagatccatttttaaaccctaaactatgtttttagtaaaacaaaccctgaactaaaacctgttaataaacttaaccccacagtaattaaatattaatgggatattaatttccaaaaataaaaacaacgagacatttgtatttagcgcaaaaaccacatgatgttctttaaaactgttttgaatttattacaaaaaaatgtttagtgttctaaatgattttgaattgcttaattagtttggaatttagaagctgaaagaaagacacaacaacttaaaataatccaaagagtcatgcttaaataaatccaaccaacataactgttgtgatttatgacagattagggttttacgatttggagttttttctgaacacgagtttagtgtggtctatggcaagcaaacttcgtgtggttttggcgttaaatacaaacgtctcgttgtttaattactgtggggttaagtttattaacaggttttagttcagggtttgttttactaaaaacatagttcagggtggccaaagttgaggttttttttcattaaattttcaaattgaaaaggattatatatacatatatatatatatagattttaagaaatgattaatatatatgtatttcctttattatatactggatgattttagttgccctagaaggcagaagcttcggttttagtagatggtaggagcatcaaaatcaaaatgaaatgtcaatcaaacctaaaacaagagttgatgtttaaaatcggtgttcgtgatatataaaactgcagagaaacatctattgttttagtcttttaggtatagacttctgttaaaaatctttaactaaagtcttatcctgttttgaaaaaataatagcctagacgaaaaaacaaactataatcaatgtacagagcagaatgtaaaacattgtagtctgaaaacagagtactataccataagaaacaccatgaaaatcaaattacataaaacaaataaaagcaattagtttgctgccagtctaacacatgttgactaatggttctgacaaatgttctgtaaacaactccttgaacacaacattcttggtttcttcttgatcaggtttcccatctttatctgtgataagaactttcaaaccagctcttgacttcactttggatatcgcaacatacctttgtccatgaaataacaattgtcttggtagatatataccaactttggaaagtgtttgcctttgactttcatctatagtcatggcgaatgcaagtttcacaggaaactgcctacgccgcattttgataggaaattttgcttccctaaggtctgagggtatcctagggatcaagactttctcaccatgattattacctgttataatcatagcctcaagcacaaaagtttcaacccgagtaatttgaagtcgtgtccccttacgtaaccaaccataaggagcaagatccctaagtaacatgacaggagcaccaacctttaatctcaacttaaaatcaggaaagcccgggattttgatgctattcaaaaattctagagggtataacattttgtcatttgggcttgcatgcgttggataaatggtgtcagcgccgtaacattttgtctcttcacctgatatgataataaatgaagtcgtagtaattagtatgtgcataaaatattaaaatggctatatataggtggaaagcgaaaaggattaaacgcattaccttgtaattgtgaaagcatataatcattaatctcatccgcaacgtcatttgtatgacacaaaatagccctctcttggtaaaaatcaggattataggactctgtaaaagattctccataaacttcatccactatagttttaataggatctttgcactcagttatcaacaaatcttcatgaatatcgattttagtttctccatcatttggcttgttgatgttttcgccaccaatattcgtaatccatttggtaaaagcttcatctatagttgtgtggatttttgtcccctggaattcaatcagcaaaacattataatgctaaaagtatttctttctacatgtaaaattgtaaaactaggtacaagctatataatgttttctgatttattcatgaatcgagtacaatgtttatatacacagagagtctttctctccaagtttaactttctctccaagttaaacttaccaaaaaaccacatgagaatatttacaagatatacacacgatattcttttggctaacaaaaattcacaacatgagcaatgagtaaacaaaaacatattctaatgattatattcatttacaagatattctattgggtgtttagccataaactcaacttaacttgatattaaaataagtaaaacgacgagattattgcatcttcaagcatctagatgattgactcaactagaaaacgagtcatgtgcaataataaaaaaaaaacttatagaacttgagtcatgcatgaataatcgtctactatgtatcaaagtttaaatcattctgatatatagaaattacaaaagacaaatgttaaagattcgtaaaaacactataattcagataaagctataccgatgaatcgagtaaaaccatgtcgatggagttgcctgattctttgtcatttcccttccaagttctaactatatgcatgttgatcttccatggtttgatctcatcgagagaagcaggagaggagtgtatgtcaattagggccattattgtagcggtttgtgaatcttttttgtttttttgttatgaatttggctaaatacgaaagtatgtgtagcttttgtaagcgtataaaatctaaaattatagatagtgttcttactcttacggaagttttaagtatcagtataattaggatttccttttcttattctttccttaatttcgaaaggaaattctaattaattgtttaaactttaagtaacggagatctttttctctcattcccctatatctgaaagattttttatgtagtaaattctgtttttccatttaattttaaaagattataagatagaggattgatatatactatatatcttcccatatttgatttgtttttttaacatagtatttctttaactgatactgtatactggattaatgattcattgatttgagtcggattttttcttcagaaccaaaccttttatagttgctttagaagttcagttttcaatagatagtaggagcatacactcctcttcgaaaatgggtcgcattagacaattcgtgggccgaaaatatagaaaagccttggaagccggaagtgtcaggttttggagttatttttggagcccagggtgtttatatacgcatcgctgacatcaggcactaaagggcatgaacaacaatgacagggatcgccacttttcgtggtccatcttttagccagccaatatcaattattatagtccaactaaaattattagtactaaagaaatctcacctaattcccaacacaatacctgctttacttccccactctcaagtcctacatataagcttgctagtcaatacatcatcgtttttttcctattcttaaaacataatttaactcatatccttttatatacgatgtttaatttacacatctacttttttttacaaacaaaaaagaaataactcatatcctatattgtgtgtcatccaaattcgaatgcagagcagaaaccccacatggacagcctgagcctgtggaagaccaagcgtgcaccaacgtctgttctcttgctttgttattagaaactttttgaagtaaactatacaaataagtggaaagactgataatactaatatgtgtctcttttggaaaatattttcaagtaaaaataaaataaataccaaatataggtgaaaaaaggttttaggataacaagaacgattatccacaaaggcaacatgaaagcagaaaccttttccctgcaaaagtgtatagtaaaacacactcataccaaactttcccttcttttctttttcttatcatctttgctcttttcccggaaaattccaaagatcaacagccgcagaaacatctcataaatcatgatgatgaagttctatacgttcactttcttaatctgcttgttctcgaagctccaaggtcactgcaaatcagatatcagccttggcaattctctgacgctcacttctcctctagaatacactccagggtttatggggaaagcttatatcatagagacagaatcatcgtcaacaagagaacctggttttaaagccgcgttaacaatggaatcaagcgacaaagatgatggaagatatttatgttcccttcaaattttccttggagatgtaagagtttggagctcagggcattactcaaagatgtacgtttctagcaaatgcatcattgagctcacgaaagatggagacttgagactcaagagtagctataaacacgttggatggagaagtggaacctcaggacaaggcgttgaggtataagatttgattggttgatcatttttaatgacagaaacatgtaacatgctaaactgtgtttggaaacaaaattttgtagaggttggagatacaaagcacagggaatctagtgttggttgatgctaagaatctgatcaaatggcaaagtttcaatttcccaacagatgtgatgttgagtggtcagagactagacgtggctacgcaactaacttcattcccaaatgactcgactctgttctattcctttgaagtcttacgcgacaagattgctctgttcctaaatttgaacaagctcaagtactcttactgggaatacaagcctagagagaagaacacaacggtcaacttcgtgagactagggttaaagggtcttgacctattcgacgataacagtcgcataatcggaagaatagagcaaccgttgatcagattcttggcgcttggaaacagaaccggtaatttaggactctattcgtataaaccggaaaagggaaagttcgaggcaacgtttcaagctgtgagcgacacttgtgatcttcctgtagcgtgtaaaccatatggaatctgtacattctcaaagtcttgttcttgcattaaggttgtaagcaatggatattgcagcagcatcaacggggaagaagctgtttcagtgaagaggctatgtgatcatgagatggttgagctaaatggagtcactacagtgctaagaaacgggacacaagtgagaaacataagcaaagaaagatgtgaagagttgtgtaagaaagattgtgagtgtggagctgcgagttactctgtttctgaagagagttgtgtcatgtatgggatagtgatgggtgttaaacagattgagagagttagtggattgagttatatggtgaagattcctaaaggagtgagattgagtgatgagaaatctaatgtgagaaaatgggtggtgggattagttggaggtattgatggttttgtgattttgttgcttatttctggatttgctttttatttcattcggaagcgacggaaaagcttgttactgccgccaccgccaccgccacctccaccgctatcgcagcagccggctaataccgattcttgatagttctgtttttggatatttcagattaacttgtgtcttacaagaatacatgtaaacattgataccgtttatagcgaaaaccgttgctttacatcgaacattgtaaaagcctaaagaaaatttattgattaatgtttctgaggattttgaaggtaatgcatggtatatcactcttacaattattttttcttataattattccatttataaccaagtttttttatgatatcaatatagttgattcgttggggataagaaaccaatttcttagagttttatgatttttctactaacctttgtttagctaaaatatttttgctattcaatcatatttcactattcatctaacatatatgtcaaaactcaattatttcatgtaaaacagaagaagaaaaaaaaacactgtttttccacatttctactgttaggttaggtatgggatatatagaatttagggctcatggatttatggtatgaataccagtgtagaattgtacgcactagtcgcaattcgcaaagcagaccaaggcacgtccaacggttagttgaaatagtgtcattttaaaaactgagactttcactatgtggcccttctttatgaccgttagtgatccccaccacaaactccatcattgacgcagctaactccggcacaactccctctataatccaacggtccaaatactctttcacttttctccaaataaagttatatttctaatcacatttctatttctagattagaagacaattgagaaaacgactacaagttcacacttttttattgaatccaacggtccaaagattctttcacaaatactttgaatttacttgaatcaattaatctcacttgctataatgataagatattcacctccctcttataagataacaaaattagattttataaaaagtgcttaaactataaataaagacaaaactagtaactgagaaggcaacggacacttgtagctttatgcaactttaattattccctacatgagaaaaagaccgttgcgataatataaagtcttcgttcacacacaatctcgaagaaaacaacaacagttttgatcactctgtctctcttactctatcttcttcccaagttcttgtcttttgatggccgaaaccctagaaccctccctcgtcggggaaatcgacacttctgcgcctttcgagtccgtgagagaagccgccactcgctttggtggatttggtttctggaaaccttcttcccttaacatctccgaagcttctcaggtcttatttctctccttctccctcaaagtctctgtctttctcactgatttttgtccatttctttgcttttggggttttagttgaaatgggtttttagattcatcaatttctagatagatcttgtctttagttgtttcttgtgattatgatgcgaaatttcgaatctttggttgcagaacgaagttggtatggttttgaaagcgagtgagttagagaaggaactgattgagaaagaaggagaaactttgaaggtgttgaagtcacttgagtcgaccaaagccattgttgaagagctcaaatcaaagatacagaacaaggaggataaagaaaattgtgacatgaatgttttcaaggaattgaaccaagcaaagatgaatctgtgcaagacgacaaaagatttggctgctattcgcgtgtctgttgggttactaaacaagagattggaagaggaaagagctgcacttgagaagacacgagagagactaaactctgagaatgcagctgaaatgtccatggagattcagagactaagttatgaagctaaggaatttagtagaacaggagagaatgttcggtatgcggttaataaagctgtggctgagattgaacaaacgagaaacaagattgaagctgctgagatgcgtttgatcgctgctagaaagatgaaggaagctgctagagcggctgaagcagttgcaatcgctgaaatcaaggcggttacaagaagaggaagaaggagaagaagaggaggaaatggtgaggagactatgcaggaggagattcttgagacgattgatgaaacagcaagagaaatcagaagcagtaggaggacacttgaagaaggtttggccaaaatggaagcagaagaaggaaattggtggtggacagaacagaggaggagatcatcatgttcggctaagttcaagaaccctccttatatgatggatgtaaaaggtctgaatatgatgatgaatggtgatgggacatcatcctcagttgctgtcttgaaaccaacaatgtctattgggcagatacttagtaggaaactacttcttgctgatgagtcagcgatgatgatgaatgggagagtttcgttgggtcagattcttggaaagactaactttggagatagagagaaggaaaaaaggttcaatgggaagaggaagcggttcggattcgcaaacttgtctgtgatgttaaataaagagagtaagaagaagaataagaagaagaagatagctttgaacttaagttgttaaaagagtgattgaaatggtctaatctttacattaggacttgttgtttgtgtgttatctatttgttttcgatgtgtttattggtgtatgctaaatattgaaatgagatgtgatttgttatatctttatgcttattccaaagtccaaactaattgcatattcgaagataatagccacatgtatgagatgacgtggttggataatagcttgtagtgttaaaatacctcatttgacctttcgacattcatacgcaatcgactcattccacggatctgcttactcattgattctcgataaattgttcttctcccacagacaccagattctaccaatcatttgctcgaaaaggtaaaatctttctctacaatttcggttgaatcttttgataactcgatatatctcttgtaaagactcttgcttgaatcttctgatctttttttctttatcaggaatcatgggtcttaaagctggaacctttgtgcttctcttgttgggtttgatcttggtctctgacgctagatctttcgttgactccaccatctcaggtaagatattagacaaaatttagaattcatggttgattctagaggcttgctctttaggggtaaagtttgatacttttgatgaaatagtttgttcttatggctggagatgatgaggtagttttatatttcaacacacaagttcccccaaaactaaaagaatggctcagactcagataatcttatttgagtagaagttttaagacttttcagctttacttttgtccgtgtagagaaagtttccaacaaggaagacgtttgcactctgtgtgaggaatatgttactgatgctctcagctaccttgagaaaaatgtcacacaagcggagatcatcgaagatcttcatgatcggtgttcccaattgcgcggatattcgcagcaggttctctcattttgctgatgctgaaccttacactctctatatttttgctttagactgtttgttttgttaatatatcaaatgtgctgaataaatagtatgtttttgaattgatgcagtgcataagtttggtggattactatgttcctcttttcttcttacaactagagtcgtttcaacctcattatttctgcaagaggatgaatctttgtggcaaagttgtagctcttgtcgaagaagctcgtcaggacagttgcggtgtatgccacaggactgtttcagagattctcatcaaactacaagatcctgacacacaggttagtgataactacaagatcatgactttatctctcttctgtcagtgtatttgtcatttatgcattcagtctcatagactcatagcacctaattaagtcataagagtacccacaatcacagtccaaactgatatgccctcgtgtagttgtgtttgcgttgttattatgttcaacgattacgccaactgataaaagtgtttaactatcagggatctttgtaaacaatcctcgtgaagactttctttctatcttatattgatgatgagttttatatactgactttgttttctcttgattatctagctggatatcgttgaactgcttatcaagggatgcaaatcgctcaagaactacgagaagaaggttaaaatgatcaactcaaatccataacattgccttcacgtgtttacaaattaaccatttcattctgctttctctgttggtgttcttctcgaacttttgcaacgcatctgcatgatcacatagcagttagcgtacgcttttctgatattatggtgttgtgtcttgtgttattacagtgcaagacgttggtgtttgaatatggacctctgatactcgtaaatgcagaggaattcctagtgaaaaacgacgtctgcacactcttgcgcgcatgcccccctgagaaatcggttctaaggcagccggagttggctgattcttgaatgttcaaaacgttgctataacaggattttaattccttatgggttatacaagtaggaacacgagctgctccatgagaatggttgcagactttgtgtagtgtctatatgtatggattcaaacacatcctccaaaatgtccctttgcctttgtgtaaataatgatcgctacaacaattgtacctctactatgatatcactgtattctatttgaggtttgttacattttatatgaatgatattagtgtagtttgccacacgtttgaaggatttctcaaaaaaaattacatattattaccacgaatatatctagtgtgccgcacgattggtactaggactgacgtggccaaaagtgtcaagatttgaccaagtcatataaagattagtgaattccattgaaataattattttgatgccccaacgagtctcgagacatttttagtaataatgaatgattaaaaacggtcgaaataactttatagccgttggtcttggtcatgtttctctcgcttaccgtttttttggcgcaggaccaagaagtaaaaactagccgttacccttacaataaacataaactaaactcttgtctttgtcttcttcctcctcactccaaccataattagtcttttgctacaacactcactcactcacttatttccattacctctctcactaaaaatcaaacttttctctgtctcactctctccaaaaacagaggaaggagaacaaaccaagaactcaagctcccctgctcttctcatctttcttcttcgttttctattttctttcttctttattctttgattcttttgaaatgaatcatctttacaaaaacccatttcgcatttatgaaattagtttccatttctgcgcgagtctactcttgtgtttcttactcttctctgctcaagctgttgcaggtggtggaggtggtggtcactcttgggatggaatcgtggtgactcaggcgaactatcaggcactccaagctatcaaacacgaactcattgacttcaccggagttctcaaaagctggaacaactctgcctcctctcaagtttgctccggctgggctggaatcaaatgcctccgaggtcaagtggtcgccattcagctcccttggaagggacttggcggtactatctctgagaagattggacagcttggaagtctcagaaaacttagcctccacaacaatgttatcgccggttcggttcctcgttcccttggctacctcaagagcctccgtggagtctatctcttcaacaatcgtctctcgggttccatcccagtctcactgggtaactgccctcttctccagaatcttgatctcagcagtaaccagctaactggagccatcccgcctagccttactgaatccacgaggctctataggctcaatctcagcttcaattcactttccggtccccttccggttagtgtagccagatcatataccctcacttttcttgatcttcagcataacaacctatctggttcgatacctgactttttcgtcaatggctcccaccctctcaaaacgctgaatcttgaccacaatcgcttctctggagctgttccagtgtctctctgcaagcatagtctgttggaagaggtttctataagccataaccagctctcaggttctattcccagagaatgtggaggtcttccacacctccagagcctggatttctcttacaattcaatcaacggaaccatcccagacagtttctccaacctttcatctctagtttcactaaatctcgaaagcaaccacctcaaaggcccaatcccagatgccattgatagacttcacaacctgacagagcttaacctgaagagaaacaagatcaatgggccaatcccagaaacaatagggaacatatctggaatcaaaaagcttgatctgtcagaaaacaacttcacaggtccaatcccgctctcactagtccacctggcgaagctttcttcattcaacgtctcctacaacaccctctctggtcctgttccacctgtcctctccaagaagttcaactcaagctctttcttgggcaacatccagctttgtggctacagctcctcaaatccatgccctgctcctgatcaccaccatcccctcaccctttcacctacctcatcacaagaaccaagaaaacaccaccacagaaaactctcagtgaaagacgtaatcctaatcgccatcggagctcttctagccatcctccttctactatgctgcatactcctctgctgcctgatcaagaaacgcgccgccttgaaacaaaaagatggaaaggacaagacctcagagaagacagtatcagcaggtgtcgcaggaacagcatcagcaggaggtgaaatgggaggcaagctagtccatttcgatggtccgttcgtgttcaccgccgatgatctgctctgtgccacagctgagatcatggggaaaagtacatatggcacagcatacaaggccacattagaagacggcaatgaagtcgctgtgaagcgtctgagagagaaaacaacaaaaggagtcaaagaattcgaaggagaagtcacagctttaggcaagattcgtcatcagaatcttcttgcactaagagcttactacttaggacctaaaggagagaagcttctcgtctttgattacatgtctaaaggaagcctctctgcatttcttcacggtaagtaaaatcaaagcaaaactctaactttggatttgataaagttgacatttttattgatctctgacattttgaatttaacagctcgaggaccagaaaccctaattccgtgggaaacaagaatgaagatagcaaaaggaatcagtcgtggtttagctcaccttcacagcaacgagaacatgatccatgagaatctcacagcaagcaacattctcctcgacgaacaaaccaacgcacacatcgccgattacggtctctcaagactcatgaccgccgccgcagcaacaaacgtaatcgcaaccgcaggaacattaggatacagagcaccggagttttcgaaaatcaaaaatgcaagcgctaagaccgatgtctacagcttaggaatcatcatattggagcttttgactgggaaatctccaggagagccgacgaatgggatggatttgccacaatgggtagcttcgattgtgaaagaagagtggactaatgaagtttttgatttggagctgatgagagagacacaaagcgttggtgatgagcttttgaatactttgaaattggctttacattgtgttgatccgtcgccggcggcgaggccagaagctaatcaggtggtggagcagttggaggagattaggccggagactgaagtggagacggagacgacgccgtttggatctggtggtgaaggaggtaaagatttagggtcaaatgaggagtaaaggaaagttttggggtttatgtgaaagagaataaagaagaagggaccgatatacaaataccacatttatattttcattgtttattctttgattcaggtaatttgtagataaaaatggtttgaagtttgggctagtaatgtaatgtaatttgattattcattcttttttggttgaagaagtaatacgagaattgatttggaccttacttattttctgtgctgtagtattattcagttgtttttggttaaaaggagagaagaacatgttaccaaacttcaacgacattcatacaccaccatttttctagagagtaagtggtaaataaagaaaatgatggaacaaatataacagtgaacgaaataaattgtgattatggatgctcaaaaaagagattatatttggatctaaacccaaaacttgttggttttaaatcaagatgaaagagaagaaagaaataatagttaagagatcacaaaaatgactttttagatataagtagaatagaaatcaaaagtaccttttacaaaagtcttttctaagccatttcaccattgtttcttcagtaacacaattattataaaaataatccaaaacgccaatagttcgatatacaaatttatgggttgaaacaacatatccattgaaaacggcgacgtttagtcttagtttcaggcaagatcttggcttcagattcgagttgagtcatggttttaactacgatttcgagttcagcctcagtctcagtcatgttggggttgtggtcatcttgtgaagcacaaaaatgaacatcaaacatctcccacaacttaaagaggtgggcaggcctcggctcatccaacactaatttgttgaaaattcccattaagacatcacttttccctgaaatatattaagtaagtaaacacattattattaccatatatattaagtattggaaaaaataaaatctaagtaaattggaagccgagtcattctgtacatgaattcaaaaaaaaatttgttcattgatgtgataactatagaaaaatattaaagtagaaattatctcacatcaaaagtcgagaaaatttccaagtaatataaaagtatattacacttttctacttttgaattaacgagcatgtctaatatttcgattgtggtatcatctatagatgtctagtcctacaaacttcacctttcagattttcaatcatcaacgttaggatgggggaagggtaatgtataaaagtataaattgtcccacatcaaaagttgatatattagagtataaatcaaaaactgtttggcaaattattatgttgtatactacataacaagatttttcaaaaactggatcctattctgatttagtattacgttaacgattatgtacattaaaaactgttttgtttatgttaattagaaggttctaagccaagactcataaatcctctaaatctgaaccaattttaataatggactcgtaccagctgtcactcaatactacagagtactagaggtcagtaaacaacatatatagtatgttatcaactttgtagttgtatcatttggtataagaggcatgttgttttattcgtattaccataagatattagtgtttcgatgattgacctaattgtggcaagatgttataaccgatatgacctaactgtcatatatttggccgaagttatatgacagttagggtatatatatacagttttgatgtattatggtaataccgtaatagttatttggtgaatatatatttcatattatattctacaatagagcattcactatgtgaaatagtcaatactagagatgtacatattggagaaatttggtttagcataaggccagagtcaaatttctactcaagatatgcttttcaaatggagacttttggctgtacacacatgtttgatatgtggtttggaaaaggaaacaaggaaccacctcatcttcaattgtgttttatcttataaagttgtggtcactgcaaggctacacacctctacacagctccattatcttataactatatcttatataagttgtcttaatcttctatttgatcacaaagcggactatccttataggataaaagaacctaagaacctctatttatgtaatatgtaaggaaaaaaacaaagatttagtgatggatatacttttcctccttactttatcttaaaataagtagactgaaactggagaaacaaggtttcagatcaaaaatttatgagtagaaagatgatcgttatcatctacaaagataatttcattcttgggaaatcttctataatacttgtatgttacatatatttttacaccctctaaccaatgcagtctcgtcttgatttctgaaactttcttttttcaacgacattcagtatgcagacttgaattcatgacacatcaacgatagtagcacaaatcgagaagtcacttgtcttggtctaattttgtacttacgaactaaaattcacataaaaacgaaaccctaactatgacatcttaagccctaaaatataaatcattaattcgataaatctattgattaaatttttatctcaataaattatattttaaatatgtttaactcttattaaagattaagggcggcgaaattaccgtaatgttttgaaaaaatacaggttgaaccgtcaatcatcgccaattctgttaagaataaaacaatatatcataagtcatccatgatccatatatattaggcatatgagcagcatcgttttggtcccatgggtaaaaaaaactggaatatataaatctttctataatacataaacttaattactagacccactcgttcttttggtcattttttagatcatttcagttttgaccctgaaagttatgatcttttttcttgtttaatttattgtcagtaaacataaatctttggaccagtgcacttttgctcatcccacttgggtcgagcatgtcgtaagattaatgtatgtaaaaacaaaagtttggctaagtgtttttctatatatatatttttcttgtttcttatatttttatctaaaattcttcttaagtaaccattttatactttcatatcttttaaagtcaaattttataatcttgtaagattttttttttgttcatcacatctacagttacataagaaacaggtaattcaatatcagggaaaaactatcccaatatttcagtttttgatattttataataaattgaatacatagcttttatcaggatatttttgttttatcaaactgcaaataccggggaaaaaaaattacctctattttcggttgtgctttcatgatcttttggctccttaggatgtatctttctcaccaatgatctaaagattctacggatcccccaattgttttcttttgcacttcccatcttatctttctcgttgacaaaagaaaaaagtatcatgtgaattgttctttgaaatcaaatcttagtattgaacttgaaaaaaaaatctgcaactaaacacaactcttatctgtttaaatgtatggagacaaccacctattttaatgtgcatatttttctttaacaaaaattggtaatgtacatatattccattcaatttattttttccattcaattttttcttaaatttaatatttgattatgtatatatttaaggcaccggattatattcctttaaaggattgtttattaaagagatgtaaggacatacgtaagcattgtctaaatgtgaatatggatataaaagtgaggaagatttgttctatttgtagactgtagtgacaggggttgttacactgtcatttccatttataattacttttcatttttctaagagcattctataatattgcatataaaccatatatagatgcttatcctatctaacttcttaaaactactaaagaaattcttaaatcttccattttttctttcataataaatatttctaaatttgtaatcataaaatttattatttagattgttttctttatattagactatcttttcctaaatttattttcatatgtaatatatatatatatatatatatatattaatgctttaatatttcaaaaatagtataatatattaatctagattttagcggacccataatcctcaaaacaaaatcttatacaaatttaaaatacactacttacatatatacttgttagttattgatacttttcgaagtaaactacattacttcaacatccgaatatgcgggaacaaaaatgtccaactcttgacctataacgacttattttcactaggagaaataatcagacttcggatttcggaaccaccacatatttctataaacctgtcaatttcatacaacttggtgagaggaaccatatagatctttgtccaatgtccaaataagccaaaatcatctttaatttttatagactctagaaacaactgcataatttttactatttactttagtatatatctctggttacgtgattgttatgctttacaaaatgatgtacaatatgagatgtgtttgtgagacatagcttcaagaaaacaaaacattttattcattcctctgttaacaattactctcacgttacttgttccatgtttgccttcagtcacaacatgaaagcattgttatagttattctctattaccctttcatcattagttttttttttgttttggttatacataaaagggatgggaaaatattgaacaaaaataaatctgactataaataacatatcatatttaaaacaaagagctgagcaaatagacaaaacaagactttaaattcacaaaaaaaaaaaaaaaaataacacaaaacacataaaaaaagtcccgtggagataacaatcaaagagatggttgtcgtttaagtctccttcagtcaatcgccgagtggatcaaaatggctgcctcgtctgttgttggagctacgtcttctgcgtttagggaacataagtcaatgtagtagtgtataatataattaagccattagatttaatacaagtccaccacatcttaacactatcttcgtaagatttaccactaaatttaaccttcgaagcgtctaactaatccaactaatctcaagagcgaacattctctttgcccaaaaaacactgggacagatcgaaggttaacactaaatggaaaaatccgagattattgcaaatttacgcctttaacactaaaatcgagagcaccgtacctggcagatgagaaataatcttctctaagattccaacacttgggctctcttgttccttctcatcttcatcttcacatagagatttctgaatgttttcactagattttccctctactgttgttgttgtacaatccataaaattggatatcagattgttcaaaatcccacctttagctcctttctcgtcttcttcttcttcttgtttatctttgttcttttctacgacttcttttggacacatgagcttctctgcttctggaacgtcttcttccatatctccttcctttttgtttctttccttaccattggttccaaaaatataatacagtgtaataatgctctaatattgtcttaggcaaacaatgagataatattaatatttaattatgtaaagttatactaatacgtaattagtcggtagaaattagaaaatctagaaaagaacgtgacacgtccactgataccgacaagcggtcatgtggtttttacacgtacctcgtaacttgttgttgtaccatatacttcattacacgtgtctgctaaactgtctaaaaaagcattttcacattcttggtctgattctcacggatccacgcgtccctttattcgaatagatctgaatttgtgcaattttaccaattttcaagtgtacttcttttgtcgcaaccattttccaatatattttttttatgtatatagcaactagtcataatgttttttgccccaaggaaaaaaaaagtcattattttatttatatattgcagctagccactattatttaacaaaaaaaaactagcattagtatgtgttttactttttacttttttagagaggtaggatttcttaggaaaaagaaatgaaaagaagaattaggatttaatctttaaaaaaattgtcatgttgctcagcagatttggtacccaaagctaaagcccatcacaatgggccactctgtattgtcaagtttcatctctttgcaatctcagatttctttcctaatttttgcaaaaatttgcttagttttctctttcaagaaattcagacaaaaggcaaagtcatttgttaaggtttttttttttgtttaattttattttacattacaaatatagaaaaagatcttcagatagttacacttgcacatcttatcaaatcattcaactttaacaaaatacaaagaaaaaaaaaaaaaaaaaaaaatccatcaatcaaattgaaccaatctgcaagcctaatctattataagaaaacatgaaatctggaaaaacaattcttaggtcaaaaaaatttcaaaacataaattgtggatgatatatagtaaaatacatactacataattgttttagagctagctgcatcaattttggctataagccttgtctttgtacatgctttttttttagtgtgttattattaaccaccgcattttacaagaaaccaaaaaaggggtgtcacacaacaatatatcatatatatagtctaaatactgtaataacaagtacctgaattcatctagttatcttttgtaataaacttgggttgcaagtggacgtgtgaagatggagaaaaggcgtttttgacgccacagattctatgcttagtgctccaaggcagcaatacatgtaatccacaagctt

SEQ ID NO: 98 - DNA, 77350 bp, Arabidopsis thaliana
aagcttgacatatctcaaattatatccgaggaaatcaggactgcccttaggtgactttgacttaactccaccattcaccatctttgttgcctctttttccattttcactaagcatcaaaaccttgtggtctctcaataaataatcaaataaatatgagtcagtgtaacagaaagatggcttctttgctgcatgttaccgttgaagtggcgggttttgctgcatcattcagttggtgtggtgtaactaaaccaatgctcggttcaggtaattaccatttttttgaccaatgagaagtaatctctcattctccaagcaataatcgataaattcatacaactgaaatccatcatctccgttgaaatgttcaagaagataatcagaattctgatgtttcatccctgattggactatatttgactcaaaccattatatgtaacctaaacattcaacacaaaaattgtacagcacatttcaaaccatattaagcttaccaactctcactaatgaaaactacaaaagtttaaccaacggatctctacaatgaattattactctgaccaaaacttcacaaaggctgtcacgaaagatttcagaactgccaagagaggatttgtttcttgtcttcccatattagattcccctttccacgattcactgaaaacaagaagaacgaaagctatgtgaaaaaggagacccaaacacaataccaacaacgctaaagcacaactgagacttcggagtgtgttcactcacggtttaattctgtttaatgttgcattgttttctttttgagagctggaactatctggagcatcaattttccctttttccatggttgccttcttctctacacttgcgacttcattcccggcatagctactcacagtgtccacttttgctctgtcgttcttacgacttcccgactgttacacagttaaaaggttacaaagttatcatccttttctagatttttcatgtgccaagtagtttaactcagtttttaagaacaatcaactaacagctccgcgtatattcagtttcaccttagttctcaaagttggaacatcaaaattgactaccaaaacatcttaaaacattcaagaggttgactattccatcattaacgtccttcagccactatgatgaaaaaccttatcctaaactcagataggaaaactaagagaatatttaggacaacctgtggaacacaaacataattcttgcatcgaacccatgaagattatctagttccagtatccaaatagaatttaaaaggcacacatataccagacgaagcttacctcagtgctagatgttggcattttctgttcagctgtcaaagttccattactaaattcctttgtctcatggacgttgccaatcacaccattcacaacaactgtctctttagcatcagcacattcaacatctactgaagcagaatttacaatttcctctccaactttcttttccatagggacagaaatatgatttggtatttgaccaacaatgacttccgtccctatgtcttcaagtacagcagatgaagtggatgatgaaatctccccaagatcaacatgatttactgtgctgcgatcagcttccacctccgtttcagttcctttcccaccctcacaaactttgttcaactcagtaggttgtgcatccggtgagtccatcgttgaagtcacagattttaatggaaacgtctcaacaactgtttctgctgacatatcaattgtgcctaatccgttcttaatttcggtcattgctgctcctgcatcattcactctatcgtcattgttaacaggctttgtgccgtctgattccatgaaacgaagttcctcaaatccttcgtctttgttatccacatcgagtcttttatcctgtggtttggtgtcaacgctatcgcacactgtctccattctattttgtagccctgcattactcttgatatcattgtcttcactgcaagatgttgcaagctgagtcatagatatgtcagtggagtccattgactggtgtacgagcccaatgtcttctttcaaaagttgacttccactcacttccctgcaattatccaagcaaacctggctaccgttaacgtttccctcaggtgactcagaagaaaaatcaagactttgatatgacccagaatgaaatccgtttggggacaaagataaagggggcacaggatccatcaggattgaacttgacagactttgatcttgcacagagccatttccctcaagtagcaagtcaccaggaccaaggactctattttcttggataatctctctaacaatctcccttatagtgtagaaagatccaccaacctccttgtgtgtgaggctaagtgaaggaaaactcccattgtttagtttctgatgcctgaaaacaaacactaattacaaaagctgggattgaaaagggaaaattcaaaattccggctaaggaagagaattaggtgcatacttctttataaaagattcaaccagtgtctttctctcttctttaggaatccgattacgagtcctcttgcctacagaatcgtgaggcttagctagagcaaatatttgcccaacgcaagtagtcttaagagagtgcatgttgtctctctctctttgtcctattatataatcctgtagcagaagagctaaagtgaaatcagaatcagacaacataacaagtctaccaaagaaacacaattcttaagacagatccgtttagttcattatttcgaaacagtaactgtctaaataacaaacaacaaaacgaagactctcaatcccagacaacacacacgaagagtgattcttatcatctgaggacaattgaattattgaaaagcaaaaacttcttcgataatgagaagagagatgcttatagtttgtagggtttacctgagactctgcaactgcgagaaaacgagagaggtcgatagattagaactcacgagtcatctttgcaaatggactcactaaaccctacgcagtacacagacacaacactgtctcagtgttgggaggcgcaagcgggaatttgggtaattatttcaacttttggggcaaaatcgtcatctttcttttctttatttatttccagttttgacccccaacacttttttttatcgatttagaccctcacaggttgaccactttcaaccaaagattacattttcatcaattttgaccaatcttcacatggtgaaagaatgtaattaagaaaaaacaaagattttaaactatatattatacttgaacatagtactactaacttcatgtttttttcttttgctgctataagcgtaactgtatgtattactaacatgaagcattttattgttactagtaagttgtacattcacatagtctagtcggatgctctcaactctcaaacttctgcctcagaacaagtctccaagaactggattagtttcgagcgttcttcctccaacagctcagggtcttcgctcgatagtctctcccgagttgtaccatccacacttgttggatcgtccactacctaattcattagtacacaacaacattacagcattaactcattcatcaaaacttgttcagctatatgttaagagacagagacatttttactttagcgtaattgttggtatggccgtctttgttaggtcctataaacggttcggcctcattgtgtgtccattcaccatctatgatgtatttatattcaaactgtccttcctgcatttcagaaattgtagtggttgttggaaaatgatcagacactatgcttaacagttaagaagaaaactcacaggcagttctctctttaggatccagaatcctgttcccttgtccagtgttagaggtatcctctacataaagagaaaaatggtaaaaacgaaaagagctaaagaaatacattaccttttatatatatacgtccaaatagttttgcacaatcataagacaataattttcagaaatccaacactcatctcttccacttcttatcaaagaggccattcttttaatagcagtgacaaaagtgcatcctggctttaaagcttatatggcacaccatagatttaagagcaaggtgtcataataaataaattggtttaagataaaatatatttacctgtccccatccaatgtcaaggccagaaatttctactctggagaaccccttatctttcagtgtcagagtaacagtcttcctcttgagtcctgtaagcttttatccatatacacccggaaacaataatcaggagtcaaggaaccaggtaactgttgcgcactcatgctaatcaatggaactgaggtttttcaaacataggaagcattgtgaaagttgaacgctgactcacaatatcaattgttgcatttctgatagcatccagcttcggaaagcacgaccttttgctctgcaagaaaatttcagaaatgttatataaaccaaatttacgcgtgcctttatgtttcaccagccatctagagatatcaaactaaaaatgtctaatgctagactattttggatgaactaacccaagatttttgtcttttaaagtgctatatcttcagtgtatatttactacaaacccctgacccaatggtctatgattctagttatcataattgtcggttcataggagaagaaggaaatccccaaacatcctcacataatataacaggcagtaacactagtaaaacatgattaacatgttggttacttaatataagtataaagaaacacatatagagaacataaaccacaagtaaattagtatcttaccataagtaatttatgagcttccataagcttatagccttgcacccagaacatgtatgtcaactgaaaatgaaattaatatcccttctcagtatcagtcagcaaaatgtgaaaacttgttcataccttcatgagtcaaccaaataagcacaaaattaagacaactactgtttgcaacagtcttacattttttcaatactggaaagaaaagggggaaaaagagaagagcttagtaacaggtttctgtaacataccgcaacagcaggagcccttcccattccagcagtgcagtgcacatatgtaactcctccatttcgcttaacagctttgtaaagagtaccaaccacggctggaagacgcattctcaaatcaaatgcatcaaagtctctgttacatcaatgatatataatatgtcaatcccctacgttgtgagtgggtacgtccatggtgaatttttctatgcatgtgctcgtgaacagtctcatatatgccaaaagggatgatgatggttccaagtctttagcagtaaagaaatttagtgagaatgggatgatgactaacttctacagttactctagtttgtaaacagacaaaggtggacgaacaaaaaagttagttgatagcagtgatttcacacccggtaaaaaaaaactatcactcacaattcgtcataaaccagttattgcttacacaaaagtgtgctgatttcccattagcttaggaaacgtgataaaagtaaagagcccaaagaaaaagaaagtataacacttcactgacaaaacaataagaatttaaagattgcgtgcctaaaagatatctgagactaccctccaacagtgtatatacctttgttccctcgcctattcagataattctggaaaaaaaactacctcatatgcttcttataaagtcaagcaataagaaaaatattggaaaggaaactaaaaatcaactcatgatctctccttcgattcattacgcatcagctttgaataccaatatattaaaaagtcacagctagatcgttgccttacctaatttcacagcgaatatgctgaatatcactatatttcttagcataggcttggatgctgcttatgtctactccaaaatatctggaaggattggtcaaggcattctgcactgcagatcattcttcctcactcaatgcgaaggaaagtgaaaacaaaatcataatcatgaacagaaaaagagggctttggaaggatactccaggtctggatcttgttgcaagcaaaatatggttttaactccaattttacgaagcttgtcaacatcttcaggggtctagcaataaaggagagcatacagtaagaacacgaggaaagtaccacatatccaaaacaaaatcatcatttgagagaaggatataaaagtgaacctgtaagcaggatccaacaattagatctggacgaataaagttgtagttcattcctaactcgtgcctgtaagttagaactgaaatgaaagacacatgagaatgaatcagtgactgaaatacataattaaggagaacaagaagataagtttgtcaataaacaagcaaaagatataagattccttggtagacagatgaacaaaactaatcaagatgaaagatgaaaaacaagagtagaatacaatccaatgagctaaatcaatatttccaatatgagacaaaaaatggtggacatcattagagtttccaatctaaggacatgtataggtatgatgaaaacaatttaccagcacccatagcttgagtcatgtcttggctatattcatcagatttctcttcatcctttgcaacaccactcatctctgagctggattttgactctgatactgcctacactcaaagcatttacaaaagtgtcaataaaagttagaagaaaaaaactgatataacaatatatcttaaaagaggtgtatacatgtaaaacaagtcgagattttggatcattggctttgatcggaggcgatattagcatcttcaaagaagaagaagaagaagaatgatctctttgaatgcacccgaatcccagcagaggtgagactgaacatctgaaataaatgacgatcaaagacatcaacaacacacaaattcatatcgaatcaaagaaccacacaaatcaacaacatttgctaatttcggaaagcaagaagatacctgggaagattctgaagacaattcatctttagagagagacagagagtgtagaaaaatatcagaggaagcaaacgaagctgctactttctcagtcccaagttcgacgatagataaaaaatctggtaattataataattttcaattcatgtccaaaaatgtttgtgagtgtgactctgacggtcacgcgactcacgacgatacaattgggaccccacggtctgcaccgggaatgcaatcacttttgtttgttacgtaaagtggaacacattactagaaaaagtctccaactttccacaataacaaaaacaccctcttcacaaaactaatatctgctgccacatcagcaccgtcaatattgaattgggttattctgtctaattatttttgttagaggttacttcatgaagataaaaagtgagaggttctatttttatatttctcaagagctaatgggaccactcatatgacgccatcacgtctcttattgttacaaaagatcttctctgcaattttaataatattttcagcacaagtaattagcaacagtaattgtctgtaaataaatcaattaatcaacaggtatttgtcagagcaaaatcagaagaaaggaaaaaaacaaaaaaaaacgctgcaacaagataaggaagaaagaagaaaaagcagaggaaagttacataatctttctataggtccaagttccacctactatgatcctcagaaggcgtggaggaggaacctccaaatagactaatctttggtcttttttgatcttttcccattggtaacttccaaaacgaatctgagttctcgaagaatacgtatgcagctatcactgatgccatgaacaagcaaaacagcagtgcatatatctgccactctgcacatcaaacaaatagataatagtgagaaacaaatgtataaaccccaaatatgtgccattcatattttcagagaaagagattagcaacaaacctttccactcctttggtacagtgagtttggtcaccatctctccccattcgctagaagttgtcagcataaccctagaaagaaccaattagataaagatcaacattagaaacaatgcggagacataagggttttgatttatcattatcctttcaattgcttccccatacctttcactggggcagaactcaagtgaagcaatggattgaccaagatgcagcctcttactgtagtggtagatttccattgtcttaacttcagcaacagatacatctccatctttcccacccctacaaaaataggtgcaaagtatgaggttttatgtacaatcacacaagcctgatagtgataagcagcccgggatgaagaaagactcacaaagcaatatatttcccgtccaagctcactgccattgtcgatgcagtcttccttgacagcttcttgaacccaagcttcttccatgtactaatgtcataaacattgaccataggcgtatcacctgattccaatagtttaagctttcatatgatgtttttaatttgaaatactagtgatgttactcgagagtcggatatattatatacctctttgagcagcacaaaacaaaaaaggttttgttccgtctttagagaaacggcacagttcaatattttcatcctgcagacatgacaatatcagaatcagtcaggatatatcagaagccaatataggaaacacgacagagacaaaatcgagaccgagaaatctcagaactatatttattggaaaagatcatagacatggaaactcatccttcatacaaatttcactggatcttattagtttagaaatataggaatgctaatgcaaactttaactctcacaatcacataccccactacgttccaaagtagacaaaggaaaaccatcttctgctttccatattctagctgatccatcagttgatgttgtagctaagaactctgagtcaagactacaaaaaaatatacaaatatgagaaagatgcacacaatgggtttcgtttcacaatctccattaattactatttgtgttgtataacccaattctcagctctatacagaagaccattttttactacctcaattacagttttgcattacaaataatataaaaggggggatggtggttgagaagattccagtatttacctaaaatccatgtcccggatggatttgtgtgcctttggctcatccaaaattacacttaggtttggccactccataattctaagacatccatcctgaaaataacttgtagtaagctacaactaaattgtcgcaacagtgaaagaaaaaaatcccttatattgcagttccttaccactcccccaacagctaatttagacccatcaaagctgaaggccatacacttttgtagtccagcattttggagaggaaggagttctttggctaagatcgtaatacctgttgctcctccgacaagctcaaataacctgaaaaccaaataaagttttaattaccatctagaccgtaaaacaaaatttgtatagacaatggggtagacagtgtccaaaaatggttgaagacaactcctcgtatccatgaaataagtggaatagtagagttgctaaagatgaatgcaagaaagggaagtcaaaatattatgaaagagaccaattataaaaggcatcggcaatctccaacaaaagtataggcatatataaaataaaccaaaccttaaacacaagaaattcaagcctcactacaattaattctacatcagcaaacatgggaggtgggagatcgtctgatgtaatgagagaagtaatgtaaagttctagtaatctgatatctagttctcatcataggtttaacaataccaactcaacaaatttagaaacatagtatcagaggaaggaactgtaggatgtctagtaatcataagttttgggtggtaaaagcagagatagaaacgtacttgcaaccacctttggaggttgagcaaacaaagtaatccccaccagggtgcactgaaacagccacaggatcaccatcactatccttaagcgtgtgtgttgcctttggtcaaagaaaaaagagaaaaaaggttggtttttttatttcattagtccacagaagtaaacaccaaaagaaaggggctttgctctgctttctcagaatcagaagaaaacaacttgaagaaccctagatttattgcatgattcagaagaacccaagtttcgcaatccaaagaactatagtagatttcaccctaaacccaataagatttcgaagctctcgattgaaaaattcaaaaggtgtaagaaaaatttaccaaaggagaggaggaaagagaagcagtaatggggtcaaaagagaagatgttgaggagagcaggagaagaaacagatgagccacggcgtttggaagctttagcgataagaacccagtttactttcttcgggcgacgaatccatgatccgcacacaacatgtccactttcacgactcgcttcttcaatctccattcgttgttggattgattgttattaatttcctctttggtctctccctaatttggatccttaatatatatatagacagaaaattgtttttttttgtgtgtgtgtgtagttgttgttccagagtagagaagaggaaaacagaaagtaaaacaaaaaccaaaaaggagttgactttggaaattggacagagagattttgttgagttattatataatgggattgaaaaatctcagatttaacaaacggacatttgcggtggtgggaaaggatattccttaagatccatgttccgatgccgaatttaatacaaacaagttaggtcacatcgtgcttccgtaatctatagcagactttcccattggtgtcaatctcgttgtttaaaaaaaaaagtaatattagaaaagattgaacgtaatctgaatattaagaaaaaggataaatatgaaaagatatgatgtaaatatgtaatcgatgcatactcttaattatgcaatgtaattctttttttgtgacattaatacattatatatcctttatcttataaaacacaagtcacttggcaaatcatgttttgacatgtggcaaatttatcaaaaacaaaatccacaatgtaaaacaaaaatgaatttttcgacaaaactcaaaataaaattaaatgtgaaaacagtgtacaaaattaaaacattatcgtcaattttcccacgatcactctcaaaagaaaataaaaatcaacccacatattctccatactcccacaatttctttttcttctattcaaactatgtaactcttttttttcaattaaaacattcaaactaactattgggaaacaaagacagatacgatctcaaacctatatatacaaatctcggtatcatctttctattgttgatattggtttttaaaagaaggttgagagtaaaatcatttaggagcgagaccttctttgtaacaagagtcttcaatctctaatcagttcatataaggcaatatggccagcgtatgttatatttcttttattttattgattgcgtttagatgagtatattaatgctttctgtttttgaattatcttttattatgtatgtttaatatctttttgcttcatagatcaaccactaaaaataaacaagcaaacttgatcgatagaggataaaacacaaacaaagtagaagacttgagcaagaaaaacaccaatggcaaagtagtaggaggttgaagacgaagtagaagtgtacaacattaagacataaatgatatcatctatgtattgagtcaacttcactctggtaacttttttttgtctatgactataatctatgtttgtattgagtctttgaataccatatgtaattttttattttatagcttttgtatgtattctagaaagcattgaagttggaagctaattctctatatttggaagactaataattttgtgatatcaacttcaattctccattatatatcaaattatcatctgaaaaaataaaatccacaaatacatgaaacgatatatttttccctacacgattatatactaatctatttataaaattaatttttcatgtataaatatcgataatatgtaacatatcataacatttaaattcaaaaaaagaatgtatcataacattaattttcggtgctatgcaccgggtataatactagttacaaataaagtataaaaggaattaaacttttatatagataattaacacaaacaaaatattagagacgatttcaaataaattatgaggatatagatgagaaaaatactatatagaataacaatagtaagaaattaaaaataaataaatcaatttgtacatataaattagaaagaaaaatatagataaataattaaacaatattaatagtatcacataggtcaattaaaattttatatacaatagttaaagagtattatatctcaaaactaagttttgatactgcgtagaacaaatcatgtttcaagcaaaaatgatcaaattcctatgatgctggaaatgcttgacgatccacatgagactggctatgtgcatgtatggagaaaaacgtgttgttcgacaacgcgtgcatgccttcttccacctaagtgacgacgcatcacaaaaagttatctagtagtgttaatagttcatgttccatctgccgaaattacacacaatataacgtattcgattatttgttatccaacaacttaaacgattcgaccaactcactcaaccttttgtcactagttccagtcatatatttcttataaatactcgttcactacatctgtacagatcgaaagaatctcttgatatattacaacacacccataattcataaagactagctcatatacctttgatatatgagatttgatctatatgtcgttctccttaactagatatcgctaattgggcttgcattcaacaagcaacatatatcgcttattacattcgacgatactcagcttctacatcttaagtctctctttttttctgagctcaccatcaagtataagaacacaattctacctcttatttgtctactcccaattttttgtttttggtttttcactattctgacatcttatcgtattatgattaacgttaagaatgtcgtctcgaaaatcacctacctagctattgtttcaagattcgactcccatgcgcgtcccatcaagaacaaaccatccagaagcatcaacctccaactattagagaataatgtcccattcgcccctcgctggtcaaatcgcttccatttgattcacataagtccaacaacaacgatgatctctggtgtactactaccaaaactcaaccttgagacagattctcaaaatactatatgttctattaactattttaacttgaatcaagttgataattgtagagagaaattttttgttcacttcttattaatttgtaaaacatttattttaaaacccattaccgttaagctttgatacaatgatacatgttattttctgattaaaaatggttataaacttgaacggtataagactttagtgtatagagaacaatttagagaatctgtatttatgtaaccgcgacctttcggaaacgtagaaggtggtcgcacaaacaaaccaatcaaacccttaatcgatggcactcttttaatgtctaataaacttcggttcgtcactcgaccggacaattaaatatgtgattaaaagtgtgaatttccggttcggtagagattactggtatttgttaatccgggccggaccgggccgtatctgaattatgaacactttcctaatgtcatagaatcgttcgtgccgtcgtcgctgcgatctgaccaaaatcaaaagtgttacgattcggtatcatcgtctctctcatttgtgattttgtcaaaccctgctctcttttctccaagtgctctcatggtgcttccgctcttccggcgcgctgcgatcgcccggacttcctcgcttctcagagctcgtcttttcgctcctgcctccgaattccattctcggtacgcttattctctctatctagtcccgcctctttcaaagtattttgatgttgctcttcttccatgtgtgatcctttgcaattcgatgactgaactgtttcttagttcgatttcattttccttttccgcaatcatccattgactttttttggagttcttattacgtattgtatagtgatgtttaagaatgccaaatttggttttgttggaacaattgaactatccattttttcttatcgaactggtagtacgggtttatcttctctagtttgtgagatgtaatttccattttacgtcactcgcagtgaagaacaagtgtgtccttaaactggtgtgatctctttacctttccaatacatttgacaatgaactttcttattcagcttttctaatggactataccacttggacgacaaaattagtagcagtaatggtgtgaggtatgtgttccatatcacaaattgaggacaagatttatttttatagaaaaagtcagtgtgatcgtaggcattcaaagtttaaggttataatttagttcgtttcgtatgtgttagattgttagtctagtttgagattttgtctgttctacattttcaggtctgcctctatagacttgattacaagaatggatgatagttctccaaagcccattgtaagtgaacagctagtactgtttcttttcttttttcactttcatctatccgtgtttctcacatacattgttttcttgtagctgcgatttggcgtgcaaaacttttcatctacaggtattcattgattgttatgtcatcttatggaataatgatcttcataaatgagtcaaccaagcaattccattatagaattactaaacgagttgattatgggactttcatctgatttgagcaacctgtcggcaattgttaaattgttttagccataagacttaccaacacagatgttaagtgggtgataagaataattaatggaaactttcgcttaacttgtagaaaaatagaaatgttaattgatgcaggtgcaaaaacttccatatcactcttttctctgatgtttgtgcttccatcataccttagatacagcgacaggagatgcaatcaattatacaagattcttccattaaattattattttctttgggttgtaggacccatatcacagacggttcttgcaatgccagccttgtctcctactatggtaggaaatttgacttcaatcttgtaaagaattttggcctcctccaagacatttggacttcaatcattgttttatgtttgttgggcttttgcagagtcatggaaatgttgtaaaatggatgaagaaagaaggtgacaaggtgggttatttcttatttttggttgacaaaatttcagtcgacttttatgattttgtctactaatgatcattatacaagaaagacgataaattgataatttagctggcaaagaaaatatagaatgtggaaattctcagtaacaggtatgaatttggttcttcctgacaggtagaggtgggtgatgtactatgtgagatagagacagacaaagccactgtagaatttgagagtcaagaggaagggtaattttgaaaaagacggttcatgattttatgttttgatttgtatttttatttcattataccttggtaattcaaatatctgactccctataagtatatgaaaatgtcaattggcttactatgaagcatggttctgcagatttctggccaagattttagtcactgaaggatcaaaggatatccctgttaatgaaccgattgcaataatggtaagcacagtggctgtcttatacatttatagaaaccaagtatgatctcacaaaaggtgatgcatgcatcaacatacgcttattaggagttcctgtttgtttatctagtctgctcttggcctctttcactttctttcgtttcctgggtttacattctggaagacttgacaaatcatagagatgtatggtatttcgttgtcaatatttattgtggaaaaatgtccaagatccaatctcatgctctcttcttctaaatatttccgtttgccatactgagttgtcatgttatgtccccaaacatgatatatcgtagggtttagggtgtagcgtatattggttacagttttggtcaacatcttgctacataaggttgatggataagagtttaatcttatctatttaattgtaaccaaggttgaggaggaagacgacattaaaaacgttcctgctaccatagagggtggacgagatggtaaagaggaaacatcagctcatcaagtgatgaaacctgacgaaagcacacaacaaaaaagttccattcagcccgatgcatcagatcttcccccacatgtcgtcttagaaatgccagcactttctcctacaatggtatgaaatttcatattttatgctagctttttttggaggagaaggcattcagctttctatcctaagactctgaattatttgtttattgatgtgcagaaccaaggtaatattgccaaatggtggaaaaaagagggtgacaaggttagtttctggtgacccgatgagtaaattggcattgtaatttcaccacaagaaatctgatgtttatgcacttgcctgtgttgattcttctcatttcatgaaacagattgaagtgggtgatgtcataggtgagatcgagactgacaaagccactctggaatttgaaagccttgaagaggggtataactaacatcttgtcgtcttatttctttttctaggcagtatgttgatgttcattctatatagcattcactatctgtggatattgcttcttttcttgtttggttaagtgagaagtaaatgttaattgcaaaaagtaaggtctctccaagtgttcccccttgaactgatagtgatttaaaaggttgatttcatgtttcgtagttttcatatgagtatgggcttcctctacaaaaactgatttcctggatcaaatgagtgaagttatataatagattctataacttgatggatgacttttgtgtaggtacttagctaagattctaattcctgaaggttccaaggatgtggcggtgggaaagccgattgccctaatagtaagtcttttagttcaaaagtacattgactgaattctttatgccagaaaactgtattacgactggtatatttaatccatttgttttactagcctgtgtgtaatgcattttgtgcataaattggtcgacactcttctagttccatgctacgttatatattgcctgaagtaaaagttatgcctgcacaaaaaatctttgaaaatacaattgcttgcagattgggggatataataagctaatcgttcttctctgtaggttgaagatgctgaaagtattgaagccatcaagtcttcttccgcaggtagttctgaggttgatacagttaaagaagtccctgacagtgttgtagataaacctacagagaggaaagcaggcttcacaaagatcagtcctgctgcaaagctattgattttagaacatggattggaggcatcatcaattgaggcatcgggtccctatggtacattattgaaatcagacgttgtggccgcaattgcttctggaaaagcttctaaatcatctgcgtctacgaagaagaagcaaccatcaaaggagaccccgtctaaatcctcctccacatcgaagccttctgtgacacagtcagataataattatgaagattttccaaatagtcaaattcgcaaggtaaattaacatatttattactctctatgtagaatgatgaaatatgtcctgctgcattctgttttactttccccacttggcagattatagcaaaacgtttattggaatcaaaacagaagataccccatttgtatttacaatcaggttggtgactcacaacctttgtattttctttgtgtattttatttgctgtttaagcattttattttgcctgcagatgttgtattggatcctcttcttgcatttagaaaagaacttcaaggtttgtagactgctcttatcacacatcctggtatttattaacaacttgagaggctcagagtgaactgtactttcatgatctacagaaaaccatggcgttaaagtgtctgtcaatgacatagttattaaagcagtggcagtcgcactgaggaatgtacgacaagctaatggtgagaaattattttctcctcgtaaatgatttcattaaaaataactaaactatggtttgttcccatccctaactatgcgctagattaaaaccttagttcatcctctttaaggaaactcggcttccatgttggattattcttgcaatgccgtttacctccgttgagagtatttagtaaagatgttttgagattgtaatactgtaacattcaatatgactggtaatgcattttagactcggttttagtcgttacaagtaggacattttttggtgtgagtttgatgtaatgatttgtggattggaatcgtgtggttgttttttctcttctgctttctcaaacctttcttatggttgcttaaagttctctttctcaatgtctggcagctttctgggatgctgagaaaggagatatcgttatgtgtgacagtgttgacatatcaattgcagttgcaactgagaaggtacacttgtgtgtttgattttctgatcatttcaacagtttatccctcatcatcttggcattttttgcagggcttaatgactccaattatcaagaatgcagaccagaaatctatttctgctatttccttagaggtaattttattctctctgaagttaaacgaatatggaaggctatagaggcacatatgtttgatcagttcttaccatattccatgtgttgttgatcgctatagttatgaattttaatatgtcaaatgatttttggatcaggttaaggagctggcacaaaaggctcgatctggaaagcttgctcctcatgagtttcaaggagggacattcaggtattcatcatttttaagttattaagcatagtacggaattatcaatcatgtgtaacttttcctacttaacgagaaaaccatactttatcgttttgcagcatatcaaatctaggaatgtatcctgtggataatttctgcgcaatcattaacccccctcaggtaatcatagccttaacgatgcaccctgaatcacagattgaagattaagttttgctgtttgtaatttgtggtgtagaggatttagtttaatatttatagagatgcagatgtgtttttttggataataaacttcaggactatcaattgtcttgcaggctgggattctagcagttggtagaggaaacaaagtggttgagccagttattggactagatggtgagctagtagaatccttttgggttttcaactagggttgctattctgatcatggtatgacaagttttcgtcattgtttcaggaattgagaagccttctgttgtgacaaaaatgaatgtaacgttatccgctgatcatcggatctttgatggacaagttggaggtaatggaacattcataaatcccttcgtttcgagttttatgttatgctgctgccatatttcactgtgtttctcctttgttactcattgctttttctatgaaaccggctttgtttcagcttcgtttatgtctgaattgcgttcaaactttgaggatgttcgaagacttcttctgtgagaaagatccaactgtttaccaaatgaatcttggattactacataataaacctcggaccaacccacgtgcacatccagaaccagaactgctggtctacattgttaactctgatcacatgtttcatttttttccatttggttcatatacttaccaaaatttgttttggtctttaacaattcgtcttatagattggtaacttcctgaggtattttttgtctggtctgtcctctgcaaaataaataatttcagctgtcaatccgcaactggtgaaataatttaaaaagtattttaccctcatcaaaatttttaaaatgagattattgccatctctgttctaccagatcttattgttgagctccaagaaacgatttatagacttatagtggttagtgttgaattcatccgttaagtctttaaccaagagattacaaaatttctatccaaaatttagggtttaagtaccattacaaaagaaggaaatatcagagatttgaaggtgatgtaggttaatcatctgaagtagtctaatgtcttgcaaattgtgttgtaatttgttctatatataaagtttttgcattttcggagaaataaagaaaaaaatgatcacaatacatccgaattgatagcatcgcattcgcataataaaaacttgtagaatgaaaaaatgaaaaatcacataatgaaacaagaaactatacgcttacttattagcataatatgcttttatttatatttttagacgtaagatctacattttcatgaatcttatgcatattttctcgattggttcttgcataatcgtattaaaaacccgttattcaaccattatccgtgttacgaataaagtatgaaatataaatgaaatatggaggcaacagaagaagaaaagtttaaatgtgtgtcaaaattgtaattttcagaacttcagccggagaagaaagacatgagcggcttcgtggtttcaaaaccggagcagagccatcatcgtctcttcgatttcgcaaagacggccataatcaacatcttcgcacatccttatgccactgtatctaacaaacccgcttcctctcaactccatttcatttacaaagtcttatcctttatgtctctctctctgcgtcttttctaggtttgcgaattgtactgtggcggagctcccgaaaccgacaagtgggaagctgctccgattggtcactacatcggaattggtattaatatactcttacttacatactcagtgttatatcagtacggcttcatcgaagattgataggtttgcgtttttttctatttgggggaagtagatacatcttctgggatttcttctgtacgagaagcttgggagagtcagaggaagaattacgatgtggaattctttgaagctgatccttccaaggcaaggcctttttttgtttttccatgtgtttcagctaaactaagtaatctggagcaaaagtcttagtttttgcttcattttgtgtcacaggatgattttgaaatccagctacagaagaaattggagcaggctgatttagtttcttgttggcgccatctccaggtttgagattttgtcgtttgttttctccgaaaaatgtagcatagcaaggatgtgatggtctaaaatcttctttatgtagttatgctttgaaactgaggagagtgcgagaagactcctaactaatgtagcatgtttactgaaaccagggggttattttttcggtatcactcctgactcgtctacgatttggtaatgatgttttctgtatcaatgcatcaacttcagcatttgattgcctatatattttgatcagttggactgcgctccttaacattctggtcaaacagggcaaagtaccagaaaaatgttgaagcataccacaacagaagcggtgcaaagcctaatgtatttccaaactacattcggtctgaaagttacatgatcactttcgaattggaggaagaaaagtgagcattttttatctgagataaattcattttgctatcaagttccttttgtgaacttggactgtttgtcattttcttctcagatttccgctgtttggaaagaggtaccagctgaaattttctggtgacaatgcttctgaagaccattgcttggttcacttcccaagcttaatcaggtgggttctcgggcaccatgatctcgcttttcttgtttagcaaaatgtaacactaattggatgatatgaaattaccatatcaacaatgtgcacttgttgaacttaaagcttgtatttattcttaaaactctttaagtaaacaagatttccattctactcgtgatattgcttctagttgagctacaaatgacatctagtttgtatatatctttcgagtcttggtcatctaacttattgttttggtgtttgctattcaggttagcgagggaagctggccttgaatttgtggaaattcaaagtttaacagatttttatgatgataacaggttcgaagtctcccatacttgtagattctcaatcttttatcatgagcttttgtatgtcatagttgctcctttcgaaggttgtattacaatgctgatgttgttcaactcttcttgtcagagcccagtttgcaagcttgctgatgaatgctggcccgaatttcgttgaccctaggggaaaacttcttccaagagcatttgatttgttaggtaaccttgccatcatattatgccatcttatcatatctaatctctagttttgatactttatatccttattttgcgcaggtctgtatgcaacattcatatttcagaagcctgacccagatatcgaacctcctctaacgaccccaataccttttgaaagctccaataatcatgatgaggcaagtacctttgtcttgtcatattctcgttctacacaagtataaataactctaaaatttccttttcacttgagaaaaagagtctggctatagctttagtatggactgtatagttttcagtttgtagcacaacagtgcttcagtctcagctccttgcccggatgttattgtagttgatccatttattaaattgtttttgacaactttgcagagagaattgccagttatcacggtgatcactgacgcaagtgcaccagcagaagatccatcacaaggactagggaagattgttgaacaaaaaggaatactgggaccaggccctgctgatttacgtttctctgaagcaatttgatgccttttattttaggaagatgtactgctttggtgatgtagtgaaagttgtttatcagtgccacagatgagctaaaacgagcgtctcggtttgttataatatcaaaccacatttttcatgtgttttaacaaacattttcaacaatgttcaacaacactttactccacgattcgtaaatgaaataagcaacagatttaaatcttgcagaagtggtagctggattttggtacctagccgaccactcttcctctgaagagcaaaatgttccatcctgggacaattcgcttcaatcagaatcagagtcatgccttctttttttctccttcttctctttcttgtgcttctttctatcatctgaatcacgagcgcttcgcttctcatgcctttcgcgtttttcacgcctatcatgtctttcttccttctctctctttgcaggtttcctttcctcacgcctatccttcttttggtccctctcaacatcatccggtccatcttcaacagttttgacccctgatgtatctgctggtaagcgtgctgaatctgcatcttctttctgagaggatgcaagggtgctcggatcttcccaaggtcgtggtgctctgtacagagttggagaaagacatgtgagacaagggacaaaggtaaactaccaataaaccataaagccaccaaaaacattaacatagttaaaaattagagttttttacgaaagaaaaagaacttacttagcatatccaagaccgtgaacccacacagcatcagcattccctgcacctaagtcctctgctgtcgaacccctcttcacaagttcagtaaactcttgcttatcaaggcgatttccttgtggccttgtagaggactttggtgccaagccaagagcctccctcatggcctgctcctcttgttccttaactctttgaatctcttctttcatagcatccatctcggaacccttttgctttttatctctagcataccaatgaagatctttacctattcagttggtgtacatggcaaatgaatgtcagtcaaaactcactaaactgaagattaatctacaaaaatctaaggcagtggatttatgaaaggagtaactaaagtaaaacaaccattgactgcccatactccaatgagattgaacagagcaatgaagcacaaaggaggattatatcgtcaagatgaaaactagttagcttacaaattaacaaccaccgagagtgtacataagaaaaagtacctttttgccatcttccaacaggggctttgatactgtgacccaaatagttctccctatatttatcagccttgacttcatcccaactgaattctgcacatttataaacaaattcaattagtaatagagttctcatcattagcagctcatgttctacatctttgatttgaaaactaattgccaaaaacgatctgttaattagaatgacaaagcttcttctgaatttcagcttctcccacaaattgcttatagacaattcaatcaaacactagatccaacaaaaaaaatcatcaaaatagcagagaagaacgaaaacgttggataatacataggaaccctaacagttgagaattttatgtaggatcttgtaattagaagcaaaatccaaaacgaattataatgaaacttacgatctcgaccaccgcgaacacctcccctcgttggatgatacatcgaaaccctgaaagttgcaaccttgatttttcctcaggaggctaaaagccagaactttgattggatacgaatttctcagatttttggttccaatggagtttaaataaaaacaaaaatacaaaaaacaaactgaagacggtgattattattatgggccaaataaggctttaggcccattagaggttaatagaaacaaaaacttgaaaagacacgtgtgacacgtgtcgtaagcaaagaaggagagaagtggagagaagtgaccaccagacaattgtaaagcctacctaatccacaccgattcaattcaaaaccctaaactcaaaatccgtctcggtggaggaaaaatggctgaagaagctcaagtagatcgttctaatggctctgattcatcatctcctcccataaagttacctcctttcatcaccaacctattcgcctttcttcaacctaagcctcctcctgctactattgatgccaatgctcctaaacctaccggcgagaaggaacctctgaaatcgacctacgagactgtcactttcccttacaatccacccaaaagcgcagagccaatcaagtttgaggctgagcccagctctggcaggacttccaactctgtcatcctttggcaggtgattttgttaagatgtttatattttagagggttctttgatgaaaaatgatttgaattggcttataatttggggtttggtgagaggtgctttgttatgttatttatgagaattgtagggacatggttgtttatggtagatgttcataattatgactctatgactcagattatcacttcctgtttactagaaactattctggctttttttctctatcaataggcaaatagttttcgatgttttcaatgtatttcattggttgcagtcagttgcagtgtgctacaatgaatgttgaaaatggtttcagtttttgttatgccttcgattcctggtaatgctttagatgacctctaacaattagcttgatgttctgtcgttcatggagtaggaagcatactatttttgctcctttcaattgcaagttttgtagtagtcagagctatcaaaggctgacttgatatatgaatagcatgactcgagaatcgagatgttttggttgtggtgtgctttattttctcatcaatggactcctgacgtatacgaaagagttttgttctgatgattgtttcaaatcctggaaaaagttggattctttcatggttaatttagtggagtattctctataactatttcaggtatatgcacttggagggtttcttgtcctgaagtgggcctgggcaagatggaatgaaaggaacgagagaagtgacaaaaaggaggcgacgggtgatgatgatcagaaagatgatgatgaggatgatcaatcatctgatgggcatgaagactagtcatattacttgaacacgatgaaaatgttacccactttggttctgtatagcaaaaacaccataaacttcaaaatgaagatttcttattttccattgtatgtacttgaatcttgagtctcatctccttatctaaggggactcgaaatctcttctcatgctggcaagaagttttttttttcttactggacaaatctcttgttgttgctgtgcagtgtctctttagttcgtgacttgtagttagatcattgctagttaagtttcaagagatttgtcatgttaaatatcataaaccgaacaaatgaacacacaaacattatcaacaaatgggatttcaacaaacggtcctataatgaccaagttatgaatcacatacataacttttgcctcttctatacagtattttgacgttacacaaagctgatattagtctacagtgtatataacaaccaccacactctacaaagatccaacaatcatatcacggcttcacaaggatcaacagaatcattctcgcctaaataagccatcatctgaaccactagtaggagacagcccaaacgggcgtgtgtaataaggagtcgaatacaattctctactgcttagaactgaatcaggatacaagcttcgagtaggtgtcacaggggtattatatgtacttgacgatacttggttaccttcaaaaccagatgttccaccagagattgcactgcctgaaactcttggtatgcctttattaagtctgaatcctggaacatcaaccatcggtggaccatctgccctgaagctggaccatagttttggtccaccgatgtatggggtggtcgaaagtcggtcatccactgacaaaggaggactggtttctagttggctttggaagccagtatttaggagattgtttgtggctgttctgctgaaaagctgatctccaggtactagggggacgtctcgctcaggcatatgggtaaccatggcgttctgagaactcgaagctagaaaagtgttcctatttgaagcatcagatgtaaaatcggtggggacacggaaaagtccagcagcacagataactggaaactctaccatggacccgacactggaagcagggagagatggtttagtactaaatgctggttccatcggtagtgcatatgtgttcatatatgaacctggtgttgaaggatatgagctttcagaatgacaatccgggtttctgatatgtaggctattgactttctcttgcagagacagcttcgcttgctttagtgcggtcagtacagtttcacaagtatcaggcttcacatctttcactgaaactaatggatcatctacttcatgaatggtagtggtagtactgccaaagaaaccacctctcgagtttggttgcgttacaggaggcgaccgaatagttgatgaagaatgctcattgatacctttactgctctgtggttgggaatactcacttgtagggctctcagaaatatgttttcctttgtctcgagaagaataagcatcttgttccacagatctggaaccacaactattgcagcacttatcaggtgacgttactgaattatcaggtgaaccatgcgacaaagtttcaaacgattctctaaagtcaacttcattagctatagaccttgtatcacggagtgaagggactactgtagaaccttgaagtggagattgagctttttctccgttactttcatccgtcacatctgaatggtttccaacgtcacataaatcctgaaagattggacaagaagtattgttcaggaattccagtgaattaagcggagactaagttcaacctttgtgaactaagatatcttcatagataatgtcttcagaaacaatatggttatataacagttaatacaaagaagaaaaaaagcatacatttttcataactttttagcacaatggagagaagacagaataaaagaatcaatgtatacgcatgcaaaccaaatatagaaaactgcagcatatgcacaattatcaacgccacataaaagaaactttgttggttgattcatataaacacgaaatataccataatcacaattgatgaaaacaatttctaaaggtcaaagcctgagatatagggcataccagggcagatgatttattctctctgaaatttttctcccattccctttgagtctcttccatttcttcaaaagatccgataacttgagcacggttttctaacgctctctccaagttgatgtccgtactgtttcccttctctaaaccatttgaatttgacaacttgttcaaactatcgtctcccttcacaacagcaacatccaccacggttctagatacttgatcattcttttgaggaagcatttcagtgcgaactccattttcttgaaattcaaccggatttccatctctcttgtaatcctcagatacatttctggaaagttgaaaaatgttggttattctattacacaacatacataagcaagctttacaattgctttactaataaagcgatttatgatgtatataattagagagacgatttctaagcatataaccttcaatctcaaatttctaagcactgtgtttctaggcaatgcttgcacaatttgtaatagtaaaccactcataaatcactgagcagctaaagataacaaaacagaccttgcttcaccacgtctaatttgccgacaagatcttccttgacgatgtctcggtgaggaaaaataagcacactcgaaacctctgtgatgtctcctattccggttttccttgatcttgtcagaagaacctggttccctcctgcgacctttccaggacaaacttttgcctaacactaaaaaacaaacaaatctccgacactgagagttgctcaaatctcattaaacccatgaatcagaaactttcctcctatcacataaaaactctaacctgagttactctgagagtagcattcatgatcagagtttgaatcataatcatcagacacatcattatacccattttcctctaagatcgcaagaacatcagcagttgcctgttcagccttcttcctctgtaaagatacaatcttgagctgttcctctaactcagctacctaaagatattaagacaggacataagactaaagaacatttcactggatcatccctacaaattataaaagaacatactttatcagcgagaccatcaagctttgctctagcactcttggaaacagctctttcagctaataaacgtgcacgaagaaactcaatagtcactgaagtaggatcttgtgcctctgaatcaatacacctataaaaatgtaccaaaacccaaatctaaatttcgattcgcaaaacgatcttattcatctggaaaaaaaaagacagaactataccgatgatgatctaacttgtcttgattcgccatcgtgtagacgaaccaaaagatctacgaacttcgaagatcggtgtgaagaagaagacgtctctctctttgcttacacaagtcaatgaagatagttttttttttaatctttcactaatgtattttactctcttctcattggttgtaagtatttactaatttcgattttatacttttttgtgtagtagacaaagtcatggatttggattgagatttacagaaaaaaaaaagtaaaaaaaaaaaatgtctttttcagaataggagtaaaataatataaatagagcggacgcgaaaaataaaatgaaatagagtttaattggaatctttaggttacagggattattttctctttccttcttcttcttcattgttctctctctctctatctcttcttcttcttcttcttcttcttcttctttggattttgtgagctaataaacagagaggaatcgccataaaaaaacctactttgtctttcaacaccgaaattaaaggaaatctctttttctctattgagcttttttcttcagcggtgaaatctcccttccttgtctctcagtagtgatttttacatacagctccgctctcaggtttcttcctcttttgattctgtttccgctctttttgggtttacttcggattttaatcttcagattgacgaaaccctagtttgattttggtttcagaaacgacgagtcttcattgatttggtttccccaccagctcttcttcttctttttttgttccgagacctttttgacggaggtaggtacggagggaatctggagttgggtttgaaggatactcttatgcgattcttctggataacttgatgccgcaggatcacgcttcgtgggatcggaaagagctcttgaggcaaaggaaacacgataggcctgaacaatcttttgaatccccgccttttcgatggagggattcgccttcttctcaccatgttcctcgagagttttcttctcgtttgggatctggagacttccgcagaccttcttgtaagacctccttttctctctctaatttagggctttgaattctcctgctctgtttttggtagagtctatttttctgtggatttgttagatatccacttttcctttttggttctataattttttttgaattgatttagaggcaaatccttgtttcttagattgagttctcactgtgtcatgatagcttagggtatttttggagcattaacacagctcttaagattgataggaagtgaattgatgaggttactcttcaaaggagcaatttttaatactcaggtagatttagtttcattgcaagaggactttattacctcaattgtgtttgtgttttgtgttcatgaatcttaaaacggataaaaagtcctagcatcgtggagtgttgttagttttagttttacatgttgtagatttagatgaagatagctcctacttttgcaggtttcttacttgtataatttttcctattagtattgaaaccctgtgtgggcgtaatgacacttttttctcctaacttgacttcgtgttataatgattctaagtttgacttccttttggagaatcttatactacatgttttgacagcagtaaaagtctaatttttttggatagatgtcgtttttagtttcacaagttatatatttggttgaatacaggtcttgctttagtttgtgattctcatcttccttttgtcttcaaaattttctgaaggtcatggtaagcagggtggacggcaccagtttgtggaggagactagtcatggatacacatcttctcggtccagtgcccgaatgtttgataattataggccatcagcatcgcgtggagactggagatataccaggaattgcagggatgatagagtttctgtaagccaaaaggaatggaaatgcaatacatgggagatgagcaacggatcttctagaagttttgagaggccatttggtattagaaatggtcggaggtcagttgatgaaaggccgctacatgcttcagatactcattctaccgtggtgaactctttggatccagccaactcggctcattatctggacaatgagatcagtaccccagtacggtctcttaaaattaaaaatgagcataaattttcagatcaaaggttatcacttccttcagatcctcattctgaatgtattagcttgtttgaacggccttcttctgagaacaattatggcaataaggtttgttcaccagcaaagcaatgcaatgatttgatgtatggtcgaaggttagttagtgataattcattagatgctccaatccccaatgcagagctggaggggacttgggaacaacttcgcctgaaagacccgcaagataacaatagtttacatggtatcaatgatatagacggtgataggaaatgtgcaaaggagagttctctgggagcaactgggaaacttccactgtggaatagttctgggagttttgcatctcagagttcaggttttagtcattcaagtagcttgaaaagcttgggggctgttgattccagcgatcggaagattgaggttcttcctaaaattgttactgtgactcaatcttcttcaggagacgctactgcctgtgccacaactactcatctttctgaggagatgagttctagaaagaaacaacgtctcgggtggggtgagggactggcgaaatatgagaaaaagaaagttgatgttaacccaaatgaagatggaacaacattgatggaaaacggtttagaggaactacattcgttaaacaaaaatattgctgataaaagtcccacagcagccattgttccagattatggttcccctacaacaccatcctctgtagcttgcagttcatcaccaggtacaatacaatttgttaatacttctctctgcgtgctcttctcattcctgatctatttggagttatctgcattattttcatattacttgaattcttccatcatgtatctgttcttgtaaacactgattttgtttttctctttttatcatgtcttccatttgtttttgttatcttctgctggggacagtgtaactcactcgtaattttattcttttgtgtacattcagggtttgctgataaatcatctccgaaggctgctatagctgctagtgatgtcagtaacatgtgccgttcgcctagtcccgtgtctagtattcaccttgaacgattcccaatcaatatcgaggagctcgataacatctcaatggagcgttttggctgtttactcaatgagttacttggtactgatgattctggtacaggggattccagttctgtccaattgacatcaatgaacacattacttgcctggaaaggtgaaattttgaaagctgtggagatgactgaatcagaaattgatctccttgaaaacaaacataggacactaaagcttgaaggtagaagacactctcgtgttgttggacccagttcatactgttgtgatggagatgcaaatgtgcccaaggagcaggcttcttgtagtttggatcctaaggcaacagcttcttctgtagctaaaacactggtgagagctcctgtgcatcaggctggtttagccaaggttcctgctgatgtttttgaagatagtcctggggaagttaaacctctatcccaatcttttgccactgttgaaagagaggaagatatactgcccataccatctatgaaggcagctgtttcttcgaaagagattaacacacctgcttttgccaatcaggaaactattgaggtttcttctgctgatgacagcatggcctccaaagaagacttgttctgggctaagttattatctgccaataagaaatatgcttgtgaatcatctggagtattcaatcaattgcttccaagagattttaattcgtctgacaactcaagattccctggcatatgtcaaacgcagtttgattctcatgtccaagaaaaaattgcagatagggtaggcctattgagagctagggagaaaattttactccttcagtttaaagcgtttcagctctcatggaagaaagatttggatcagctagctttagcaaagtaccaatcaaagtctagcaaaaaaacagaactatatccgaatgcaaaaaatggagggtatctgaagcttccccaatctgtacgcctgaggttctcttcttcaggtaaagttctcaaacctcttttctcttctatttactctgatatattaagcttgtcgtggtttgtcgctgtctgggatgaagtttggcttttatgatgtgttagttgtagagacttgaattatgtgatttttcaagggcgtgaggtgttgagagaaacatatacaactcttgagaactattgttacagagctgtacatagtggtcataattcattatttgcaagctaagttcagagtcattccatgctaacgtgtttgttggatgttgataacgctattttaattttatgttagatgttggttttattctagtattatatccactgtaatattcattttaacatctagcttgtttaacgaggaggtatagtttaagcagatgcttatttcttgtctatcttttatgttgtcgtaggtaaatatttgtcttagatgctaactagaaagtatatcaatacgcaggagatgattgcggtgtaaaaatttgggataatgatcacagatgaattgaagccttttttcatcgaatttaaagttaataactgttttacactacctgtgcagctccaagaagggatagtgtagtccccacaacagagctcgtaagttatatggaaaagctacttccgggtacccatctaaagccttttagagacattttgaaaatgcctgctatgattttggatgagaaagagagggtgatgtcgaggtttatttctagcaatggactgattgaagatccatgtgacgttgagaaggaaagaacaatgattaatccttggacctcagaggagaaagaaatctttctgaatttgctagcaatgcatgggaaggatttcaagaagattgcttcatctcttacccaaaagacaactgcggactgtattgattactactacaaaaaccacaagtctgattgttttgggaaaataaagaagcagcgtgcttatggtaaggaagggaagcacacctacatgttggctccacgaaaaaagtggaaacgtgagatgggggctgcctctcttgatattttaggggatgtctccattatagcagcaaacgctggaaaggttgcatcaaccaggccgatctcttccaaaaagatcacccttagaggttgcagcagtgctaattcattgcagcacgatggaaataactctgaagggtgctcctacagttttgatttcccacgtaagagaactgctggtgcagatgttttagctgttggtcctttgtcaccagagcagataaattcttgcttaaggacttctgtgagctctagagagaggtgtatggatcatctgaagtttaatcatgtcgtaaagaaacctcggatatctcatactctacataatgagaacagcaatactctacacaatgagaacagcaacgaagaagatgactcatgttcggaagagagctgtggggaaacaggtcctattcactggacagatgatgagagatctgcctttatacagggtttttcgctttttggcaagaattttgcttcaatatcaaggtacgtcgggacaagatctccagatcagtgtaaggttttcttcagcaaagttcggaaatgtcttgggttggaatctataaagtttggatctggaaatgtaagcacatccgtaagtgttgataatggcaatgagggtggtgggagcgacttggaagatccttgtcctatggagagtaactctggcatagtgaataatggagtttgtgccaagatgggtatgaattctcctacctcaccttttaatatgaatcaggatggtgttaatcaatcaggctctgcaaatgtgaaagccgaccttagtagatcagaagaagagaatgggcagaaatatttgtgtctgaaagatgataataatctcgtgaacaatgcatatgtcaatggcggtttcccgagtctagtttcagaatcttgtagagatttggtagatattaatactgttgagagccagtctcaggctgccggaaaaagcaagagcaatgatctcatgtcaatggaaatcgatgaaggtgtcttaacatctgtcactatatcttccgagccattgtattgtggcctaagtgttctttccaatgttattgtggaaacccctacagaaatctcacgaaagggctcaggagatcaaggtgctacaatgcctaaatttagttcaaagaatcaagatggagtgatgcaagctgcaaacagaaccagaaattctggccttgaacctgaaagtgcaccttcaggtttcaggtaccctgagtgtcttcaccatgttccgattgaggtgtgtacggaaaaccctataggcgtcagtgcaccacgaggaaatccaaattgccatgcagagtccgagtcaggaaattctcttgttggacaagttgacgaaacacatgacttgggttggcccaagaacaatctggaattggatgggaggcttcaggttttaggccatgtaaaccctgagcagattggtctactaaaagcgaccaatacagaatcttgtcaaaatccccagagatcagtcacccaagatctgagcaggataagtagatcaaaatctgatttgatcgtaaaaacccaacgtacaggtgaaggcttctcactcaccaagtgtactagttcagctcctaagcctctggcagtatcccataaagagggcagatctggtcatagcaggagccattcgtttagtttgtctgatactgagagactccacaagaatggagatgtgaaactgtttggtacagtacttactactgatgagaatggaataaaacaaaaacacaatccatgtggaattgtcaggtcatcatcaaccttgagcagggaccatgatacaagacatcattacattaatcagcaacaccttcagaacgttcccattacgagctacggtttttgggatggcaacagaattcaaaccgggctcacatctttgccagagtcggccaagttgcttgcaagttgccctgaagcattttccacgcatctaaagcagcaagttggtaacagcaaagagattctggtggatgttaatggtggaattttgagctttggtaagcataacgaagatagagctgagtcctcaagcgctaaggatgaaggtaacataggaggggtaaatggtgtagcagaggcagccacgtgaatgaaaaagcttcttagggtcatgattagtttgttttggaggattggcatattctttgcttgtcaacctatctgtattatatctcttttaacatcttttttttttaatttagaatgtcaattaatataggcattttttttttttttggttcagctaaagttaggtgcctgcagaaaattcatagctgatgtttgtatttgtaatgttactgataataacagagagatctaagagctaagcttagctctctgtatgtttttcaaaaaggataacacttgatgaacaagcatgtctaatgttgtacagtgaaagacttatgcaacttcacttgcaggaggataaacctttttcttacgtctcacatcttgtttggagaattggtggcagcggtgctacaatttttactacctgcagaatggtaaggacatgaacaattggattgtttagataaggactgagagatctcgtaaagagcctgaccactgaggcttaggtatgatctacgtgagttaccttatgagtgttcagcaggtttggtagctctacttgatgagcatgcagatgatatccacaatccccaggaacagcctgatttggccttctgtaacctctgcaatatattcagtcataatgacgacacatgccataacaggtgatagcatctagttaacagaccaatttactccacatgaaactacgtactagattgcatcgtacaacattggttagctcaaatattgttcaatttccaaggactgttcatctcaaggtatacagaaactataagtatgaagaatgatgatctaattttgtacccatcttcggcaaaggctgcggcatcatctacaagatcgggatcaaagcactttggttggccgcccgctacataaagagggtcccctgcactttgatcagcacgtaagcactcagatccagtaaacatcgtcatctctatcatagaccactgccaaaagaaaacttatgtgtagcaaaaagcttcctagactatgccataagcaactcatgtcctagattgcaactatattgtatatggctcatacaattataactagttgaatcatcaagtgggagtaagatcttttcatccatcaaaacatggtttcatcaatttgtattcaatgttttactaaagttttcctaacaccgccgagcagtttggttgttccattattgcttagttatctgggaaaaaaacatttgtctatcttgtcttacaaagctacgtatccaactttttttattctatactaataatgaaggactataaatgcacaaaccacgcataataccagctcaaaacgtgtgacagacccgaaggaaacagaagtttttacctaccaagggatgtcccatgtatgcaagatgaatccggatttgatgtggtcttccagattgtatctctacctgttttgcataaaaacaagatgattgtggctaactttcgttttggttttactatctcatttactttctgggtaaaccttgtgtgacatatgacatttggaaataagatggaacagaagaaaaccttaacaagcgagcaatttttttccctgtccctctccagaacaaatactttactgaaagcaggtttccctgacaagagcaaaaaacatgcaaaaacaaacaaaaaacgttataacgacaacaaattatatttagtgtgaattaatctgttgctctagctaatggtataagataatataactaaccttccggagaagcaacatataatccttgtgcgaccccaggatatcgaaccactcctataggctgtttgattactaccttcagaatgtaaataaaaaaaggagcattgttcatagatgttatctcagttgcatattaaggtatactgtacttatagtatttgatattaattctcagcacaaataataaaaatggccttgcctcgtcttcttcaactataccatctgctagtgctcgatatatctttgatagttttcttcctgttccacactcttgatccaggttgctgtaagaatgaagagtttaaatccaaaatccaatatgtaatactaaggatcttttcaagaatgagctgggtcaaaaagtaaacaagagatcatgtttgaactcacccggagccgacaagagatgttccctcagcaaaatacgctgcaagtttcgtttttgccagcttggtctttgcacagagaagtatacctgaaataaatgttgaaaacaacatatcttaacagtagagagagatcattatagagatgcttttgcgatacgaactgataagtccagtgaagagtacaacatttataaagcagtggagaatactaacatcatagctggtttaatgaaaaggaaagcaaaacacgtctatagactaacctgaagttcctctacccagtcgatgtacagggacaggatgtggtgattcacgcgatccgatgtaagagtcatttttaccaaaacaccactgcagctgcgtcaacacagtccgttgctggaaaagtcctccgggcaatacttgaagtccagaaggcttgtttaaagcgatctgcattatgtgaaaatccaccaagtatacacacatcactacaagttgagaacaaaatgatagtacaataccaaatttcatttggagctttaaacatcacaacaagattttctatatgttttgttcagagcaggaagttaccaaatcatcatcttcatacaaaacttcaagcgagtatggcgtgtcaggttccttccaaggaagcctactgtaaactaatttcgaaccactcctgagaaacaaaaaaaaatgagacacctttacaaaagctaaacattttataagtgttcaaatcaattgtaggaattgttagctgaacctaagaagtgtgttgggatcttttacaacttcaccgtcaatttgtatctgcaaaacgtcatacacgagaaatgaatttcaaattctatagaatcaagagagaaatgtttgtatgaagaacaaacctgtccgttttggattcgttgaatccacctaggaacgaaagatgattaaagagaatggaaagtaagaacgatattattgtagacgaagagtagaggaagaagaagagtaagaaccctagcaatggagctgaactcttgtatttggtgaagtagaattctgacaccgtcgttaactctgtattcaacaaattccacacatttcaaaaaagaaccaaaacaacaacaaaagatcaaattttttgaatttcttacctgattcagaagaagagatggcatccttgtatgccaaaccatcgttaagctcaggccatggcaagccgatacgttgcggcggcggcgacatcgttaccggttggtcggcctcagttctggtttctcaaatccggtaaataaaaccaaacagaaattgaagtgaaggagactttaataaaccaaaccgggatagaccaatcacatccgagtcaaactcagttattcaaatcttatttataccaactttcaagagtttttttttcttttcctaatttcaagagttattaactttaactcttttagtttttgagtaaaaactaataattacaagatatatttgttattttgttactgctgataatatcactattgattgttttgatagaataatcaagagttacccatttggaaaaactattggttatatttttttaatggaataatgtgtttttcttttgtcaacaaaaaaagagagagttataattgttaaatgtcctggttggatatcactcgaatccaattcttcacatagcctttttactttgttggtgaaaagtttcttaaagcacaagtaaagccacaacttttatgagctttgggacatgaatttccaaaagttaaaacaactgattactttctaaagcatcactaaaaatgattagttacgttaatattgtgaatacttaaggcatacaattgaacgaaccttcctttcttattatagccatgaagatcagttacaatttaagtaactgatcaagcttaacctcactatagataatcaaaagatagtatccaaaacaaaccctgaaaaaaccttttgaccaaacctattcctgagtggctttcttatattcaggcttcagctcataagttccttggttgctccctttgttgttgtatatgcatagatctttcaacaagtctttcaggaattgctgcaccaaatacacttttccataagcaacacaaaccttcatttttggtatttgttttcttatttctccattgaatctctcagtcaaacactaaacaaaaagtctgtaatttccttgtgctcacctctggctggtcagtttcctgaatgagcagcctcagagtccaatttgattgtctttcaaagagattaaacatcacctcctccatctctctacggtcccttcttgttctcttcatttctgatgtcctgttcgtcaattttttcttttcctgataaaaaccaatgacttgtaagaattcaagatccttaagctacagtaatgtgtgtgttacaattgggaaagataaaataccggagccgcggttgggattatcattcctggcattggcctcatatgcattcctctggcattatcaatgacctggtcaagaaaccagaaacatgatcatggaaaaatgcagaggaggtttgtttgaaactccaagtcaccacacaccactttacaacaacctggatctgtctatttttgcccatatacttgtttgttctttcacggcacaatctcccatagctttcaatattttcgttatgaggcctcatatcaaatttgttctttatcttcccttctactgacatctttcctacaaagaacattgttgaagaaaatctgcacaactgtcaaacaaaataaggtacacctggactgtaaatgaacataccaatgctaaattcttcacccaatgatccaaaatcttataaacgtaaatgccattattcaacaattataaccaacgtaacgccatagatgaaccaacagttgtaaaataacttcggagtacaatgtgtggagaagtgtacaacttaccatctgaagactcacagaaaacattcataggaataaaatctttagacatatccaaagtgtaacgcctcggcatgtttccagagtcagctcgagctaattccattacgaactgcaaggcaaaagagttaccatgttttacaccaagaaactcgtagtttaagtgacgagcaagaaagttcatagaaagcaagctcaaatgtagaaagaaaagagaaaagatctctaatttgcagaaatgtttcatacactacccaatcctcaaattacaaggaatttcatgatcaaagtgaggaccacttgatatctccaaactcagaaaacccatttccccaaatccatggaatttcagagaatgtaaaagcaagtttctcaaaggatgaaattttcccgaatggttactagaaaccctaaatagctaaaccacgcaattcctgaggaagattcaatgtaacgagagatacgcatgcagagaggagagaaaatgcgcaggacgaaagcatacttgggtcccttcgtcctcgtgagccagaggatcgacgccgaggatgactttggcgtcaggacggtacggatcgtcaggacggtacggatcgtcaggaaaagaatgagattggagagaactcgcgacgagagatggagctttcatcagcaacatcgatctctctgccaaacccgtttccaacgcttcattctcattcttccttaccttcatttccacctttacatcttccatttctctcagactcatgattgtaacagaggaattcaaagcgcctttatatacttaaccttccaactatggatcgcttaattaatagaccaaatagaatcataaagacgaaagctttatttctagattttgcaatttgtcaatgttagttaaatccacgtactactacaaaaacgtttaatatacaaaagagatcagtctctcatgttcatgggtactcatatgcgtgaccgcttcgttttcctctcagctaactttgtagtcgcatttcgtttcttcgaaacctctttcttttgtgctccactcaattctctagtctttgtctcctcttctttcttcttcttcattgcattatccaacgcatccttcacaaagaactttagcctccatagtgttggttcgtcctgcatacaagcaaaactagctaagaagaagaaaagacatgtctttggaccagaaagccatcaatgaaggtggcgtatagtaagtaagagatttaccagtatgtccatctcaatactaacttcctctgctctaggttgaaagctcgggttagcctgagcaactatacccaacactttctgtagatcatccggtgacagttttaacaatgccaatccaatattacgcttctcctcaattgtgattttcctgatacaatcgttcaccacaactgtaagcaaatgatacattgaccagagaacgctcaaatttaagagtgattaggccaacctgcatctttccacaactttacgcattagcttctccagctcgtcattagcatggcaaatctggacagcaatatatcagtttgttagtcaaaaggttaataatacaaaaggatcactgatatggaaaaaaaaaataacctcattccccaattctctagttgttttgatatgagatgcttcttttgctagcagcgcctcctttgctgcttgcttctcctcttcctctcgtattttctcctgtaatcacttttgttaactttggtgctactaagctccatcaagagaatagtgtgaaagattataacatttttgttacctcttcttgaacctttggaagaaagtgtgcccacttctcctcaaacttttccagtaactttttcgccatagagtaaacatcacttgtttcttcattataattcattgcgttctcaaacactagccgcatatcagcataaatttgcatgacatgtttgtacccggtaccatccttagcctccatttgattttttatcgtgctgaagtccataggcttgtcaataacctacaatcagatcaaacatgttataaagagacccgcttacagaacaaagacaatttcataacattgaatggaaaccgaggaaaacacacacaaaaaatcttaaacgtagtcacatagcaaaacatagtagtgtacttttaagacttcccccacaaaaatctgatgcttctaataggcaaaagctatttggtcagatgatcatactcaaagaatataccagtaaagaaaggtgaaattctggtagctgtaataggcaaatgaagtttaatcaactttaaagttcgattaaatgttctaccaaagtaagaatcaaaaaggaaattggtagctctaaggctctaataagcaaaaggcatttactcagctgatatttctatgttttaccaaaagaagatatcaacaaggaaagttgaaagctgagatgaaaaacgttacctcaaagtagtcatgcaaaccaagaccttcaacattgacaggatgcataaacggccaagcgcacttatgctgagttatctgagaaaatcaatacaaacaaaattaatgatccaagttctccctggagacaacaattcaggtgaagagatgattcttctacctgacgaaagattgttccaaattgacgcataaggtcctgcattcttttagcagcaacagcttctctacgcgcagcctcttgttgaatcttcctaatccccacaacatgtctccctttttctgtatctttaccaatagagccagagtttgagacaccaatgctcgagtaaaactcctccacttctttcagtttatgctcaagctgcacatagaaccaacaaccatccattgaatcaactatgtaacatcaaaaaatcaattcaaagccaatcttcaaaccaattcataacgatgtaacacgaaaatacccaaattcagtacacgatagacaacattattgagcgaaaaaccctaaagataataaatattgagattatgtatctagtaagtaacaggaataaaagctataaaggagaagactttattaccgaatcaacccactgtaaaacctcgtcgacacgctgcttgatgcactcggcgtcgacagagaaaccctgtaaacctccgccggcgacatgacctggcactgagtcagccattcacagcttctcagaaaaaaaaatccctcaagaaaaggaaaaaaatctgcgaaagactggaatgagtttgtttggtgatgatggacaaaggaagaagactgaaagagccgtgtggtggagatggtggactacctgtcgtttttaagatgcaaaacgacatatacttccaaacgctatatacaagtcgaagagaaaattaaatgacaataacaaaagatatattttttgacaaataatcaccctgaattcaaataaatagtttgtatttttaatcaaaaaataaataaataatgttaccacaccataaacttcttaaaaccacatcatatatgcagcaagccagcaaatatagatatatcttttgacaaatattcaccttgaattcaaataaataatctgtatttttaattataaataacataaaaatgtaacaacaccgtaaacttcttaacaccacattatatatgcaacaacttttgataacatgcgtttttaccaaattttgtttattcgtgaatagcatattgttatttattttattattattaattattagttatagtaggcatgttaaaaagtcttgaatggtgacataattattagaccactgttaaattgtttagtccgcacgattcatacacggtcttaacttaatttcgatttcaaaatttgaatttcacagtgaactaatataatctcagtcccttgacgagaattgtacatggatactggaacaccgagttgctaacgatgttgtatctgttagagctttccatcgccatctttgtgattcgctaacatctcgtagagcttatcgtacgagaaacaagatgttcaaacttgttttaaattaatcagcggtttgacacaagcggttcttgtgtaggtggctagaatcatctatgatccaagcatcataagccatatctacatttccgggcctaaagattgaagatgctgtatctgatggatcattggcttgctcggtgatctcctttacttttttgctttattttgttttgaattcgtttactttgttgaatcttccaagagtctgccttaaacttgtgaagtacttcatgaatttaactggtttatatcattggatttgttttgtttgagcttttttttttaaactttgaaattagaaccttgaagtatttgatgaatctagttcatttgatcagtgtcagaatttggttttaaaaaagtcacatcaaaataattggggttgattggctctttcccctcatcaatacttgcttcttttttatacccaaaacaaacaaacaaaaaattgttaaaaggcttctttctgtttttttcttttactatttgacttttactttcgtcaaaaaaattaaaactttggcaaaaaaagaaaggggcattccgagaattgaactcgggacctctcgcaccctaagcgagaatcataccactagaccaaatgcccttttgttcaattgtttggttgacatagtatatttatcttcgacatattttgggacataacctaaactaaagtatgtttaagaatgttcttagaaccaactaagtaacaaaagaaaaatccccacaaatttcccacagaattcttaagaatagaaacataaatggcaatggtggtggacctgatgggtcaagagccatggaggagctggtggaccacatgtctatcttattggatgaaaaacgacaaatctttgtacaaagagcgttttgagaattgaaccccggcctctctcattcagaaaattaatacaaatgcaaaacatataatttgtttatcaactgcttatagatttcccaaaaagaaagtagaaggttcaacaatttcatgttactagctaccataaacattaaaactggaaattaaactagaaaaaaatgttcatttcatggatatgaattgcttctgtagcctaactgggtttagatatgtttctagttagtcctccaattaaacagatcaattcgattaaattttagaaactcaaaacagatgtctgtcacatcatccatcacaagaacttaaaaaaaaaaaacacatttctcatatgtcaatttaattagttttttttttccaaccaaattggttcatgtacttgattatgtatacactatacacactcatataaatggataaggtagttttatagtccaaccaccgacaaaacgtgcattccacttcttcttcttcaattgccatgccgtcgtcaatatctcaaacttgactaatataaaccaaagaagaagaagtatataacagaaccaaaaaatataaaaattcatgttcgttgtattaccaaatttaatttacacttaaataaacctaccaaccaatcactcaaaacaaataccagttcgttacacaatggacacttgaagttgaaagcaaccgaacaacaaaagttttaaaaactaataaaaatttaggtgaatataataataaggccaactatgaagaaaaggtctattttatactttttatataaccttttgtcacgggcactgtttcattcccttggaccccttcttcttcaagatctgtttcttccttctttctctctaaccagattttgttgtaccagagagagagagagagagatcccttaataattcttacacatttatctttcttgtctgaatcctaacaaagactttagttttggtcgatcttataattttctttttttattctatggatttctcttccgggtttcaataattgtcacttccgtagtgtaagtacgcgtgtattgtatactagtcagttacacaagtgtccttatgtgtttccttgtctttaattcatttctgaaactgaatttattcttctctcagattctgcaaaggttttggttttttctccgagtttttttgtccttcaaaaaaaactttggttgctctctctctgttcaagaagatccgagcttgattcctaatctgtgagttttatgcattccatttaaagctctgattttgtattcctgtatcaatgtttccccctaatgttatagattttggataaaagattaagtcttgatggatcttatgattaattgtaacaatttatatcatccttgggtcatgaatttacctctgtggttttgcatttgcagatcatttgagaagaagaaactaagaaatgggtaagagttggttttcagctgtgaagaaagcattaagcccagaaccaaaacaaaagaaagagcaggtctttatgctagattattcacattttttggttatctatatccataaagagaaatgcttctatatgtctttgatgtaattgaaaagctgatactgaaaatggtattgtttttgactccattagaagccacataagtccaagaaatggtttggtaaatccaagaagctagatgttactaattctggtgcagcatattctcctcgtactgtcaaagacgcgaaactaaaggagattgaggagcaacagagcagacatgcttactctgtggctattgcaactgctgcagctgcagaggcagccgttgcagctgctcaagctgctgctgaagttgttcgtctctctgcattatcacggttccccgggaaatcaatggaagagatcgccgctatcaagattcagacagcatttagaggatatatggtaacgtttttgttttttaacattttcaagtctagtaactataaaggtggttttgctaactaatggaacaaagttcatactttttggttaccctttattaggcaagaagagcattgcgtgcgttgagaggtcttgtgaggctaaaatctttagtccaggggaaatgtgtgagacgtcaagccacatctacattgcaaagcatgcaaacactagctagagtacaatatcagattcgtgagagaaggctccgattgtctgaggataaacaggctttaacacgacagctccaacaaaaacacaataaagactttgataaggtaagcaaatcaaatccttacaaagatgtttataattttagttacaaacttggctttttgttgatctcggatacatgagaaattcacaatgtgaaatagattatgtttcttgctacaaacttaaagattgtattacgttttgtgaaatagactggagaaaattggaatgatagtacattgtcgcgggagaaagttgaagcaaacatgttgaacaagcaagtagcaacaatgagaagagaaaaagcgcttgcatatgcattcagtcaccaggtattaaactagtttcctatcttactttagtgtgtctttacaccagaagaattatatatctcaaaatggtgaaacttgttaatatgcagaatacatggaaaaactcaactaaaatgggttctcaaacattcatggaccctaacaatccgcattggggttggagttggctagaacgttggatggctgctcgaccaaacgaaaaccactcactcacaccagataatgctgaaaaagactcttctgctaggagtgtagcaagccgtgccatgtctgagatgattccacgaggcaaaaacctttcaccaagaggaaagacaccaaacagtcgaagagggtcaagcccgagagtgaggcaagtcccaagtgaagactcaaacagcattgtgagtttccaatcagaacaaccttgcaatcgtaggcatagcacttgtggatcaattccatcaactagagacgatgaaagcttcaccagtagtttctctcagtcagttccaggctacatggcacctacacaagccgccaaagcaagagctcgattctcaaaccttagtcctctaagctcagagaagacagcgaaaaaacggctttccttctcgggatctcctaagactgtaagacggttttcaggtccaccaaagctggaaagcaatgttactaagaaagatactaatcttgcttaaacagagaatggatatatatatatagtttatatctgacattgttgattaggcaaaagtctggtgcagaggtgaattcagagaagattctgttatgtctttgtttgtttttttggtatttttttttactacaacaaacttaattatttgtttgacttttttaattggttgaacatatttgtattgatgaagagacatatataattttccacatgctatctgagttccttctttaacatatttgctaacgccaaagtaatctaaaacatagaaccagtattgaaacttaatgggggtgttttttaggtcaattaaataataaaggggttaaattagaaataaagagaagtaaaagggcctgtaagccttttagggattctagggctttccttcattggtcagatcagacgacgttttacatcttcttcttcttcctcttcgatattcgtcagtgtgtgtattttggggaaaactttgtgagcaaagagcgagaaaatgagcggagccggtaagaaaatcgcggatgtggctttcaaagcttcaaggactatcgattgggatggtatggctaaggtccttgtcacagatgaggctcgtagagagttctctaaccttcgtcgtgctttcgatgaggttaacacacagctccagaccaaatttagtcaggttctcctctcgatttcccccctctcttgatctgattttgtcactactgcttggtttagactttttagatctttataatttcgatttctggatcaggtgcttctttcacgaatttttacgattatcagatttttgttggtgacactcatttttttctattttgttgatgttgttgttcccattgttgattgatccagatatgtgttaagatctatttccttaagacgtgttaatcagagaacattgtggttggtctttgtttattgatcattagaaatgtggaattgtatcgagaaaaacattgatgtatactatgattagcccactacatttccaattcctaagagatcttttatttcctaacttgttttatgtattgggttgtggagtgattgttgtttttggttatccttttaatccaggaacctgaacctatagattgggattactataggaagggtattggagctggcattgttgacaagtacaaggaagcttatgacagtaagttttattttctctgcaatttatactgatacttgggagcgtttgtgtagccttgcaactcattatcacaatgagtttgtcagtggttatcaagcggatgtcttttgcttgccttacttcggctctcaaacctgactatattgttttgagagagatgtgcttaagaatgggggctgaaactgaagttcttatacttgttatatatctatttgattgttggaattgtggagatatatcaaagaagattatgagaaactaaactgcatcttttatggcttgctgcaggcattgagattccaaagtacgttgacaaagttactcctgaatacaagccaaagtttgatgctttggtgagtaatagctgagacactcgagacttttttacaattttgacaggtcttttcaattgacatcgtttttgttctcttgtgccatgtttcatgctatatctagttggtggaactgaaagaagcagaacagaaatcgctcaaggagtctgaacggttggagaaagaaattgctgatgtccaagagatcagcgtaagtagccagaaaaaacaaatcctcttctatgaagtttgtgtgtattttttttcaactcaagattctgataaaatgatcatggttgtttctatgtgttggtgtaatcagaaaaagctcagcaccatgactgcagatgagtactttgagaagcacccggaactcaaaaagaagtttgatgacgaaatccgtaatgacaactggggatactgatcatgtttctccatctccggcttggaaagaaaactctctttctctttctctgttctcttactgtgattttgtgagccaatcataacaataataagtacaccattcacttaagcagtgttgagatcttcattccaaggaagataaacgcatttggttttagttatcaatttcacaaattgtttcgtttcgttcttcagtgaataataagagtcaaaaaaattatcattgtcaaggaatgaagaagactcttgactcgtcattgttacatttcctctcttagctaacaggatagtattaatgtcatgtttttagttgatttttttgagttagcaattcggtgcaatggtaaataaagacgaacccaaaccaactctggtaagcaaatttggttgataagtctgtcggtttgttgttaagccttcggtttacctcgaaccgggttttagaatttttgtcgacccagaaacacatatcccagatttcgttcttcaagacacaatgctaatttctgcaattacactcaagtggtgagcttattacttgatggagccttgcgcaaccatagatagttcacgaaatggtatgcggttaatggttatcaaaggtgggtgaggtctttgattctgaccgttcatagagggttaatataatcgattgctatttttgatttttgccgttaagtctctctgtaaggtccagtgcatgttactgcttgtctaattacacgaaacaaatactggttagctatgtgcttagagcagaatgcttaataacaagtagaaagacaaatctttattggtctaaaagaatcaagatccacgtgctctcctcctaccctcttctttgtaccgaaagtcaggttttggccttttgctaattattgtatcaaataagatagggagataagaccaatttcctcttttaaagttaaaacctgtatctgtaaaatgcatgagccagatattagcctcgtagatcatgctatcatgtctatcacgtgtccaaggtcaaagggtttagcatgtcaatcaatccaattttggagggtatattacagtatattcgtctaaccctactctataaataggtgatgtgtgtgtccaagctccaaacaaaacaacacaacaaggagcttctcaaaacctcaacacaaggtaacttttaacccttttaatgagtctagttcactcaattaatggttcaacaaaaaacaattcttttgaccattgattctgaaacgtacagaaacaatatggaaatgggaacctcatcatcatcatcaggcttggtcaaggccaaatctgagacactcgcagaagctcttaagtccagttcacttgatttcagcaacggtgatggcagcagccacgggagcaagcagcatgtgagggctaggacattatcatcgccgagctacagtagcaacagcaaaaacagatggaacactcacataaggaaggccaagagtgctcatcctgctcttgaccttgctggtctcactggtggtgctgctcttagccgagcctctagtgcttctcttggactatccttctctttcactggattcaccgtgccacacgaagagataattgcttcagagcgctgtagcaatgacgatatttgtaagaaaaccattagataccgcacatgattgaagccttgatgttaactttggactttattgggttcttcttctggtatcattcatattgcagtggaagatattgaagcagcaaccagtagcgtggtcaagtttcaggcagaaccaacctttccgatatatctgaaggtaacccatttccgctgatagataatcttatgggaaacatgggaaaatgatctttatatctatttgagcgcaggcactgtctgatggagatatgtaattaaaccatcaacaccaaaaagtccgtagaaatatataaaattttgctgccattggtcagtccaaacttcaatgggtctgttgtatctcatatgatgtttcctaaacaagaaatcgctatttctcccatagtgaagaaacatccataaattttacaagtagaataatcttcatcattgcattaagacatttggaaacctctgttttgccttctttgttggtctaactttggtgcccaaaagtcaagcttaggaggctcaactaccatttacttgttatcggcaacatgtgaagcagagcttcacgctggaccaaaagggtatggttatattagtatcgccttgtataaatcagagagaaattctagtcatatttctatggaaaaagactggttttcatgaaaattcaagcatataggaacttttacttgcaattctttctgaccaaatcaattcttatcatgtgttgtgcagttcatagatatcacatacaaggtgacaaccaaaggaatgacatcttcatcagaaaagagcatcttgaatgggattagtggttcagcatatccaggggagcttctagctctcatgggaccttctggaagtggcaaaactacactacttaatgcgcttggtggcagatttaatcagcagaacattggtgggtcggttagctataatgataagccatattctaagcacttaaaaaccaggtaataagaagattccaccttggtctgttgatgaatatgtagatgtatatataagtttacagttgacacgggaaagcaacatggcaggatcggatttgtgactcaagatgatgttctgtttcctcacttaactgtaaaagagacactgacctacacagctctgttacgtcttcctaaaactctcacagagcaggagaaagaacaaagagctgctagtgtgatacaagagcttggattggaacggtacattatcatctattatactaccgtctaacaacttaggaacttcctctgatggtcaatctaagtcttaagaaggaacctaattagaagattgtgataattgttgttttaggtgccaagacacaatgattggagggtcatttgtgcgcggtgtctcaggtggggagaggaaaagggtttgtattgggaatgaaatcatgactaatccttcacttcttctccttgatgaacccacctctagtttggactctactaccgctcttaagattgttcagatgctacattgtatagcaaaggtaagaactccactctttacagctccaaatcatgtttctttatggatttgaccatatctaaatttttacttgttggcatgcaggcgggtaaaacaattgtaacaacaatccaccaaccgtctagtaggctctttcacagatttgacaagctggttgtactcagcagaggaagcttgctttactttgggaaagcatcagaagcaatgtcttatttctcttccataggatgttctcctctactcgccatgaacccagcagagttcttgctggacttagttaatggaaacatgaacgatatctccgtaccttcagctcttaaagagaaaatgaagatgtgaaattcttgcagcgagataggatcttccaagccagctcctacagttgtatatgaggtgagaaaaagatctcctttacatatcaagaattcgtttagagctttatgtaagaaatgttaaatgtgatgttgaaacacagtatcttgaggaagcttacaagacacagattgcagttatggaaaagatgaaacttatggctccagttcctcttgatgaagaagttaaactgatgataacttgccccaaacgtgaatggggattaagctggtgggaacagtattgtttactttccttaagaggaattaaagaacggagacatgactatttcagctggttaagagtcactcaagttctatccactgctatcatcttaggtttactctggtggcaatcagacataacatcccaaaggcctacaagatcaggtagaaacatgtttatggtctagaaactagctgtaattggttgtctgccttaaaagttggaactctctctgcatctcaggtagggctactcttctttattgctgtattctggggtttctttccggtattcacagcgatcttcacatttcctcaggagagagcaatgctgagcaaggaacgagagtcaaatatgtatagattaagtgcatattttgtggctagaaccacaagtgacctgccacttgacttgatattacctgtgcttttcctagttgttgtatatttcatggctggattgagattaagagctgaatcttttttcctaagtgtgctcacggtctttttatgcatcgttgcagctcaggtacgtacataaaaacaaaggacatgttgaacagaaaatgctaacaagtaacaactaatgatgatgatgttgttttagggacttggattagcaataggggcgagcttaatggacctgaagaaggccacaactttagcatcggtaaccgtaatgactttcatgctcgctggtggctatttcgtgaaggtaagaatactcagcttcaaatttcaatattataaacaggtatgggtagtgattgacacactttataaatatggcagaaagttccatttttcattgcttggatacgtttcatgtcattcaactaccacacatacaagctccttgtaaaggtacaatatgaagaaatcatggaaagcgtaaacggggaagaaatagagagtgggcttaaggaagtgagtgctcttgtagccatgattattggctaccgtctcgtagcctacttttctcttcgaaggatgaagctccactcttcaacttgagtttagagacaaaaattgttcatttaccttgtattgattgcttgtctacacatgtatcttacttagtttggaatgtataacaaaataacgtactatgatcaaaatttaggtttccaaatacatgatgctatcaatatggtcttggtttggcatgtatcttacttagtttggaatgtataacaaactttgagaaactgattggtcttgttaaagctaccaagtaatgatggtctaatttcaatccttcgtgctatttcattcctctccatatcataaaggaaaaagcgtgcgtgttgattccgtaagagatttgcctttctcatcaaaaccttaccactgtctctagaggcacccaccaccaaccggtctccatggacgaaattcatctgagaaataggcaaaacaaaagtcttcttgttcgaccactgactcttgtcggcatcttcaaggacacaaacatccacaaagccatcacttgcaagacgcatatattgacaagtagcaacttttccttggtagttcatgtgaatggtgcgtgaccagttctcaaagggtaattcaatcaaattgaactcttcagaacttaagtcaaaactcataaggacacatctatttgcatcagtccgagcactataatacaaaacaccatcaatagtcatccctcgtgagtatggatgaaaaggacgatgaggagtgtggtggcttttagtgtttctccatgaagctccaacaccaagtaccaacacttgatgttctgatctcacaactgtctgttccttggtgacctcccaaaataagctaagcactttgtattcatcatgaaaaggatcatgtccaaaccaattccacacattagtcttagatctcattatgggcaattccacaatctgccttgtgctagggttacaaactttcactcttctcccagttctgtaacacaacaaaccacgagcagcgttcactaagtagcctcccattatcggtatggtcgaatgttggtcaatcacagagacagatgtgtccgagtgatcatgcctcgatgacgatgatgattggagcaacaggtatttgctctgattttccctgtccacaagatacgcgaacaaacaacttggtgatgagggtttaaagaaacggttggtgaagtatcgagaggtgataagggaaagccagagctttgagacgcacttgaatctcatcagagatttcgccggcaatctgattaggatatcgatcaacatttcttcagggatctctggtaagaacaccacggtcttcttctgcttctgcttttcctttttcctcacggcaacacataaagacgagcccatatttgttcgcagaagaatagagaaggagctatagagtacactaaggaaaaaaaaactcgaacatttcgtttcccttaaaaggttgcatctccaacttgttctctctgtttgtatgttgcggctctcacaagctaacgctgctgcatattgtgtaaacccttgctctctctttcctacgcggaaaatgatttccatttgtaattgggcttgttctcagattttggcccaactgaattcaatgggtttagatataggctaaaaaaactgcatgcaggtccaagagagatattgactggaacccaaatatagagatattggtaagtaattaatcaatccaatgttctctatgaattcctcaagaaaaggatcattgtttctaggactcgatgtggaaagcataaaatataagcacttaaccttcagctgagtggccaacagcgttacaaggtaaagagaaagttactaattttagaaacattaagatcataccctgatccaagaaaacattccagttgtttccactttcgagacattacatatccaagaaatagcagggcttgtagtcgatagcatggacagagatcgaatacaagaggccaaagattttcttgacatggtggttgatgaggtaacaaatttttcaacctgtcttttaatcattgatgagcaataagtcacataatttaacgttgtataacagatacaagtgattgaaattccatttaataatttggaatgtaaaaacaaaatgacaaactatacttaggtttccaagtacatgatgctctcagtatcatcccataaagtagccaacaaggaatcagtctgtttaaagctaccaagtaatgatggacttatttggatctttcgagttatctcattaccctccaaatcataactataaaagtgtaggggttgattccacgagagatttgccattctaagccaaaccttaccactgcgacctgtgccacccatcataaagccatagtcgtgggggaaatctgtaggcaaaacaaaagtctccttgtctgaccattgactcttgttgacatcttcaattacccaaacacccacactacaatcagaaaaaacagtaacatagttaaaaacagctatttttcctttgtagttcattagacttggccaaggggatctctggagtttgtcaactttatagggtaattaaatcaaattgaactcttcagaagtcaagtcaaaactcataagcacacacttgtcatcagtccaagctccataatacaaaacaccgttgatggtaatcccttgagaataaggaagatggtgaatgtggcattgagtctttttccatgaagttctagctccaagtaccaacacatgatgttctgatctcactttccactccttgttgtgcctccaaatgaaactaagcactttgtattcgtcatgaacaggatcgtgtcctaaatagtaccatatcttgtaattttctcctcctttaggtgttagaataatcggcaagtccacaagctgccttgtgttaaggttacaaatttgcactcttgacccaattgtgaaacacaccaagccacgacaagcgttcaagaagtagcctcccattatcggcatggttagatcttggtcgattacagagacagagtgatcatcatgactcaatgatgtagtaagcaacgcataattgctctgttttgccctaaccactaaataagcaaacaaacttcgacgtgatgagcaagatttaaagaaacggttggtcaagtatcgagatttgatcgtggaaaaccagatctttgagacgcacttaaatctcatcagaggttcaccggtaatctgctcagaatctcggtcaacaattcctcacagagttcgggtacgaccactattctctccttcttttgctttttcctcacggcaagacctaaagacgataggtaacctaggttaatgcatcttgttttcattttcccttgcctcaaattttttacgacgggggcacatgaagacgacaccatagttgtttcacagatttgtatctccaaagcctatgtcaatcgatcgatcttattgtatacagttgcatggttacctgtcaaagacaaaaaaaaacgaaatttaacattactaaagaatgagattacttgatgattcaaagtgtttaggataatattatatgccctagtttcctattaacaagaaaaaggagaaacaattcaagaatagaatcctaaattgcttaggtttggctctgtttaaaaaacatgcaaacaatctgaattgatgctacacggcccaaaagaactgtaatgggccattgtactacttgtgttataattcatgaatttcacattctttctttttcttttctatttagaaatctatttattctttaagcttgttattatagttctgttaatacagttcaaattatcaactttcaatagtgtccacatattcccaagggtattcaattaattagtaatatgttcaaagaaagtccccaaaagttttaagactccgttatcaagacctaaatatatacattatctttaaagaagcttaaagttccaaacttggtctattaaaagaaaaagttatggcaatattttgactttgggaggagaaactgaaaagaccaatcttttcttctattgtagatactctgaactaacagaaacgaacaatagagaaacaaatattctttcctctttttaatgcttaaaagatcctgaccgttgatttttggctttatgggtggatggggcggcattaactacgtggtccttgaactatcgctatacgtccaacacgcggaatagtgtgtgtgagtgttattctccttctccttcttcttcttcttcttctccagaaaaaacaaaacttttttcttttctctctcaacttgcagaagaagcgatttacacaaggttttgtgattcttctcacttatatataatcttctgtatgcttggaattggtatcaaaatcgattcttttaatctgtcattgaaggaactgggtttatacatttatctctcaagtcatagaatctgcatttgtcccaagttaagaagagaatcttgtactgctccttatctatgttttgctctctttaccaattgtttcaatgttatgaacaaaacccatatctctaaatagcaacaatagtgatttcatttaataatggattttgcctctgtacctatttatatagtaaccatggagcggctgatttctcatcctcctctcatgatcgtctcagaccttgatcacaccatggtaggatctgattcttttaactccctctctgtttgcattttcatagtttattgatgttgtgattcgtgttttaacaggttgatcatcaagatcatgagaacctctctcttctcaggttcaattcattgtgggaatacgcttatcgccgtgactctcttcttgtcttctctacagcaagatcacctgttctttataaagaattgagaaaagagaaacctttgttgactcctgatatcattattacatcaataggaactgagatagcatttggtaactccatggttcctgatcatgcttgggttgaatccttgaacagctgtaaatggaaccgggaaatagtcttggaagaaactagcaagttccctgagttaactcttcagccaaaaactgagcagaggctacacaaggtcagcttttacattgatgaaggtaaaggtgaggcattgaccaaggaactatcacaattgctggagaaacgtggcgttaagtgtttacttgttatctttttgtgggtcttttgtttcttgaagccaaattgtttgtgatgttggtaatgttcttttatcttttcagttggatgtcaagataatttacagttggggaaagaatgtcgatgttataccgcgtggtgcaggaaaaggagaagcgcttgagtatcttctcaagaagctgcaggctgaaggaatattcccggtcaatactcttgcttgtggtgactctgaacatgatgctgaactatttagcattcctgatgttcacggtgttatggtaacaatgttccatcatcacactctcgccattcttaccgaaggaagctgactagtttgtctatgtgttttgtgaaggtgagcaattcccaagaagagctattgaagtggcgttctgaaaatgcgttgaacaaccttaaggttatacattcaaccgagaggtgtgctgatgggattattcaagccatcggacattttaatcttggtcccgatctatctccaagagatgtttcggaattcttggatcgtaagatggacaatgtgaatcctggtcacgaggttgtgagattctacttgttctacgagagattgagacgcggtgagatcaagaactatgagacatacatagccagcttcaaagattcatgtgtgagtaacttagatgctaatagctagaatccatctttatgtctccactggactaattcctctttcttggaacattttcagctccatgctgctgtcctttttcatccatcaggtgcagaaaaatctctgagagacaccattgatgagctgaagaagtgttatggtgacaaaagagggaagaagttttgggtttgggtagatcaggttctggtaacagacaccattcctggcaaatggatagtgaagtttgataagtgggagcaatgcggtaaacacaacaccaatatttgcaatatgatctttcataactaatatgagcaagtcctaagattttaaatataacatttgatcgtttgtttcgtttggcagaggatgaaagccaatgctgcaaaacgactgtcgaatttacttcaaaggtatgatcagattcttgaagatgagctccattaagtagcttagattgaatgagactgaattaaaatctgcagggaggagatttggtgtgggagaaggtgaagcagatatggtcagaggaatcaaaggtgaaagatgataacagttcttggattctctgaatatattttggagactgttcttctctttctcatgagtgaattggtatatgaacattcttcacgatttttcttcccttcctcatataggcattataaagttttgaacttcttttgataattattatcaaagaatagtataacttaagatttggcagaggtttatggaaaaaaatttaaaaaaaatgagggcccaaccgggttcgaaccggtgacctcttgatctgcagtcaaatgctctaccactgagctatggaccctttgttgtacatcatatctatattaagctatctaaatctacattaagatttctacatatagtagcttatttctttgttattgctttagaaatttggtaacaagatttatattagtagacctcttatatttgtctctaaacaataagaacaaaatgagaaaatctagttatacattatcaggccagaactccctgcggaaggctcgttcaaattcgttttccgccaatcgtttttcgtgctcgatcatcttcactaatttcttagaaagtttcttgctcttctttgatacttcttcaaaagctgtatcctgaggctgtgccggttttctcttggctggtttttcagctcctagtccttgtttgttatgttttggttctgcttgtagaggcaccaatataccttgttcagtgattcctagaccagttccttccttccagccatgcttctttaggagctgaaaaccaatgttagaagaactgatagcagtcgatggattgcttgattcagaagaatccccaataacattggacactttttcactgtagtgagaaattgtagcctgggacttttctgttttcttcctcctttgtataaccagtccctgtttggtgattcccatatcagtactttccttccaaccttgcctctctcggagctgaacaacggacgtttctctccgagtacaagccagatattctgttccttgcatcgtaagaaaggaacttcttccgtttagggtttgtgtttcttctgatgatccattctccttatatagaattattatgatttcctaacacatgaggacacaattattaatgggcttatatgccccgtacccacaaaagaaacaaaaattgtttgctaatccagttatgaactaatcgtgtttataggaactcaaaatttgcagagtcagtggcaatcctttaacttgttgaatctcccgtaacaaatcctaaccaaaaacgtgaaactcaagtaatcgccgaacaaaaccagaccaagaaaccctagaatcgctgatttgatctaattaagtaaaattgccaaaaaccgcttcgactaattagagaaggcctggccctcttactctatccgaaccaccgcctctgctttattttaaccttatctaatgtaaaattcgagtgatgcaactctgtacacgtagaatcgctcattaggtcattaatttgtgactgcaatataccccaaaaccagaacatttagccttagaaaccggttcaactagtcgacagaaagaaaacgtattcaaataataattttgatgtttctaaacttcctaattgaagcaaacaaaaacgacactagtacaacttttctaaactaccaaaccattatacaaatttattcgaattggttataaatgatataccgagcgattccaatcatgttttgggtcatatgtaatttggatgacataaaatggttagaatcttttttgtctggttcatatatttaattttctctggttcatatattttccccaaactgacaagtttcaaaaaagaaaaaaagaaagaaagaaagaatcagaccgaacccaccaccatctgtcagcaaaccggtaatagaggttgttggaaccacatgtcaagaccaatcatatctattatatcttggctttcctcatctctctttatttttatgttatcctatgaaaatcatttcatctttgatatagaaagcacacttcatatccttcactcgttggataaatatgaaattatatcattctatatataagacttggcagttatagacttattgtatatctcattttgtataatagattctggtttaaaatttttggtgtttccgaatataaatcacaaatgtggcaagaaaacagaaaagcaagttgatgatagaaaaaaatataagtaaataatattggtattatcatggaaaatctagcttttgaggatttcccgccttatcaaaatttaaaggaaaaaaaaaacaaaataaaataaaataaagaaagacctaactttgtatgtttaaatattatattgtttggaaaatattttaaaagaaaattatcactttgaaagttttttactttttaaaggaatttttgtcttttgaccaagagaataagaaaactaagtttgaaagatatacaaatttcacaatttgcgaatgcaaatcattcccaaattgacatatattgtatggtattgacacacccacaaatacttgaaaattatctgatattggatgtttttcaattatatattaataaaaataatatttgtatatagtaaataatagactatcatttataacaacaaaaattttataaactaatatagagtgctatataattttgtttaatccgaatctaattcaataaaaagactcaaaatttataaacataatttagaacatagtaaaaaaaagtgagagagaaaacaaaaaaaattgagagaggaagttcaaattgttcttgtatttagacaaaaacaaaaaaaaaaaaaaaaggaagaggtgactaataatgaatgatgcttttacacttataaaaaggtcatgacgcatcgattaaataaataaaatgttgtttgtttgttgaccaaataagaaaagcaaaattacttaaaattgatttttttaaaaaaggcagtgtatataaaaacctttgtcgttctcaaatcctctctgtaattctggtttttcttgcaatgcttcttccatttctctcctcctctctcctcctccgtctctcttctccgatcatgtcccctgatcccaaatccaataccttcttcttctctttttccagttgattaccggagaatttcagatcgcgatctccgatttattaataattacagaaaaaaataattaaaccctagagagagagagagatatatatatacatggagagttcattaggtttcatggcggttttcgccgtctcaggaagcgttgtgttcttagcgagtcaatttcacaagcgtcttctctccgattacatggacaagttcgaattcgaaatccgtacgaacaaaatccctctccgcattttctcgatttcattctcttaaaatttttaaaattgattatggagttttgttgtttttgtgtggcaggagcgcagaaaaaaatggtgatgaagaagaaggtgagattcgcggcggatgtggtggagccgtcggggaataacaaagagtatcgccggagacattcttccaaggctaaatcgaattcgaagatggcggcaactatttgactttaaggttttttgtacaaaatttaatgtgtaatttattcatttgggtttttgtgatttgaaattcgtaaatttaatttcggaatctgaatctgggctaaacttttcaagtcttccccagggtcaattattttccttcttcttttttttcttgagggtttatttttgttgttgtgacctgtaaataaatgtgttgtttgtgtatatacaaaatgtgattgctaattaccttttatattttggttcttgtgatttttgttttcgtttaaagcattgtgttgttgtgattcagattaagccttaattaagggttttacatacagatgtaatatgttgcgctggctcttcttagttacaattatcatagttaattatttatagttatgattgtgtctggtgattaacaggctgacgtaataactaattattaagacgattaattaaatttacattgattattagtcatcatttttttatgataccgaatcatctattcatttctcgttattaaattaaaacctgcatgaaaaaaaaaagttaataattgaaccattacgttttggtttggtgttttggtacatgcatttgtttggtcaaagaataaaaacttgtttaagaaaaagaagagactcgggagtcgagacagataaaccaaacacaaagatgtaccttttaaaatcagttaactacaaatcacggttaaatacttttaagttatctttgcatcaacgtacgtatgaaagcattaatatttcaaaaagtcaagtgtgtactaataatatgttttctgaagcaaagtgacagcagaatcctaaagacttattaaacattcaagatttgataaagatttgggatggaacaaagtcagtaaaatgctatactaaaataccaatttgttagaaacgtggtattttaaattaatcaaaaggtttatcgtgaacaaaccccgaagggtcataggccaaattaaaatgtggcttacgagagtatggaattggccatttgatttttaaaatatattaatcttctgacgagtacaacgtgacgacatgcatacttttatccaaccatatattcttaattcttataaaatagtactagatactagtatttgcatcatcctgtaaaagaagagttagtgagcatgacgacatacacagagggtaaaatgggactaatcgaatagaaggttcttcttattctcgttaagcatgtgctgtgccaagtttttgtttttggctacgaagtcatgtttttgcaaggcatatatagtgggccggtgatcggtagttaaattcacttacggcccagtttgttggaaaccatttctattgtcggagattttctacaagttcctttcttctgtatttctctcgttaacattcttaactctttttttcctaaataacaccataatagagtgatggccgatgggtgtattttgaatgggatttccaagtacttgttcatctcctctacgattagacacaagattacagaatggacaacccatagttgttgatatacattggtgggagttgcgctttgaagggtttcgtcattatcatacttgtagaatttgaacactatagaatttgtaacactatagcggatgctctagctaggaataatttttgaacactgagggtgattattatgcttgttgtattaatgactataccaaattggttcatctcaaatctctcaatcgtgattgtgtaacttttttcatcttaataaatttcaagtttgagtaaaaagacatcaccacaagtagaatttaagcgctctccattttagacagttacatcacttttttcttttctttgcaaacaaatgcattccttccttcttgtagcatatcatcgttttaccaaaaaccgttttttcatccatgactaaaattagttttgtctatatttttgttaaaagaaaacatgtatgtttctacatatatattagttatatatttttctattacattataaacaatatgtagtcaaagttcgttaatttatttaatactctctagtctctattatcaatgcgcatgcatgccagcatagagtagatattttaacaacataacttcgatattagatatatataagtctaacgatacatatcgttacatatgccatatagtttttaattttttttatatagtttttaatttatgtctagttttttttccaccatttatgtctaggttaaatagaggaaatgtatagtgtattccgatccagtgaataacattagttttcagattgtcttgtgtcttattacgtgcatgtgcccagatcatagaccagttagctgtctgaaatataaatgtctgttgttccattaaatgccatgatccataaaatatcacgcatcaaattcatacaaaccgtgtattctatattttcgaataattttaaaggtatgaagcaatcatatggttgtcccaataaagacaaataaaagtgatttattgagaactcgcatcgcatctaatactgaattgtaagatcttccgtatcaaaaattgacccaaatagttcgcatctaacagagaagtttccgaagcagtttcttctttaactattgcttttagtccatttttctttttcctataaagaaaagcctcgacaaagggctgcttttttcactccattattttaataaacaagtaaacagacttttttttttcatctatcacattccttttactgctttacataattagatgccaaattttactggacgaacttaactatcacaaatgttgaatcagtgatccaattgttgtgtatctgtatatccaagactgtaggctaggccatataatctggcaatctattatatatacgatttaaatcaaagcttttatattataaacataaaacttctcactcactaggccagccattagatcaaaattatataatttacagatgtacatgttagaacaaaatgaattttcaggaaacctactattgtgtataaattcgaagttaatgagttcgaagtagattttgtcacgggtttcttggcaaagtttttaatcaagaaacaattatttaaaactttgaaaagtatctggtcgtcaagagtaaattcgtgatcagtgtataaactgctgtttggaggcacgtttattttcttctaaaattatattttgccggcttactttatttttgacttgtatagatgcttgaaaacaaaggtatatgtgtttgaaggcgatgaagaacctaacggtaagcgaaacgtcgtcgtttcttgttctacagcatgtaagggaagcgatgtgtactctaattaaggcttagcgtaaacggtaaacactaattgacatattcccatgagaaccttagccacttttttattttcacgttgttgtaagaatataacaaattgaaaactatatgctgtaatttgtatgttgcatatttcgtattatactaatccctataacaaacatctttgcatacaatcctagttttttcttcagctatgacaatttatattagtccctagaaatcgatatataatcttgcaaaggtataacttcgattcttttcgtataaaaatttgaacaatttgcgtttacgctatatattaattaataaaaaattgttttacaaattctaaacgcaatgttttttgttgttgttgtttgcgtatgaaatagaaacaacttttgactaaaacagtaaagttacacgattagatctagattgtatgatttgccaaactgaacatctggctatctgagttattacatattagaaggatcaccggcgaggattctatgattcaacaaacacaacgttaaaccaatgatttcttataaagaaaataattctctctttagaatatttctgagaaggggttgttgttttttaagtgtcgcttactcgcttcaaactaaagggaataaggatagtaaatagctcatccaggcggctatcacaatcatattaaactataggttacttaaataaatatatcattgaaatttttaattagattttcatgctaattccttagaagttttctttttctttttttttgttaaaactaatttcttcgaagttttgacggtcacgccgacactttgttttgacatgcccgtctaactctttttttgtttgtctttctttaatactactaatatacaatttgtatgacacttaataatgttagtgtttaaaaataattatagttctacataccccaatacaggacaataataagtacatctcttttatttcttatgcgatttcatttatgtctactacgaaccaactagaatttgcatccatcacgatgaccaattgacaaaaacaattgcttaacatttaggttttacggaaattatcattccttaagaattttgtttattttattacagatagaaaaagacgaaaacggaaagattttgacttgaaggcaacgtgaaatttgtgcatttgagtaaccgacacacatgaagctcaaacacaaagacagagctgagctgttgttaattccctgaaaagctcaactcttggcttcatgttttatcgacgtcaccatacatttatttcccttatagacccacttctcctccccaaaataaatactataattagagaaagcattaaacccacccacccaaaaccattaaatcattaagaagaaaatgtttattaataataagaaaaatgaaattatacacaactaaaaaaaaacaaaaggaagaagaaacatcacaatcaccaatcacctcactatatcaaattctttccttattcactaaccaaaaaataaataaactcaaaaccattcttcatttcgccgacactttcttctccaccaccaccatggatgatctctccaagcttctcttcttcctcctcctcactatctccattaccaccgcattacccgataaacccgggtcgggtcaaataaactcaaactccgtcctcgttgctcttcttgactcacactacacagaactagcagagctcgtcgaaaaagctcttcttctccaaaccttagaagaagctgttggtcaacacaacatcacaatctttgctcctcgtaacgatgccttagaaaaaaatcttgatcctgaattcaaatctttcttactccaaccgaaaaacctcaaatcattacaatctttattaatgtttcacattcttcccaaaagaatcacttctccacaattctcctccgccgtcgttagccaccgtactctctccaacgaccacctccatttcaccaacggaaaagtcaactccgctgaaataaccaaacccgatgatttaactcgtcccgatggaatcatccacggaatcgaacgtcttttaatcccacgttctgttcaagaagatttcaaccgccgtcgtagtctccgttcaatcgctgccgtattaccggaaggagcaccggaggttgatccaagaactcaccgtctcaagaaaaagccagcaccaattcccgccggagctccaccggttcttccggtttacgacgcaatgtcacctggtccgtcactagctccggctccggcaccaggaccgggtgggccacgccaccatttcaacggagaggctcaagttaaagattttatccacacgcttcttcattacggtggctacaatgaaatggcagatattctcgttaatctcacttctttagccaccgagatgggtcggctcgtgtcggaaggttacgttttaaccgttttagcaccaaacgacgaagctatggctaaattgaccacggaccaattgagcgaaccgggagctccagagcaaattatgtattatcacatcataccggaataccaaaccgaagagagtatgtacaattctgtacgccggtttgggaaaatccggtacgattcactccggtttcctcataaagtagaggctcaggaggcagatggttcggttaagttcggtcatggtgatggttcggcttatttgttcgatcctgatatttataccgatggacggatttcggttcaagggattgacggtgttttgttcccggaggaaaaaactccggtcgagaagaaaaccggcgttccagttgtcaagaaagcacctaaaccaagaagaggtaatcaaattttgatcaatctttagtctattaatttttgtccttacctatttgatcgtgacattttaaccccaaattatagaaattaaaaaaatacataccactactacaaaaatacaaaagttttggtatagacaccattacaaagttataaagtcactcgcttagggaattttttatgttctatgattttgtcatattaaatggataactaaatcattgttatagaaagataatggtgattagtccatatacaattagtctttcaacgagagagtactaagtaaacaagtgagatttggaaaaagtacaaacgtgtgagaatggagacaaagtctctctaacaaactttgatataatatataaaatttcaacaatattatacaaaattttggagataattaggatttataactacttaatgatccaccgacgaaagtatcccatgttaaagtgaatgaaaatcacaaagtgttcctttttctttgttttttgttctaaagccaagtatgagtcatataatcatattgtaataaagagagaaaattttctttatttatttctaaatatattatttttgcattagttagaaacaatcattttaatagtccttcgttgttattgttaataaaacaaaaaccaaaccgtttgaaaaaattaataatttgtatgatttatattatattgcaggtaaattgatggaagtagcatgtacaatgctgggatcacaatttccaacatgtcaatgagatcaaattaaatccgggacatgagaattttataattctgtaaacatgtgataaaaatgtgaacagaaaaaagaaataatgtaaatgattatttttttgggctcgttgcaatatgattgttaaattgtaattttcagttgttttgagctgacgtaaccaaaccagattgggtgggtcttttcttttctgttggatgctactgtattggatcgaatctgtccatttagagatcttctaatggactactagattaagcagccctaggtggtaggttatgcattggaaatactgtaaactgtaaaggcaacaatgtccataactctaagaaaataatccatctaattcagaacatcaatatacccaaatccagttttagaaacaaagtaaaaacagtataaaaaaaaagccaaaatgtgatgagaagtcacatgtcatctcgagttgatattccaacaagttgctaacattaaacaacatgggatagcatatttgatattccaattcacaacatgagcatgcccggtccacaactcaagctacccaaacaatggctaagatcatcaaaagagatgagtaaaaatacaaaatattataggtatttgttattaattcattttttgttggtcttttttttaccatatcacatgagttttaagctttaaagttaataaatactaattaagcggattggtaatgaatttttagtaaaattttggttagaaaaaaaaaaacgaaaacaaattttttcttcttctttttgtatgaatataaaactatattcaaaaagacgtttgcacaaaattttaatttcgattgattccattgttatttatttttatgttggcttggattccattggtattaaggtaagtgattttagtgacaaaatggaagaagttgctttgaagaaaaataattgaaaacaaaaaaaaaaaattgactattgtttttattttcttacaaactatttatggatttaaaagttgttttatcaagttttagtatgattttttttatattatattattagtaaatttgcgagaaaaatataaagagcatggtttttttctttacgtaaacgttcaaaattatcagtccggctctaaacatgagatagtagattctaattctcgtcatgagatcgtagattctgattgacaacaagagataggagattcctgtttacagtatgagattgtagatttcattcacaacatgacatcatagatttcaattcacaacatgaagcaaatcattaattattttcaaatgtcataccaatctcgtcttctcgaatgtttggagcttcatgaccaacctttgagtaaagagcattacaaagtcgtaatcgttttaaaaacaagttaaagatttcgtttctttggatgattttatgaatagtataatacaaatttacacaactcaccacataatatcctttgtatgatccaaccaatttcagatggagaaaatatagttgcatgagtatctacaatctaagacacaaagacatagatggatctaagggagactgaactcttgtataatggattcacaatcacaagaaacaaggagagaaacacaaattgaacgttattatttccagcttaatggacttgaagaatgaccatcatgtttgtgcctaatctgattttctccaaattctttagaattctctctttgctaatcctgaccaatatgagaaattcaccatttttttgctcataggtgctatcaataacagtttcaagtttcaacaattcaccatttatataacattaccaacagtccaacactagtaacataatcaccaaaatatattagtaataaattttcatcacagctttatatttttgtgattagaaattaggatcttacagaaatctttcaaaaaaaaattcataacagttccattttttttggtaagattcataaaaaaattcaagttaaatgcattttataaaaatgtaggaaaaactttcatcaaaaatcgttgagaagaacatacagtatatcttatccactctcttcctcatccacgcggcaaaggcacaaacctctttagaaaaatgtcgtcagcttattgttcctccgccgtggctgtatccgccgcagccaccgcttcctccgccgctacctttaatccattactctcctcccactccaattcccaactcttctatcgctttacaccaaaatccttcaaactcgttgccaattgccctaatccactaatcctccactcaaatatccgccgccaccgcttcttctgcgccgccgaaaccgaagctagttccgccgatgatgaaatccaggcatcagtagaagaagaagaagaggtagaagaagaaggagatgaaggtgaagaagaagtagaggaagaaaaacagacgacgcaagcgagtggtgaagaagggaggctttacgttgggaatttaccttacacaatcacttcttctgagctctctcagatttttggagaagctggaactgtcgtcgatgttcaggttcgtctctaatcttcatacgattctatcaatcgatttggagacagtgaagcaaaattaggatgaagattgtctaattgttagcattgttctctgttgtagattgtttatgataaagttactgatagaagcagaggatttggatttgtaacaatgggaagcattgaagaagctaaagaagcgatgcagatgtttaacagctctgtaagttcacatcatttgatcaaagatgattcagcttcagaatgtttctgatctcttgtgtgttgagtttgtagcaaattggtggtagaacggtgaaagtgaacttcccggaggtgccgagaggcggtgagaacgaagtaatgagaaccaaaatccgtgataataaccggagttatgttgatagtcctcataaggtatatgcaggaaaccttggttggaatctaacctcacaaggtttaaaggatgcatttggtgatcaacctggtgtgcttggtgctaaagttatctatgaaagaaatactgggaggtctagggggtttggtttcatctcgttcgagtcagcggaaaatgttcagtctgctttggctacaatgaatggcgtggtaaggcttcttctcccttcttgtttggttgggtggtttgggttttgagactcactagttttggtttttaggaagttgaaggacgagcgctgaggctaaatttggcttcagagagagagaaacccactgtgtctcctccttccgtagaagaaggagaaaccgaggaggccagtctagagagtaacgaggtgctttcgaatgttagtgcatgaagcagcaaaagcacaatagattccggataagtttcagactgatctgctcgaggtgccaaaaatgaaaattttgttgtctttataaatgtgttgttttgttctagtgaggctgaagaagaagacaatatatgagatagaaaacaagagattgtttgtaatttttattgagaatgtttttaatccataaatggtgtaatgtaacaacatatcttgattccagtaaactgcaaatttctgtcacgattaatgctagtcggtctcgtggtgcccggaaagcagagcatctgcagcagaatctaagtcctgagggaagaagaccctgcagaaatattgacaagccatcaagacaacgttttacgttagaacagttcttcatatttctgtcatgaaattatgtgaaaccgaaaaagagaaaacatgcctgcaagtgttgtggtacaaggttgagctaacttgatttagatcgccaagtcctttgtagccagccaccacttcaaggacttgcctggagaagaaaatgattgcctaagaattgttcgaagactgtatatgcttatggatttgacaagattttaatctagaagctacactcacctgactaaacaaggctcattacggcctttgacaagggactcttgatcatacttctcttttttcttggaaggccaagtcgactttacaaacttgattccggcgtgtgtgttcttgatatcacaatatggagagtcggtttcgatcatcattctctctactggtattcctttcattacctcaagattctcagctgttttcaacgagcacccgttcacacctgcagatagaatacacatcagcaaaacaaaagaccagaacagtaattcaagatattctgaccaaatctgatcctacaaacgcctaggcgagttaaagcctacaggcatagtctctaatagaaaaaaagtggaagtctttaccaaggtacattttatcgaaagagagaagctt

SEQ ID NO: 99 - DNA, 97798 bp, Arabidopsis thaliana
gaattcacaaccaaggatgcaaatacattgtccttaattaaggaccatacatttcacattccgtaacaaacagaagatgataatactaggaattaaaaacacaagggaacaattttgacttaaatgaaaaattataagaagctgttgagaaagagagataaataaaagaacctgttgcggatcggatttggagcggtcattatggacgaatacgatgggacgaggcggctggcggctaagttccggcacatcggcttgagatatgaacggacaaagaaacaagagagtaaaactaagaaagagaccaaaaagtttcatcttcttgtttaaagagtaaaagtttggtgaagaatattggattgttattgaagtgatcggtagatgttttcagatgtgtttacactttatacatctcgttagccatcgcgtcaagtaacttcatttccttctttatttataattcaaaaacatgtcatatatacatttttgtaagctttgcttgcagctttctttatctttctattattaaaggaataaccagctataaggtcaatgcttgaattgttcaatataaggttttcgtaaccttaaagaattggaccctagaaattagaaaaaaaatttgagacgtattacatgaagatattagtatatagtgtcgtccgtgtattagtatatatatctgtatgaaagttgtattcacggtgtcaaactattctgtaacactatactctaattagcagatgattttttgcctgtttgaagaaagtcattacgttgttgcattgaatagaaaatgtactagttacgatataagaaatcaaagttaaatagactgaaagacttctcaagaaacagaaagttgaactgaataagtaactttgaatacaagataagaaaaatgaaacaacgtatagtagttatataacatcgtttaagggtgttttagttatggacttaataatatatcaatgaattaggaaatttaagaaatcgttgaataatacagaatagaaataggacgaaaggggtcaattttttaagttccgacgtcggccaatgagtcattgagcaaggatcatgaccacatacgagtgctatggtaccattcaataaatccttgtcctataagactttactataatgtttttttttttcggttgtttggtcgacttaatttaaaccttgatgtgatggaaatccacgaaatgccacattgccatcccatattgttaatgcacgaattaaacaagtacgggtgagtctcaagggaaggtgaagaatcaatctctaattcacgagctgaactcgaagctggacaatcgacgggctgaagggcttatggcgaactgagaacgtagtcggttgagggcgctacgaggcgatgccgtttcgagctggtggttctggcgagctggctcttcttgctaagttggcttgtcttgacgggatgtcttctctctacgagctgacttgtatcgatgagcggacttgtcctgacgagctgaattgtcttgacgagctgacttgtcttgacgagctgacttgtcttgtcctttctccaggtctcccaaaaaaaatgtcctttcccgagactttctattccttatttatacccgtccgtgtagtagggtacgcaaggtgaattcccgagagtgcccttttctgcgcagccgaactcacatctcgaccaggccgggtttcggcccggcgggccggctcgagttctaaagtgatggtcggggctgggtcgatattccttgaaatgggccggttgatcactgaggcccaattgatgtatcaacacatatctaagattattcaacttcatgtgaatgagcaagcaccttttttctgttttattagacttagacatttttaattgtctccaaaaattgtatacttaacaaaaaattgaagctcgaatttcatcaaatcatgtttatttattggattattttagtatgtaggagttgtcttatcctggttactctaattaacatattaatggtagtggctggtgatcgagaaacaatataaactaattcaagtgcacattattttcacgatattacgctagttatatctgggactgcaaaaaaacaattagatattttcatgtgtttcgtaattaacggagagattatttaaccacaaaaatgatggccatgtgtcaaacaatgaacaagtgataaagacgagaaagagtaaaacaagtaatctgatggaacgtgcgaagatgtagaacatgaaccatgtcatctggccacgttgcttagttaatctggtcctaacgaatatgctttatggatctttcctaattctgaatagaaaatacaaataaatgatttatgagttacgtattttagataagccgtgtacggacgacggactttttcttatggatattgaaatcgaaatagcatatgcttttgacacaataataagaaggatagcgaattatggtgtaacattttggcaaaatataaaatagcgccaattatccaccaagtccactattttcgtccttttcaacatatacactattttaaaaatttatattctaatttgcattttatatttttaaatcagagtctattaacatatagttatatttggcatgagatattgatttaaaagattgaacttgtgcaactcaccagttcaagaaataattaaaaaaaaggagatacatgattcatccctgtttaagttttaattgacttagacgtctgtttatcaattcggcaatatggcttgagataaactaaaatgttagtgttttcaaccaaaaaaaagaaaaaacacaaaaactttaggtcaaccattttaatctcttaaacgcaataaatctaatcgcctgataggtgaggagaaaatgctcaagtgtaatgttcatatcatctgggttggtctatctgagaattcatgggccaattaaattcaccagcccaatacatagataaccaaaagccgaaaaaggaaatgttgttagcgcccaaaagcccaaatgattactttttagaactttagacgaattaaatctttaattgacatttaataataaattacaataactaaatactaattatattagttcaattaaattttagttaatggacacaaaataaaaaatgtaaccggaactctttggtcgaaaacggactcttcaagtgctttggaatagacggacgcaaaatgaatatcatcaagtgcagtttaatttgtaaacaaattctctctacgcaaacaaaaaaatcactggtgaatgtcatttaattatctattcatttatttcccgtaaaagaaagtgcgtaaaggttttcttgttgaaaacatgtgtgtgatgaatgattaataaaccagaaaatgttatgtctggtctgttcttatccttgacgatacagacatacgtggatttcactagacatatatagtcacacagacgactaaaattaattgatccttatttttgcattattttcgaccttttttttctttgttaaatacattcgatctattgaaaagatagttaccatttttctaatgaacttatccgatttgcttcgaaataaccttacttaatttcaatcaaactcgaataaggtgatttactttataagttataaccatacaaattttattagactgatacagttcttaatgacttgattgtcggcatatttcaaccaataatttaacacatttttgcggctttttctttattttcaccaaaaaagtctatattcgggggaggtttcggtaactataaaatctgaattaccaaaacaaaagaatgtacatactgtatatgaatctgagacttttagaatggggcatatagctttccatcatctgtcttgcaattaaacttgtaaactttcaatatgttttacctacttagattacatcacggaccacacaacttgcactgatcagtaagtatctcatttttttcaaagttttattttactcaattaactgttcatatctatatggttttcttaaggtgttgtatatatatatattgtttaaggtgtcgtattttcctttaattctggtatattgattgacaacaatgtaacgtcgccgaaccatattcgtaaatgacatttccgttgtaaggcataaaccataaagatatctaatagtggagttcatcactattacataaaattttgagccaaaaaacaaaaggttacattttatatattacaaaatatagtaaaatgattatagaggtgaaaaaacaaaatagatatacaaattttttaaaaagaaaggttactaaaaataatatacaatataacaaaacaaaacaaaaatcaaaagaaatagatatatgaaaaatcataaaattggtagggcacaaagttttaatatcatccgctcaaaaaaccagagagatagggtcccattataattttcctcattttcatatgcattcaataatctatctatatgtacagtgacataagtgtcagcctttacatctatgtacatatagcttctagattctcattcattccaatcacagagctgataatttcagcagaatatttactattttttataaagaaacaaaaaaacatagaaaggtttggtttttcaaagaacgtgaaaatgagtatgcattttaggaataaagcatggattattctggcaattctgtgtttttcatctttgattcactcaacagaagcagtggtcacttatgatcacaaagctttaatcatcaatggacagagaaggatccttatctccggttctatacactatccaagaagcactcctgaggtaatctctaattattcattaatctttttcttagttacatgcaaacttttttggttatgaacaaattttcttccggattttttgaaatgattgctttgattttctgcacataggtttttggtttctctgtaatctgctaatagtataggctacatcatcaagagtaatacatttgtttgaatataataagttgaaagcaaaaacttgtggatgttctgttctatgcagatgtggcctgatcttataaagaaggccaaagaaggaggtttggatgttatacaaacatatgttttctggaatggacatgaaccttctcctggaaatgtaatttaagaaatttaacaattttcttacttgactcataagtcatttaaatcctttcattcttaatgctctatattttttgtttgctccagtactattttcaggatagatatgatctggttaaattcaccaaactggtgcaccaagctggactatatcttgatctaagaattggtccatatgtttgtgccgagtggaattttgggtaaaaaatacaaaaaacaaaaactgtgtattatataactcttacgaatatataaatttatatttagtttatgatatctcaggggatttccggtttggctcaaatatgttcctggtatggttttcagaacagataacgaacctttcaaggtacacaatgctagaaactaccaacttaagtttttcgttctttgtttaatttttttttaagaattacaaagtgtaacttgatgtgatgattgaaaagattgcaatgcaaaaattcacaaagaagattgtggatatgatgaaagaagaaaagctgtttgagactcaaggaggacccatcattctctcacaggtttgtgtcttatttgcctagttgtttaaaattgatacaaaaattacaataatgtgaatgtataaaaatggacagatagagaatgagtatggaccaatgcaatgggagatgggagcagcaggaaaggcttactcaaaatggacagctgaaatggcattgggactgtccacaggtgtcccatggattatgagcaagcaagaggatgctccttaccctattgtatatttctcttttcctttttctctagcccttgattaggatgtctatttggttttggttaatcttggtttagatagcatcctagctaattaatttattgccaaaaatttgagtatggttggtagagtttctattttcgtttaaattctgcttttttatcaacctatttatattgatatgaaaggttttttaaaatattaattttgcttatcagtttagttttttagttgttgcgaaaggttacatttatgttgggggttagatttatatgcttatccggatagaatcaatacattgttatcagatcaaattttgcttttgtcggcaattagatattctttaagcgaaagaagatatttgtttgttattattttgtcatttatgtattttataatttgaaaatcattacttctttccttggtgggttaacttttgaaactttttggcctttacttgaagtcaaaattctctttttcttgttagctattgttatcggtatgtagttacaatgaaatatcgttttccgatttacttgcttgcaaaggccaaaaatcaaaaagaattcatggagacaatttttcttcacctttttttacctttaaatgtcttacaaaattaatttaccgtggaagtaaaaaatataacagatagacacatgcaatggattttattgtgagggtttcaaaccaaactcagacaataagccgaagttgtggacagagaactggactggttggtaagtcacaaagctattcatttatacagaatcatctttttgttttctttatatatttgtgtgtgatggtttaatagtaatgtgtgtgtgataatataattctcaggttcacggaatttggaggtgcgataccaaatagaccagtcgaagacattgcgttctccgtggctcgtttcatacagaacggtggttcttttatgaattattatatggtaaatttaagaaatttattaaatataaaaatagattaatttacgatttaagagttaattaaataagagaatgctgtcacagtattatggagggaccaactttgatagaacagccggtgttttcatcgccactagctatgactacgatgctcctattgacgaatatggtaattaattccgctcacatgtctattcgatttaattgactattctctaacgtttttgttttctatttatgtgtgaaaaggattactaagagaacccaagtatagtcacttgaaagagttacataaagtcatcaagctatgtgaacctgcattggtctctgttgatcccaccatcacatcgctcggcgataaacaagaagtaaatatgcaaactaatgaaatgttacattgaagataagaaccataaaagatttatacattttttgtttttgttatgttttcagattcatgtgttcaagtccaagacttcttgcgctgcatttctctcgaactacgacacgagttctgcagcaagagttatgtttaggggatttccgtatgatttgcctccttggtctgttagtattttaccagactgcaaaaccgaatattacaacactgcaaaggtaaataaactaatagcttatatccaaaacgttactttgtacatgatcattttttatcatgtgcaacttgtgcattcatatatggctttggttcaaaaattgttcttcatatgtatattcatgggattccttactaatatatatatgaaaacatattttaacctattgaaatagagatttgcatacatctttcaaacagtttattacggtcttgaccttgttgatcttgacttatatatgtgttccttttttttgtgatatagatccgtgcaccaaccatacttatgaagatgattcctacaagcacaaagttttcctgggaatcgtacaacgaaggaagcccttcttcaaatgaagctggtacatttgttaaagatggtctagtggaacaaataagcatgaccagagataaaacagattatttctggtattttacggagtaagtaactttttaaactctttactaatgaaatctcagtatcttgcttgtttactaatcacatttgggtttgttttatgttgaatatgcggttattgatctcagcattacaattggttctgatgagagcttcttgaagactggtgataatcctcttcttaccattttttcggctgggcatgctcttcatgtattcgttaatggcctgcttgcaggtaaaatcatataaacttgaagcccaaactctccttttggaacaaaaaaacgtaataaaaatccattttctttgttttaggaacttcctatggagcactgagcaactcaaagctcacatttagtcaaaatatcaaattgagtgtaggcatcaacaaacttgctctgcttagtactgcagtgggtcttccggttagttatgatcttgcttctgttagaacatctcacaatgaaaataaagatggatctaccataggaaagaccataaagttcgtgatccattattttttggcagaacgctggtgtgcattatgagacttggaatactggtattctagggccagtcacattgaagggagtaaactctggaacatgggacatgtctaaatggaagtggtcttacaaggttctcttgaacatgtgtttgataaaaacaattttaccaaccacaacaatactaaactaaatgtgtttctttttatttgtgatgagtagattggtcttagaggtgaagctatgagccttcacaccttagctggaagttcagctgtgaaatggtggatcaaaggattcgtggtcaagaagcaacccttgacctggtacaaggtaagaaatattctctcattttcttcaaaatagatcttttaagcttaaatttgtgtttcgaaacacaaatgaaatggtttaaaatctatgccaaactatatgatattttcatatacctacctatacgtacaaaattattggttaatgaattttcaaaaatggcaaatgaattaaaaggtttatatatgagatgttgaatgtttttttaatacatgtgtaaaacactttaaacatacattttacattagttaggaatgtagctaacattcttaatctggtttttgtgatgaattataactatggatgttattgaaattatgaacataatataagatatagattcatatcggattcttgttgtctctatttgtagtcttcttttgatacaccgagaggcaacgaaccactggctttggacatgaacacaatggggaaaggtcaagtttgggtaaatggacataacattggacgccactggcctgcctacacggctcgtgggaactgtggacgttgcaactatgctggaatttacaacgagaagaaatgtctcagtcactgtggtgaaccttctcaaagatggtgagaaaaaagaaacaatatccttctcttcttcttatttggtctaaaatctaattcacatgattgatttattaatgttttaggtaccatgtacctcgttcatggctaaaaccgtttgggaaccttctagttatatttgaggaatggggtggtgatccaagtggaatctctcttgttaaaaggacagccaaatgaagcttcttacttcaaattttttccggaagcatgcagagattgtcatgtacagatatagttgcattcattggctcattgtggaagaatattatatatatatgtatcctgctctaaaaatgtattacaattgtataaaataatatttatacaatagaccaaaacaagccaatctcaatcaccccataagaggggttcttcttcaggcttgatcaactaccccttcctgattgctctaacgtaactaataatcattttagcctcccattttgaaaggatgaaccttggattgggttctgcacttgagagtggatgtattgcatcatcccatttgaaccaatcaacataaagctggcaccaagagaatcaatcaaaaggtcacattttaagtgacatattagtagaaaaacggctagacttaaaccacataacgtaccacatatggataaaagttagcatgttccatcattctacgaatggtctttctctcctcttcagtcagctccacttcctcgtcattatattcatcatgaatcttgcccctaagccccataaattgcatcaccataatgcaactaaataacaaactatatataaaaataaacagaaaagtcttcaaactgaccaattcttggagtcatcattagtttatctcgcatttctttcttggtaatcttcttcccaatgatgtcataatcaatatgtttctcatccttataccactccaagggaacatccccaaatctatttcttggagcaacctacacatcaaagatttcgtttggaaatggagaaaagatagttacaaaatctagaatgaatagataaagcatcaacctcatcggcgacttcatcttgctcagaaccttggtcacttccatattcctcaccatctacttgttcaccatcatcatcatcattatcatctgatccctcatgacctaatacatgtagatgccggcacaattactcgctctctctctattacttgcaacatactagagctagaatccctatcaccccataaatgttcattataatctcccacaagtatcaaactataataaacctatatttgatgaatgtggtggtggtgacccaagtgggatctctcttgtaaaaagaacagccaattgaagcaagcatttgtgtggtttacaaaatcatgcatagattgtcatgtatagatatagtcacatttattggctcattgtggaagaatgttacatgtatccatgctctaataatgtattcctagtgtatgaaataactattcacaaaataaaccaaaacatcaaatcttttttaccaatcttttgaatagttatttcacttgagctctgatcaacattttttatggtatggtaaaaaatccacctctcagataaagcatcacatcagatgaaacacgaattttctttttcagtaccgtcagattaaaagattgcccacacgtgtttcccgtttactcttcttagattcttattcaatttgtacaaactctttttttacatatccacgtttccggaaacgacaaagaagaacaattcaataaagtgataaacccttctccattcctaaattaaaataattaattaactcttaacattcatgaatctctaatcctaatcaccattaataatttatccattagattaaatcttctttcttctcttccttaacttagaagactcttaaatctaataactctgttcacttccttcacacgaatcaaaaacaaaaagcttcgtacatttcgcctagctttcttcgttctagggtttcggatcttacttaattacccaaaacccttgaatccattactctgtgtgagcttaaatctcttaccttttatcactttcaatcgattgggtattaagttgtaaaggaaggaacttggaatcatgaagcttgggcttttcactctctcgtttcttctgatcttgaatctagcaatgggtagattcgttgttgagaagaacaatctcaaagttacatcacctgattcgatcaaaggtatttacgaatgtgccattggtaatttcggagttcctcaatacggtggtactttagtcggcaccgtcgtctatcctaaatccaatcagaaagcttgtaaaagctactccgatttcgatatctccttcaaatccaaacctggacgattaccaacttttgtccttatcgatcgtggaggttcgatttcaaagttcttacctttttagttgttcccttaattgggtattcaaaagatctgtttttgattcaattttggaactgaattttgttttcagattgttacttcactttgaaagcatggatagctcaacaagctggagcagcagcgatacttgtagctgatagtaaagctgagccattgattacaatggatacacctgaagaagataaatctgatgcggattatcttcagaacattaccattccttctgctctcattactaaaacattgggagacagtataaagtctgctctttccggtggtgatatggttaacatgaagctagattggactgagtcggttccacatcctgatgagcgtgtagagtatgaactgtggactaatagcaatgacgagtgtgggaagaagtgtgatactcagattgagtttctcaagaattttaaaggagctgctcagattcttgagaaaggtgggcatactcagttcacgccacattatattacttggtactgtcctgaagcgtttacgttgagtaaacagtgtaagtctcagtgcatcaaccatggaaggtattgtgcgcctgatcctgagcaggattttacgaaagggtatgatggaaaggatgttgttgttcagaatctacgtcaggcttgtgtctacagagtgatgaatgataccggtaagccgtgggtctggtgggactatgtgactgactttgctatccggtgtccaatgaaggagaagaagtacaccaaggaatgcgcagatggaattattaagtcccttggtgagtataatgcttcattacttcgatggtatttgctcctgtggtatcatttaattaacatattacctgtggctagaaattagtctagaaactgaatagtattttcagatatcagctcatccataatatagaacaaccaattgattgatttaaatgagcttaccttgtatggccttcttgaatccttatattcaccaagtggatattttgttactttcaaatttgtgcatttcatcctaaattttctgactatcagctatatatgcattcaggcattgatctcaaaaaggtggacaagtgtatcggagaccctgaagcagatgtggagaacccagttcttaaagcagagcaggagtcacaggtttgcctttttgtaactaattggctcttacacgtcttcccaagatcttgttggttttaagttgccatatattctccattcctcgaggtgttcttaaaatgagtctacttcaatttcagataggcaaaggttcccgtggagacgtgactatactcccaactcttgtcgtgaacaacagacaatacagaggtattggggaaatgttgacttgtcagtttttcctccctttctacagcatctttcttatgtttttgctaattgaattatctttcatgcttttaggtaaattggaaaagggggcagtgcttaaggctatgtgttcgggttttcaagagtcaacggaaccagctatctgtcttactgaaggtactattatccacgacatttgcaactctattttttttaacagaaaccacagttctcttgataggccaatatatattttcaaaacttgcattagagctatccttaattctttatctattgttttatatcatgggagagaaggatagttttcagacatgcttctgatttttgcagatttggaaactaatgaatgtttggaaaacaacggtggatgctggcaagacaaagctgccaacattactgcatgcagggtatcatttgggcatgctattcttttcattttctaacttttggttttgttgttgctactatgactgattactcttatttggtatgaatcggcattttaggatacttttaggggaagattgtgtgagtgccctactgttcaaggtgttaaattcgttggtgacggttacactcactgcaaaggtaaattattttttatttgtgtagcttaacatgttttgtgtggaacaagatacagaacaatgccataccctctgcttagcttctgtattccacaagtatttgttactggtagtcaaacaatactctgatttgtcccttgtcgatattttcttggaatcaacttagatggtctatttgttgatttgtaccacctgcgagtataatatcaagattgataaataaaattgtcacaatcattgattaaattttactttgaaaaagtttacacttgaagaaattcgttgatgtgactgagtggaaacattctaatgttttttatgcagttctactgaattttcccctttgcgtatatcataagttgtcttactataatctttgttaatgtgcattttctgtatccatatgttatttcacttggcagcctctggagctttgcattgtggtatcaacaatggaggatgctggagagaatcccgaggtggcttcacttactctgcttgcgtagtaagtatttcgcttctatgtcaatgtgtttgaacaatcatcttcttaacctaaaataaaacttctttcgttcttgaaatggatttttcaggatgatcattcaaaggattgcaaatgcccacttgggttcaagggcgatggagtgaagaactgtgaaggtacttgctaagtattatttacaaaatatatgcatgtggtctacttgcatatataaagagctctatgtcgatttatttagtaggcatcactagtaacatgctattagcctattgtttatatgcatgcatgtcggtctagaatatttagtgcagatacacaattatcagtggaattttttattgtactcaatcaaagaagtgagatcattgttaaacgtcaaattcaaattcataatcatattcttttgattgaatgtgttagatgtggacgagtgcaaagaaaaaacggtgtgccagtgcccagagtgtaaatgtaaaaacacttggggaagttatgaatgcagctgcagcaacggtttgctttacatgcgtgagcacgacacttgcataggtaaaagaaatagatcttccttcctcctagccccatacttaatttggagtcattaatcagactttctgcttttgaatctggtgaatgtgtaggttcaggcaaagttggaaccacaaaactcagctggagctttttgtggatccttataatcggggtgggtgttgcaggtctttctggatatgcagtctacaaatacagaatcagggtatacgatgttctttactctggtcttgttatcatattaaaacataggaagattttgcggtctagatagagatgctaagtaacaattgaaattatgcagagttacatggatgcggaaattagagggatcatggcacagtacatgccattggaaagtcaaccacccaacacaagtggtcaccatatggatatatgagtgaagttatcaacacaagccaagagactctctctctttctatgagtagctttaagtttccatgtaaatgaatcaatggacttgatacaactctagagaaaagaaaaaagccacaaacagaaataagtgtacctgcactatttgtaagaaatgtggatttgcagatggaatctcctttttgtctgcatattactcttacaatgtaaaatagacataactggatgaataatgagtgttacattatttactgttgaaactaacttaagatccataagaagaaaaacaataaactttgattgagagattgttaaactttctccagctcatctctgtgtttctcaatctgttctttcacaagcttctgcgactcttggaaaagcctcatgtgcttctttataagctcatcttttgtcttaagctcttcctccattactgcaatatcctgttaagaacagaacagaagagagcagaaactggtaagacaatatgtgtttggagttttcacattggtaaatcaaaccacaccttcttaaggctttcagctctcgagggcgcgcgatcttctcgctttagtcccatgaagtaaagctgaagctttttcgcagcttccatgaaatctctggcgtgccgctccacatcaactgcagcagttcaatgaggggaattaagctagaacatcgaatatggaatcaaagcttcggtttcaactgaattctaagcacaaaattcactgagatcataagttaagcacaaaaacaaacacaacttccaaactatcattcaaactaaaaccctagaatggtgaaattggagagtagaaaagggactgactttgatgagaagggtgaggagagcgatcgatggcctgaagctctctcgccggcaaacatggtaacagagcagcttccaaggctgtgacgcaagccataatgtcctctatgtcattattctgattgttcgagggggtctccggtgatctgattcccggtggacggtcaggcggtgacggcgaagggtcagaagactgcggcggcttttgctgataatccattcacgccgatctcgatctctctttctctctgcttgtttgtttgcccataaggtttagtgaaaaatattataatgggggcccatttactggatttaatttgggcttattgggccttttccacattcttaattgttcttaagaatatcattttgatgtaattaattgaaaacactgaaaattcatttttaataaatatatgaagtaaatcatttatttcatatgaaaaaacaatagtaaggagaaggaacaacattttctgatactttactcttgatttgatgtcacaagatataacagatgatggcttttgtaacaaattttgattccttatgtaactttttatctccatcaaattagataagttacatccttacttaaagattttttagctatggattttctaatgaaatttgtaaaatgagtaagcgattgactaaatactgtaaccattctcttcattatcagtgaaaatagcttttaacacatctctcattctcttccttctgattcacaatcatccatgtgaaaagatgacaacaaaaaccttagatagagaactcacacattagttacagaagaaagattctcatttactactacataaggaagtacggaacatatgatcagacatcaagcttcccggtcggagaaagtctgctactccggtatttaggagacaagttaacaaactccaaagcctgtgttctgagctgaaccggataatcagctgcacaaccgattcttggaccaactcctgtcgaccatttcagtgacaactgatgtcccaattgtaatgatcttgactgtttctttgagtttatccttagtagcatagatttctgcggcacgttagcttttggactcccaagtccacctgagagtgttctctggtagctactccgttttgcctcctcaagtgttcccactgttccgttaccgttctcatctgtttcagtctctgcttggaatgttgtgtcctctttctttaacggttccggttcagatcctccgttggatttaacataatcatcgtagctgtcagaatcttcactagctttatgcacctacacatacatagatatattagctctcaagtagtctctttttctaaacaaccaaactctagttaatgatatcattcaccagccaagattagaacaagggcattacctcaacattgtctaggttcactgcgttctctctgagaaacccgagaaatgtgtcgagactatcgtctgacggcctgtaatgtccgctatatgcagagattgtctgagattaaaccgaaaacagaacgatcaaacagagaaatcacagaaggcagacataataaaaaagttgatatgaatgaacatgtatctcaaccactctaagaaaaggacgtggccttagtaagttaccttgagaactccattgtcaacaatcaccctcccagcagctaatgtagctcctccagccaaaaagcttgagtgatggaaccttcctttctttttctgaagtaaacataaacaaagaaaagaaccattagaatctttttcaatactaatatcaattcatcaccaatagaaagatataacggttttaacttaccagaccggcatagagtttcttgaaagtactcataacaaagatccattttgttccttccgatccatgcattgtgtgtaagaactttccagttaacttgtgaacaatcttcccttctatgatcacatactcatactcttccctctcttgctgataccagaaaaggcttatatgagagaaatcccaaaaacaagtaaaaccaatattgacataagagaggaaaaaatggcacatacaggtccaagatatctaatgcattgctgcttaagctttgacctcggacattcgttaagatccaaatctatccctcctccaacatccaacctgccaaaaaaaaaaaacccggatatatcacaaagttatagataagaattatcacctaaaaaagattcttgagctacaagaaaacactaactaaatgaacctaagattttaagcataccagtaaaagaatggctgaccagcatcagctttacaccattcttcatagtatttatgcaggttgtgtccataccggtgtctaggatcaatctgattttcaaattttcatattattagtcttctttttacatttaatcagaatataacacaaacaaatattgaaatttgtggaagaaaggaattacagcttcaatccaatgctgaaaggccaatttctgagctttgtcgactatagacagacccttccccacctaaacccataaccaaaccacaagattacaaaaccaataaccaagtggagatctttttcttacaataatatatattttgagatatttacatatacttttttctgaattttaatcaaaagaagactcattagggaaaataaataaatcacaaagttcaactagaaattttgtgaaaatatgtttttgatatttttgtgaaaaaaaggcataccttagaagcattcaagctaacacggttccatctagaaacagcagtttcaggtctcgagtaatcgaaaaacgaaatcgtactatgattaagcctcgcataatccatcgcttgccaccttttgttttttaccatcattaatttaacacgttaatgactctaaaacataatctctccatttaaatatctaattacagtgttttagttgaaaaggttataaataattaccagagctcttcggcgacaacgacagagtctgctaatctacgccgcgtacgataactcctgtagaccttctgtactttcaccgccgccaatctagtcgagtcatcacacgcgccttcaagcgcgtcaccgtgtgaggataactctcggtggtctaccggagaaatgagaatctctccggcgccgtgtgagaacggcgaagactgaaaatcgaagctcgagactacctgcatcttctccgaccaaagagaggacttgaatcttagtgtctgaagaagaaactaaactcagagaaaatggaggatttgtgagtattgagagagaagaagaagaagaagatccaaaagtgtttgttctgctatcagtgttgtgtcatctctgtatgtattttttatatatagaaaataaatggcccatttctttatatatccgaattacttctttattttctaattttgtttctttttctcattttgacaaagttcttttttaattctgttttcctaaatagacaggtaagattgcgattttatttttgattgtgattattggagtatagtattaatatacatgtcactgatttattctgctaataaatcttgcaggttaggtacttagctgtttaaaaaacatattttaaaatatatacttcattgattcaatttagctgatataaagaaaatcaacgtaggttaagtgcctaatgtaagtggtggaggcatttggatcaagcattttaattcttagccaagttacaaaatgttgtaatgatgtaagaaaagaaaaaagatggagacatgacgatcgtcatttactcgagcatttttattaagttcccaaacctcaaatgaaagtaaaaacatgtgcctctttataatattgtctcaatgtctcctatatcttgtctagaaagaacaagacagtatattttactcttaactattaatgtagatgaaaagcttaacaaaaaaaaatgtagatgaaagctcattaatgcatatgaaatactataacacgtatgcgaaaataacttgaatgactacactatacgtaaaagcttcataaatacacatgtctggctcactctatctaccaacaagttatatactccgtataattgtgactgtgtcagtgacgatcatcattccgtatttttctgtatactattattttgcttaagtcatgaacggactactaaaagtatataaattccatgtgtcgtaaaagaaatttaacacttttattagtaggatcactagaatccacacattaaaacatttgatcatcgaatattactgatttattaagtataaatattcactatgtcaaaagagaaagaacaataaaaagaaggaatattcactttttctgtttagtgggtctccaaatgacttatcaattgcaaatgggtcttgttacataatacaagtgcatcagaaatcatgcgatgtcaggcttaattctagtatagaatcagaagagattattcgtttcctataataaaagatttctgcagtttcattatgttcattcattatgttccttcttttgttttctgttcatagttaatctgacaccacctaacaacgacatgtaatagttaatcacgcgtgtggaaatgactagcgtcaaaccggaaatagtggtcgagtatcactatagattattattggaatatgacatttaaaaaatgcactatgcaaaaggaaaacaatacttgcgatgttcggaatagagacgacgagaattacatccacatgattcattttaatgactgatctttattacgaaattttagaatataccgacatacacatgcagttatattttatctatatttcacatatatctttatacattatattataagatcttattctagcttctttttctcgtcgatcttattctagctaacacaaaataataatctaattataatcacctattctaatttatgtatatagttttaaattttaatgtgtcaaagtctatcgaaaacctatctaaaacgaagcctagtttaagctgttaaagactcaaagtccatatgttatataattggtttcaccatctgatttcgatgaaatgtaaaggaaaatcacaacatttgtattcatcatgtggactaaatatatgtcatgaaagaattgtcaaaaagggacaaatacgtcaacaaaaataatcgaccgcgcgtaaccaaactacatctttaaaagcataattggagtaattaattcttcaacgtttttattcgggatttatgcttgaagtgttagatttagggacctatgaactttctagctgtgacaatggaatgacatttgcataaattttttaaaatttgtattttggacaatttgtcattcaaattatctaatggatgacgtgaatccaactccatgtgtcatgttataagtagtggatacctaataatgaaacttaccaccaacagcgctattaccgaaatttgtgttatcatattttatatttgttataatcaaagtatatttgaataaatattaatcgaatgtgcatacgctaaattagtcaaactagtcctgacctaaatgcacgtacgttggatttgttcgtggaggttggctaagttgactttggttccaaggtagatctagttgaaagaaattgagtttcaatacattacctaaaatcgtgttaagagaaattagtaaaatttgggttgtttagttatatctacagtataacttattttttcatacagcccatgattaatgtatgtaacgtacgttgacatgatcggcatgtaggaactaatccgtcgtcgattagtttcaattttgtctaattttatactgacaaattaattaaactgttgtggtttagacgtcgttgtcatatgtgaagtaatgatacgtttgtcagagttactactaatcttcaatgctagagttgtcagagtttaaagtttggtgtacttaatattgtaaccggtaaaaccattaatttcagaacattttgctaaatccaatcgaattgataataatcctcctaaaatatagatattcgtaatcgacacgaatcatgcatgaacctattctttttaggtttttctatagtatctaaagtgatcattacattaatattgattattgacggatgcctacaaaaagaaatgatatataaaaaaattgtttggttgaagtgttacgacgatttacgaagaaacgtagaaagtagtcggaagaagcatgtggtccccgtgattgacttcttcacacgagtcacgaccactaccaacgattctatctctttgcgtgcttgcatgtgaatcacattgatctactcgtatacgtacgtacggtcactttctccaaagatcaaagacctatagtttatgtatattgtatacggtggtgttttgtttaatgtggtgtattttttccagcgattcatataaaatacctagaaatattatatttaaaattccatttaggatttgaaaggtgataaaccatctctaaatcaaaagacttggatatgttaggttcaatgagctacgttgcgttaaacatgactctttaaatatttcgatcacccaccgaagtataaaactgtttttcctaaggaaatttatgtagaacacgaggacaaatgtgcatagtataatttaaaatgataattagtatatcgatggatatagacaatttgtccgacgactacctaattgttccactacgtacagcttgcaaaattttgtttgttaggagaccttgaagtactccacgagatttactcaaataaattaagcgtcgtagattaatactatctgtcaacgaatatgaggagtcactcgttttttgttaaatagttctcgacctcatatgatgactaatagcagcgagtcgcagatttctaaattaatggaactaatttacataagtctacacaggctgagtaaaaatacaatgtacattacctttttctttttttctttttctttttttttgggcaaacaatgtacattaccaaaactgaaaaaacacaaattcgttgaaagggtcaataaaatcggctgatcaaaaaataatctgaccaatctaacataacttttaaaagcgtacacgagttttgttactttagtaggtgttagtttagtaatgaaatgaaagatttgtgtcattctataagtaatttcacattaattaatgcatgcaatagtgaacttggttataatttggcccacagaaagatttactcatttaaccatgagaaagacatgacaatataaaataaggtgttctttaattagtatgtctataactttgagatatatacaagagaattgtaaaatatatacgcctccatttcttgcattatttaactgatatcgaaggatgctatgcaacttactttccaccaaaagggattcacatgaatttttcctagcacatttcaaaagtttctaaatctgctattcaactactgcaaaagtctctagcagacgactgtatctactacacatttgggcattcaactaaataccaccacgcatcttaaacttttccgcatcttatataaataatattgtttttgtctatcggttacaagaaatttaaatcttagaggataatgatgatgatgaaagatgtgatctgaataaaaacgtttcagaagataaatttcttaaacacgattaataaccttgaaactgaactgatcatagatttgtagtacttgttaattctgaaaaacgtcatatatacacacacacacacacacaaattacagctattcgtcgactaataaaaaaaaaaattacaacttatattctaaatagtggattaggttgattgttcttttaagtcataaatgtcccaccatatttgttgtctttttattaggggggaaaacgtagacacataaaatcagtttattcgtcatcctcctcacaaattaagcatatcacacaaaaataagagatattaaatgaaaattttggttgtgcttcactgtcttatttatttccagtttactttaaatttaagacgaagacctaacactatgacctccatacttaatagagtttgccccaccaacaaactttatgaatatgcatcttgcatcacatctttcgttatgctaattaataacagtttggctcatcacatgtgaacatacccaacgtaattcccattactttaaaattatgaatctgatcgtagcgtttataagtgtccaaacaagttttctttcagagaaccacaaagttatactatttaaaactaaaccaaaagaattactaacaaaatcgaacaaagaaaataacttaaatgcagttcaatttttgctaagtttttgttcaatctttaaccaacaaaaagagaaaatccaaaaagcgaatctgacgctcatagtatttcatcttttcattcacattaatcaatatttgctttcacaatcccacattataaataacattattcctaactaatatatttagaatgagtagatttaactgaattccactctacgactggaaataaatttgattatcactagcaaaagggactaatatcatgttaaatttatgaatttctaactcaaaattttcaagttttcttcggtttgtgtatatatcaaaactaattctaagaaaacctagtcgagccgaggacatggaacaatgagagatgtccaattaaagatcgaattgacatttcaagggtcgtccaatgcccattagagtctacgaattactatttcaaggcccatttgctttcatattgtaaattactcccttcatttgagattacagtaaatgtggttttggagttgttcacattaagaaaccaagacagatactgaaacacagaaaaccaaacacatgatctaaaatgtgaatgtggttcagggtttcctctgccgtagactcttctcatggagtttagagagacaatacaaacacacaacttattatagctaaacaagtttttattttaacatagaagagaaaacgtgagtttgttttggtggttgtgtttcactcagatcttagctgcgaaggaaattccttgtttcacgagctcgtcgagactctctgcagaaggtcgagctttggcgactttagccaaggctttgttctcatcaccactacctccctccatgaatgctccaaccactttaccaccttgaacccaatatgctccaaatcttggttttgggtttgatggattgctgtctccaaataacacagagtctcctacgttgtctccgtagaactgccatgagagatcaaaggagcgagagtagaagaatggaagatagtcgtattcctccaccgctgcgcctccctcagccgctttgatcgcctgccacaatgtatcacatatataaacgcttcatcagatatatacaactgtatgttaatctataagatttaggcctcaagagtttgcgttgcattttttatggtatggattaatagggttttggtgtagcgatatcagccatattgtaagcattatttaccttaacagcttgctctgctgatttgcgggaatggtcaacatgctcgacccttctcacgtctccgtacattttcaaagggaaagtagcaacgtcaccaacagcgtaaacatctggaacacttgttttgaagaatgcatcggtctgtgtgaaacagttaagcagtcaatttaaaagatccaaatcagaatggtacgggataagaagaagaagagacgcacaggcagcagataaataccttaattccacctttatcttcctcgacctgtcccttgaataaggatgtcaatggttttgcaccaaccccaactatcacaatgtcggcttccaatgtcctcccatccttgagttgtacttccttcacctggaggattatataatacaagtaagacatttgcaacgagaccatttggaaaagctaattaatcgagttcgtcaaacgaaaccaaacctaaacataacattgtaatttggttttagactttagtttctataaaatcaaaccaaaacttaaattggattgcccactctattagctaatgtttctttgattacctctccatttggctgagctgtgaacccagatgccactgttcctttaatgatcttcactcccttgtttgtatagtaagtctcatagaaagcagcaatatcggcggtgaaaagcctaggcactgcgtcaacattttgttttcattacgtgtaacaatgtcatatattacatgaatagcaaaaggatactagtcaacttactgcaccaaggttcagggaaaaccatagtgacatctaaattgttgatccttaaaactgcactaagctcaagaccaatgtaacctccgccaacaactacagcctttccacctttcttagctttaattgcttcaaccaatttgtcggcatcatcaatctctctcagatagaggatattcttagagtctgcaccttttactccaaaatcagtcaatctgagaacctgcaaaggaaggtaaagagttactttcttcttgtaatagaattcataagaagcattctgatgtgagaaatgcaagtatatcagtctttacagtagaaccagttgcaattatgagcgtctgatacttgaagacatccccagttgcactgacaagactcttggcagagagatcagctttcactatttctgtgcttagtatcaactcaattcctacaaacacaatggataacaaaaaaatcatagcacgatttagttccaataacataagtaattaagcttgtatagagagtaatgtaatgttataatagatcagtgggactacacagatgagcagggcattgatattggtgatgttgcagacagttcattacctttctgcttgtaggattcaggaagcagtttttctccaccactaccaacacagcaatggaaacctggaagtctagcagcccctgcaacaaaaaaagattatcataaaaagcataaaccaaagccaagtttcagcaaatcaaaattaaacgttgtagttagcaaagtaaagtagaaaattgtcttaccttcaggaaacaaataccccttgctaagtgcagggcgttcatatggagccacctaagccaccatatagagtaaataaggtgtgaggattagagaagacaagtccacataaggatcatcatatcataggttacaagacacactgcataatcacagttttccaaatcgagaggaagcttaccgcctctttcgagataacagccaattctcctggttgaaccccttgattggcaaactccttagctgcgtatccctacacacaaaaatggagaaaaggatacaacaaaggttaagagttgaatttgcttctgtatttagttatttctttggaattttcttcattaacatctgtgactatacgattaatctgagctagtataaactaaagaggatcctgatgatactatgcttactattaaccatctgcaagtgattttgcagagatacacttttctcacacttaacaacaacaaaagaactagaactgaatcggaagtttttaagatgctctgtgcagaggaaaccagattacatccatgttttacgtcgaaaaaacaatcaatcaacatacgattgtttgattcaaaatcaagtttcgattgtaaattcatctcaacgatactagaaactagaagcagagccgccgatctgacgtttaaatctatgaatcacaatctataatcatcgtaatcgctatctgattaacaataacaaactccaagccaaaaaaactacgagaattgtggcatttcgcaacacaaatcgaatcaagctcttcgaaaatcgaaagcaatggctgaaaaaacttaaggaggaaggaagatactcacggcagagacgccgccgccgaggatgatgtacttaaagctcttctccgccattttatccgatcgtgtgaaagcgttttgttatcttgtcgctgaagttggtttgttagagaagcaaagaaagagcaaaaaggctaatatgagctgagtgactctaattggctaaaacttaaccaagacttggccgttgattggaggatgtagatacaaagcttacacgtggcaatattgtgaccgttgaatttatccaaccgtcgtggttcatgctatatgtggaaagtaaaaagaattaaggacggaaataaaggactgattgattcttaagtcttttttaattaacccgaaaaatagttggtggaaaagtcacaaatgtgccacgttattggataagttgtggaaaagtccacaaatgatgggttttagattattgggcttcttttcctgacctcttaaggcccaaaataacaaaattcaagaaacatgaagcttagtccttcgacccacatgataacccatttgaccatcacatgattaacaattcgactaaaacaaccataaattttgatttatcagcaattatatttgtaaataggtttattactacaatctgtacgtaataagtatcaatctttgaaggaactaaaatttacacattcccatccaagactataggcagtcacaataacccatttggatgaatgctcatttttatttttaattgttcaaatttcaaaatactgtgtatagctaaaaaatcgaattaataagtgaaggagaaaaaattggtggagtggattagatgcatacaatgacaaaaaagccaagcaagccttttatgggggtgtggcctgtcgacacaaacatgtgaaacctatacttgttgccttattctctagcttgttctctttctttttatttttttcttttaccaaatctaatttgattaccctatatatctcatcttcctcggattctcatttctcagatcttagttcttattgatattgttttgtttaatagtagttatcaagaatatacataactcgaatcatttgtcgttgtgcaccgttgtttcttgttcgccgtccacgcaataattataaacatccatacctaaattttatatatacacatcatgaaatattgcgacaaagacatttaatctagtggctcatagtattagtgcagtcattgcatcataacttggtataaatgtttgagatacaaaaataagtatatatatatatatataatagagtttaatccgcggtacaccgcgaaaataatttattttttaaattaatatatataaaagtatgggtactttttgtattttgtacactattaatgaaaattcacattttaaaaaataaaattgaatgatggttcaaattgatcttaaacgaaaaaatctgggttccatcaatcgtttttcttgaaaagatgcaaaatatttttaaaaatcgaataaaataattagcaggaccattgatatatttaaatatgcgcatgcatatgtttgtataataaaatcttttgatgttgatggttggtttaagttaaataagaaatcagaagcggacgtaacacatctaatttttgtgttagtttagtgtttacaatatatttaatggggattaaaagcatgagggaagagattaaaggcgcagaaagaggaatcctaggctcaaagggttctcaaagacctatcaagtctctattatttcctaacaccacgttccaactgtatgatttaggcttttttgccagattcaaaagtactttgttgttattaatctcgatcatgtatcattaagttatgtttcttgatcttatggttacggttgtatattatttgatttttcctatgcattttccattagactctatttgatttttcctatgcatcttctattagattctagttcattctttcttatttttttaattcatttgtcttgggtggctaatgaagcaataatggtttttagtttttatttgagatatttgtaattaatgatgcatataatttactgttttacgtggaaaaacgtattctaatttcttgtaaattgcaatcgcattgtatattgtaccgaggaaaaggatcgatttgcctgcgtgtgtataagctttatcaacgagatccaaagtaatctatatatgacccattgacctaccatcatacacaaagtcaacacacctaaaaatgattatgatcatgttaatctattaccgcttcacatacaattgataaaaccaaactaaaactaaaactaaatataaatactataaactagttaagtaacccacgaaaaagtctcggcttggctataaaaatgcagtcaccttccactttttattatctttctgatagtcattctatcagaaatattttatacattagactgatttgtagtattttcgtctgcttaaatttgaacatatcgttcgttaatcattaatgtttcctaagttagtaacaggcctaattcttaattgtatgttcaatacttttatcttatgatctgatgtctgaactttgaggtaaaatggtactagtatagttccatagttatgaatttgaaagactgattaaaaatatatattcaaaatacatatcaatctacagtgttctttttttgtttgctaaattatatgaatctacaaaataaaaacgttatttcttcgaaagaagtgttgtcgaaaaaacattttgaaaagaactgcgcattggctacctgtcttattctgacaatattgctccaccgttatattttaaaagcattcacatctatttttatcttctcaccaatcttacctactaccatgtgttcgcagtaaattaagacatacgacgatcgaaatactgtaattatttatttttattgattacactaaactaatcttttcatcaagataatctttcttatgggatttctgattgtaaaggggtttttcctcaatttttccctattattttttcaatttagttttgcccaaaaaaaaaaaaagaaactatttaataaagttctataatatattattgatataatccgattgagttagctcgattagaagaatcatagatggctagataaagacatctagtcgacctctactactctagtgatctaagattcaactggagagcagtgttatgactttgaaaaaaaaaaaaaaaaaaatcagcatgatatacaacttttatagattagtcactattcgatgaatgatgggaaatttctttggcaatttgactttggtcaaatatgtcatgatattggtggaagtaaattattgatcatcaacatttccgggaggtgaaatcagttttgacatgacagtatataatattaaaatacttgtttctatgaataaaaacagcataaatccaaataaagctcgaattatttaaataaaagaacaataacaattcagataaatttatgaacaataataaaagagttttgaaatggaattaaatatcttctgaagtgaaatatgtaataaaaatacagtagtaatttttatttgttttgaggcataataaaatgaggaaaaaacccgcaaacatatgctgtgggacccaccatgttttttttttcaacttgatcatctcttaactctctctcattcaccagaaaacaaaaattacacaaaaatcaaaacttttactttttatttctcctctctggatcttcctcttcaaagctcaaggccattagggtttatctgagctccaaaatcaccctaattctagtgtatttctcagcaagcaagcttcttctttttttgtcctgggtaagcctttgttccttcaatttatcgccagcttcttctttatctcttaccttttcttctttgcacgcctccattagcactttatttatttttcttctgtaaccctctctttgatttgctttaattcatgagatttggggaccgtattcagggttttttttgggtgggtttctctgatttttttttcctttttcagacctttcattatctctatgtggtcacttaaggtctctgcagtttcaattcaaaaatttagtttaaaaaaaaaaaaaatctgggtgtgtgttcattagctagctcctctttgttcactcattggctctctatgatttgacatttaagattattgctgcatttaattgtgctaaatcgattctgcactcatgcttcagctactgttctttgtgtccctgtaaatttaagtttttgagatctgaaactataagaaattttccgattttggttctcattagttgttagatctcttatctcactcgaagcttctttttttacgcggtttgatttattaatttcgttacttctctgtaaattctcgatctttagggttcttctcatcccctggtttaataatgggtccaatctcagttcttgttcactctaattttactttcacaatatctccaattacgcagatgctttttgacaaattttctccattaaaagtgtcttcttttttagctgtattaaatttataggtctctctatctgtactggtatagggttcatgattgagtctacaaaaacataatgaatgacctaaaagctattaactttcgtttctagatctgcttgcttctctttaatatcttcacctcattgctctaatagacattaatctccatttgaagttagtattcttttaccagttttactgatttttctttttcattcaggtaactgtgattgttgcaggatcttgtgtagaaacagatcacaagaagatgaatgataactcggtggtgcggctttgattatcttcagagattttagattctgtatccactctgttgcgatggggtcgtttgcaggcgcttgtgagattgtggaagagaaggatgatgaagtaagattgccaaaacattccgggagatatggtaaatcggttatgggatcatcaagtaaggatttggtggagcgtaagcaacgagagtatcatggttctcttgagtatgacattgatatgctttttcagtctatttctgttaaaccatctactacgaggttgatgagttcttctttccatcatcatgagacgagcgcgagtgccggtccaagcaggaccacaagcccttcgaagagaattgcgtccatgaaaaaaccagggacacctcagtctcctagatttgttggtctctctgattcagtttctttgaagcaggctcttagggatcgttgcatttctaaggcgtcggaaatggctgctcagaaacggttgtcgaaatctgctgctgcatctccgagggtctcagaagctgacaggataaagagtttgtataaccaagtttcgaatgaatctactagcagcaggtctgggcttgttcctgtggacaagggtaaaggaagtttggttgagatacctttgatgcctgtaaacgataaaccaagctcttcaaagagcgtacctcaacggtttgaagatccttctaaccccatttctgagccatctcaagctggaaccagttttggattacaaggagtggggaatcaaacgcgggagattaagctgttgcatagatccaacaaacctgggtcttgtcttagttctggcagtggagattatgagatagagttagatgaaaatgttgcgtctccttccactcatgcatttgttgaagatgatgtgatagaaatagacaaacacgttacttcactgccatctcactctagcaagaaagtcaatgcgacggagcttgacaagaatatttcctcatctgctgtagactcagagcagaaagggaagttggatgatgcacctaattcagggacagagaatggcaaaacagtacggaaggtaacaagaatgattccacgtcccaaacaaccgaaaaagaaaattttgcttaagaagaagttaaaaatcggggttgtgtcagcaacttacccaacaaaagacgatgaagaaattgttccttccttggactctagtgccaatcaacttctctgccagagatgtcactgttcgttgaagagcaccagcatcgatgacaacccaccttcatatacttctagtcataatcctaagatttgcacagatagtttgagctctgtttcaaataaagaagctcatcaaggatctgacgagaactcctctggctcgtgtaatgtcagtcaaagctctgaagctgacattgtcataatgaaacaagatgtttcctctagcaataatagtggaatcggtgcaatggtagaaaaagaaaccgagaatccgacttccagtgagaaattcgagttctctctgagttcaaaagatagtcttggggattatagcaggagcacaagcattagtgaggagagtaatctgagccgatttagctgtgggaataagcctcacatgtcgatggatgtgagatgggaagcgattaagcatatcaaggttcaatacggctctttgggtttacgacacttcaaccttctgaagaaacttggttgtggagatataggaacagtctatctcgccgagctgattggtacaaactgtttgtttgccataaaggttatggacaacgagttcttggcgagaaggaaaaagtctccccgggcacaagcagaaagagaaatacttaaaatgttggaccatccttttcttcctacattatacgcgcaatttacttcggataatttatcttgtctagtcatggaatattgtcctggaggagatcttcatgtcctcagacagaagcagctaggccggtgtttccctgaacctgcagcaaggtaaagatttaccttttccatttcgtgtctagcttatttaatgtactgaaaattgattgtaaaaatttgtttctgtagattctatgtggccgaaattctccttgcactggagtacttacacatgcttggtatcatataccgagatctgaaaccggaaaacattcttgtccgtgaagatggacacattatgcttacggattttgacctctcactccgttgtgcagtgaacccgactcttgtcaggtcaaactctccacctggtaaagatcccgcaaggatttcaggtccatacaacacatccaactgcatacaaccattctgtatcaccgaaccatcttgccaggtttcgtgtttcagccctaggctctcctcaaaccaacaacaaggtagaaaaccaaaaaggggtgatcatctttcgaaaacccaacaacacttgagtagatcattgcctcagctcgtggctgaaccaaccgaagcaagatccaattcctttgtgggaacacacgagtacctagccccagagatcatcaaaggagaaggacatggcgctgcagttgactggtggactttcggggttctcctttacgagcttttatacgggaaaacaccattcaaaggttacaacaacgacgagactttggccaatgttgtgttacagaacctcaagtttcctgatagcccgcttgtaagcttccaggcaaaagacttgatcaggggacttcttgttaaggaaccagagaacaggctcgggtcagagaaaggttctgtagagatcaaaagacatcctttttttgaaggattgaattgggctctgatccggtgtgcaatcccgcctgagctaccggatttctatgagtatggtggtggaccagaggcagcggcggattcgcctggaggcagtaataataggtatcttgaatgtaaagccataggcgatcatcttgagttcgagttgttttaagcaagacatagatattctctggtataagcattcagagtaatcgttgttgtaagttattatatctaagttaaatctaaatgtcttatatgtaaatttagcgttctctgagacataatctgatatagtattctcaaaaatatatatgctccttcgtatctcaatttttaaatatatgatcaaacattacaatcttagtagacactaatctacaaaaccaaaagattacaaacacttttcttcaatgaaagacttgagttgagattcccatctgatgaagaacacttgacgtcgaagaagctgacctcaaagcctcagctaatggtccacccatattgtggtggttccctacattgctccaccaattcaattgctccctctcattgttgttgtttctcaggttctcttcttctttttcttcttcattgcttgttgaaagttttagagaaacatctgaggaagcgttactattaccgggcacggagattgagatatgacaagtggatgagctcattggactggaggtagagcccaatgatgattcgcctagcccgcctaaacccgcctaatgaccgtgtaatccacttaatgtctgcatagtccgccaaatcttcctcaccgcctaatagaatcgattttaagaaagtcgaagcggtacatgaacgcctagcacctaggggatgcctagacggctgcgtaacccgctttcttgaataccgcctagttgtaattgcacatttttgggtgtatatcaatttttttccagcaaaattaggcagttgcacctatcacctatgtctcaccctactgggccgggcctgaataatttatgttacaaagattgcaatttgcaaacattaaaagaagaaaagcccaaaaaggacatctttgatcatcagattggctccactttaattacgaaattgatttctttatttttccttttttacttttccttttggcgggactgcttgctttgattttggaatgatgtaaaagcaaagcaattatgtttgggaaggtttaagcaaaagcaaaagacaagtgaaagtaaataaatagatattgagagagacatagagactgttgtaacaagaaaaaaaaatgagtagcaagaataactccggagctgctgcagtttctggagtcaacaccaacggtaagctaccaatggaggacaatgaagaagaagagatatggaaagttgcagtgacgaggtttcaagcccgagaagaagagatcgagaggaagaagatgactgttaaggaaaaagttcaacagcggctcggttttgcagaggaagctacaagatgcttaactcaaacattggaagtaagtttataaaaagccttttgtgtaacatggtagacaacaaagctaataatgttcttactaaaacaggagctagagattatgggagatcctatgagaaaagaagttggtatggtgaggaagaaaatcgacatggcgaatcgagatatcaaatctttggcacaaagctgtcagaaaaaggtattacacattttcattttcaggaaaagctggcagctttgttttaacacaagaggataatttgacaggagaaggaatacaaagacacattggaagctttcaatgaaaagaacaaagagaaagctcaccttgtttccatgttaatggaggtatttagtctaaaccacttaaaagctttgtaaaatttctactgaagatccaatgtgtgatttgtgacgatgattttcttttggcagctactggctgaaagtgaaagattaaggataaagaaactggaggaaatcaacaagactgttggaaccttgcaatgaggagaagcaatctacatggatcttaccttaaaagagagtgaaaatttgtttaagtttttggtattacactctatccaggtcctcctattaaaagtgagctacgatgtaacaggatgtacgataaatgaatggtgctaaggtttaaagatatgaatgcagcgaaaaacgaatttcttaaaagatgcaagatgtctttgtacacatagataatgtcaaaacaaatcaagcatcattatattcatatatccgaaactagcggcttccctattttgtcattacccgtttccttttactctgctggctcagtgtttacatacctgttcgcgtaatctaaatactcctgcaagtaacaaacaatcaaacataaaaattatcaagaaggaaatacaagaacagattccattggtctttaaatgaatattagtaaccttacctgaagtataactactgcggctaacttgtccaacattgtcttctcttgaacaggatgcaaattcaagggcttcaacatcagttcaacggtctgttgacagtattacatgagattcaagggatattaaacttaacacctatctttactgtgacttacaagatctttaaatctgaaaaatatatacctttgatgataatcgctcgtcccaatatgtgtatttcacatccttgagtttttcggtcttacgaagttcctcaatgaaaagattcacagtgacaacctgttccaagtttaaaaatccttttcggttatatgagctaatgtagaggaaaagtacttcacaattcagtcgaaacaaaaaaaaaaacttacatcctctacattgttcagtttgccaaatggataaccaacgactaatcccgacacagaaaatgctttgacctgcataagacaacaaaaggcaaatgattgatgtaatcaaacagagttcataagtctacttgttgatagatctctactacgtcaaggacttaacagtaaacactaactgaataaaccttgatcctttaatcaccagtaaggcagtaatcacaaaaagccgagggtgaaagtagacactaatctactacactaacaaactttcttcttcattaccaaaacaaacgatagtttcttcattccttatcttagtaaacactaatctacactagcaaccttttttctttgttttaaaaaacactaagaaatgatagtttctccatttcttaacaagaactaaaatctgtgtatttgtttaaggtctcctttaaatctagagctaaaaagtaaaggaacgatcaaacttatagcacctaccaggttctggaaatctgtagccatcaggtcaatgtttgatttctttctgagcaaaacactgcaagagaagtaacaggttttcaatagcgatgatggtgacaaaattgatcagagaggatttgcatttttgaaaattactgttaaacaaatgttgtagcatgtagacactgaatcaaaggtacctcaatggagaagcaaccatatttgaaggatctgagatagctaatccaacatacttatcaccaacatctaaacccagaaaccgaccagggactgacactttggtcttcagcgcattacccaataagctcaatggcttcacatacttcatttcctgatcaaaagtaagtgaatcaaacttccaaaacacttgttcaaatcaagactaaaaattcacatatcaattgcataaatttgagaattattgtacaaaaaaaactttaatcagaccatcaaacaaacatttcgaaaaagggttttagaaattaatcagaaagtttaaatcttgacgtactttaaaggcggaaactttctggctccggagcacggaatctggcgagaggaaacgacaaatggttctgctaaatgtcttcgcgattgaagcaagcaagcacaaaccccaagattgtgaattagagatggaccggaaaaggtttattccggttaagttcgagacttcaccgtctaatcaatctatacgatgccggtgattatcagggttttggttttacattataccgggaaccggttaattcgaggtggtttaactggtttcccaaaattgattcggtttagcttaagtgaaaagctcaagtaaccacctctcctgtacttacttgcaggcagaggatcatattagtttcattgcttatacaaaattgtcaagctttaaacataaatataatagcagagtaaggaacaaaacaattccaaaagcagaactcacaattccaaaagaagacaaattcaaagattattttctgcagaaaataaagattcaaagagcacaaaccaaaaagattacaaacacttttctttaatgaaaaacttgagtagagattcccatctgatgaagaacacttgacgtcgaagaagctgacctcaaagcctcagctaatggtcctcccatattgttgtggtgattccctccattgctccaccaattcatttgctccctctcattgttgttatttctcatgttctcttcttcttcttcattgcctgtggaaagttttagagaaacatctgaggacgtgttgttaccgggcatggagattgaaagatgacaagtggatgagctcattggactggaggtagagtctgatgatcgtggccaatcgtcaaagaaatgcctcaagatgtgaccatcgtctgatcttccattgctgaatccactgttagcttcatatggcctcttgttgttgttgctttcttgtttcatctctgaagaacaactgtgacagagaggaataaacataaacataaacattgtcaacaaaaagatccaacatttgaacaataataagtagactgatcaattcaacaaaatggttagagaaataatttaatcagtcaaatgtgtgtgttaataagaggaagtggttgcagaatctgagagctttattttgtttggcttctatgcaggtttggtcagctttcactgaggtcctaccatgtcattatttcaaatacaacataagtatacatatctctttaactttctctctcttttctatttctatgattgaaaagtctcacccaactagtaaataaaattagattctatcaaatccaactgttatcattatctctcaacaaaagaaagaataatgtttttatcacaaagtatgtatgataagtctctcttgtcaccctattgccaacattacccctttcttcacagcattacttcacagtgaaatcactatttccctaacaacaatatttgtaattaaccaaatctactaatgactttaattaaacagagtgtttgtgtttttttattgtacctttgttgatgactaaggtggagaggttgagatgaaccagaggagaagaagtggttgttgtttggtccatgaccaagctcctcacctaagacaaaagaagatgcggttgttgtggctgtcgttgtgatggtggttgtggcggtttccacaggctttcttgaacggtttcttccacggtgaatgtggcggtcacaatacttgtggcccgctacaacatcccttgaacatctccatttcttgccgtcagttctcttacacctccctggctcaggatccattgctcctcttccccaataccctgttttttattaagtgtgtgttgttcattagtaacaacaaacataaatctcactcaagacattggttacgaaatgtacttgtctgattctatctatgttgctaatagatcttctagaaataggcttatcatacacatagggttttaactccttgcaaggttgcagagcagccttatacttattttagatcttggaaatataactccaacaccaaaacaaagggaatcttttttacaaagaaagactatttcaaggataagagaagcataaacaatagagaggagagagagactgacaagaaggttggtgatgaggaaaactatgttgaagaggatggtgaaggaaatgcataggagattgatggaggagacttttcttaataggtaagagaagctcttgaggaacagaagcaccagccaacatgtatctatagatcagtgcttgtagctcaagttcttgccactgtgcccagctgaagaagtttcccatctctacatatatatgtaacatagaaacgtcagattaaatatcagcaaaaacaacttcaacattagagtgaataagtcttgtccttttaaaacaacttactgaggaacctggaagaagaagaagaattagaagagtcaggagagaagcaagagaaagaagaggaagaagtgggttcagggacaaagagaggaagaggagccgcagcagcagaagtagcagtttgggactgaatctgatcaaagaaaaagtttgatatcttagttgcagcagagccttgttcttctgactcattctgctgctgacttctccattgtttcagttgcaagtccatggaacaaagagagagtgagtgagagagagagaaagagagacagacagagaaatgtgttggttgcttttgggatagtttttttaccctcacttcttttgtttttagagagtctggcttaataagcaaagacaaccacaacaaaagtcttatttgtttggcttgtcatgtaaatacccaaaataaaaaactttttcttcttcactcttttgttagagagagctagagaaaagtgtttagactatgagacaagacagttgataggataaacaaaattagtatataatatttgattgataggtttaataaattgttactttatgtgatataaaaattatgtaagtcagaaaacaaagagagaaagcactgcaagatgcagatggagagatagtaacctgcagtgtttatgtctcactgccttggaaatatcacttcctttttttacctcattttaatattccttaagtaggttaaaaagatgcctattatgatattgttattatgtttttttattaaggattcatttaatgtgatgtagagtaaccttcaatttttgtcttacagatgtcatttgtctcagagattgtgttacaaatgtatgagattctaacttctaagcatgattaatcatttgggttttgactaaatagtctccatttgcagagagctacaatacaatctcagctctatttactctctttggttagtaagttttccaaatactttaccattttagtggtttaaccatatttgtcttttaatttgtaaccgtcattacttttctcatctgttacaatattattgttactcataaaatattatgtaacgtctgtgtttgtttgatttattaaaaaaaaattataacttccttatataaatgtagaaatggacatttatctttgtgttatcttaaaaagacatggctagctagtagtatatgtacatatctaaacacatcgaaaggagggaatcatattattaccagaaaaggccaagtaaacttggaaacatttgttaaaatgaagttagaaacatttatttgatatcttcacttggctgaataatacaaaagacatttatgattttcaaagtatctttatttggtggtgccaaaacaaaaaacgatagcattattttgtagttttgaggaaataaagtaataaatatgagaaggacgataacgatatttcatgtaggagtgagccacaaccaaagactatgatgactattgagagagtttcttgagttttcttttcattcattcccaccagtttcggcggcatttatatttgcactaagaaaaatataagaaaaactcaattccttaagtacagttcaatgttatgtacacttcatttgctgtaaatcttgtgaaccaaataaaaaagaagaggaatatcataacataacacccaaaataaactttgttttcaaaatataccataggttctttttgactttgtaaaattttcctttttgaaaaacaaaaatctttgtaacaagtataaagcggcaactgaatttaataaacattttacgtttttttttttagaatagaaaaaatatttcgcaaatggcctaaacaaaatattagcctctaaaatagaaatattttttgttgatacttgatagtataatggatcttgtgcactaatgatgggtcttaactaataaagtaataatggatcctgtgcactaatattttgggccagaacttgtcatataccaaagataatgatatcgaaggaaaacaaactgaaagcaaagtgtgaacgtaatgacatattgtatgtcttttttcaatcatgaacacgaacaaagattacatgcagatgcagtaatactaatggtaacaaaacaaccaaacaaatgttgattatctagactaactttatatatatcttgtttaaactttaacctacatggttattaggttatacatggtaaatgcattagtttaaattaccatactacatacatttttatatgttgctcatgttccaattgtttcgtaaaaccaaataaaatgacagaaaatatatagtattattcagtggacaagggttgggtcacgtgctaagattaagaccagatgagatcagaagagggcccggcccaaactctccacctactcacatagatttgaaaatcacgggagctgatccgaaccgagccgagctggagtaaagatggagccggacaacgaaatcataatctgaggaggctctctctttagtttccgacgagggcacagactgtgggtctcactatgtaatgtgagataccaaatatattcttttcactttttgaccaaaagttaccgtctgtttacgcactatgccatttacgttcacttacgatgggccgtaaataaaaagcctagtcacgctagcacgcgaggcctcacgtgccttaattattttcttaatgggcttcgtatattcctttaggaatgattcttatgggcttcttaaactctacgtttagcagtacaccaacaaaaaccgaaataagcaaacctcttagcagacctctaatttcttaatgtgcttattatattcaatttggaatgattcttgtggccttctttaactctatgtttaacaccaacaaaaatgttgtaagacttgatgtataatttgaccaatattttagtttcaacattattttgattctcctagtcagttgatattcgattataagcagagaagacacatgatctaaagtctaaaccaaaaaaagtcaagttaattagaagatgataataaaaccttcattttgacccactctttattgtaaacatgctacaatatatgttattgaaaccattagtcatatcgattgacaaaatacaacatatgcaatactatacaagaaataacataaatgtgacggcaaacgtagaataaattaatttgaagaacatgagagtcgttaccattcctcgaggatctgcttttaggcccactgttggattgaccctaccatgagatatctcgacgattctcaatccaagccgtacatttgtatgagtgttacgacgaatttatgtttggtcccctatcgccaccggttcttctctgtagcactaacgatcaatcatcatgccttttgttttaggtaatcatctatatgcttttatttggaaatcatttttgttatgttattctattttaattcagtactcaatatgaaaatttccaatctgtaaagttgttttttattgacctcgctcacaatatatccatgaataccttgtattgagaattcattttgtcatatgaatatggatatactcactgcaactctatctgtaacaatgtgaaaacaggtgtaaataaaggaatttccatagttagaatagattgagatagtatattttagcggcctataatgatttcataagctttttgttctcttaaatgtcttttatttttgtttgcatctttgaagctgtctcgggagtaagtagaaagataataaatgctgctcatatatatgattgggcagctatggttggcattttgccttttgaaattcagtaaagtgaaaacaaactcgttaaccatctcacgtatatgcttttctaaatttgttatatatattcgatcagattttaaattgcatgcatatgatcgcattattgtattgatagtctatcatcatatgctttttgtaatctatatatacatttttgcaattattttctgaaataaatcttcaagttggaacttatttacaaggaatatcattaacattaattatcatcaattaattaatatttttaattattagcatttccttatctaatatatctccatcaattctaattacttttaaaaaaaaaattagaactttattaatattatattttattaaagataaatattatagttatttaaagtttagaaaatatttagaatattttaacgaaaaaacgtttagaatatatattatatatgaaatctataaaattaaataactattagggacaatgtcccacatcggaagttgagtaggatcttaagtggtatatataagatatgggcctctcctcctattgccaattggttttaggttggaagcccacagtctaatatggtagcagagcccggtccgcacatactcaacccgatccacatcgggccggcccaatacttggcccgccgatccatgcccaaacatatcgagatcaatggctagaagagccatcatctcgagggggcgtattagggacaatgtcccacatcggaagttgagtaggatcttaagtggtatatataagatatgggcctctccacctattgccaattggttttaggttggaagcccacagtctaataataactatttcaaaagaaaacttttaaattgatttgaattataaatcttttaataaaaatattattagaacaaaaaataataatgtttaattttaccgaactggattaaatggtgggacatgtttaaaatattataatgtatggattttgtaacaattaaataaccatttgaaataaaattttaaattaatttaaattatatatcttttaaattaaagtattatttaaacaaaaataacaaaaacaaaatgtttaatttcactagacggggttagatgataggacgggtttgggtcgacagtaatacgagacggtatagcacgggtgaaatccattagatatgtttagtttcacggaacgggattagatggtaggacgggtttgagtcgatagtaatatgaaacggtataccacgtgtgaagtcgtagatataacaatcaaaatataattatattatcttaaatactaaacaaaacaattataaaataaaaatataattaaattttaaattatttagttataatctagattttaacttaatgaactgtacgttattgttcttatattttaaacagtaaaagttaaacatagtaattgtatactaaataatatacagatataagagttgtacattcagaaaatacaaaatattaaatcatatatatttttaatcgactaaacaaattatatttttattcttaaaagaacaaaatagttctgcggtgtacggtgtaccgcgagttaaaacctagtgtgttatatgatgataattgaagaagcctgaacggtgaatccgatccttaaaactagaccagagttagattggcacattgtgacaacactaacataaatcattatacattatctcgttaactaattgtttatttatgattacattctgtcatcgcattattattgttatgatgaagctgtaaattagtcttgatagtatcattagtatactaaaaactataaagtatctacacatttggcttttactttacagccgtcatctttttttgaaagatggatattggattcatttaaaattcgagaaaaacgccaagtggcaagccaaaaacttccaaatgaaaatactttagaaaacaccaaaatttgcatctacaattgaatgattcacgttcaaaagaaccattaaatgagtcctgaaattgaccgttaccgtattaatgtcaaaagaccagacgacaaaaatcaatacttagaaattaattagaatctttcatattattaaaaagaaatcgacgagaaaaagttaaacctaaatattaaagaacctttttttcaatctcctttgtttaagtattaaaatatacaaagttaaacctaaatatttgtaactactactaagcaactaataaaacatcaaattaaatcataaaataccctttttcaaatatgttaaaaaatcaaaacctccttgaatattcgcatccaaaccaaggattcacattcaaaaattcctcgtatcaattatcattcgcatatatatccaaacaaacccccaaatatataggattagatcaaggctaataatttgaaccaaacatttttttttgtattttgttgtatataaaaagagaaaaacaatctctagacgacacgtaattaaaagtgtattgttttgagaaatattatacgaacttaacggatacgtaaaacaaaccattaaataataaacccaaaaacagaaaagagagtgagaaagcaaacaaaatataaaagagtgagaagaagaggacagagagaagaaaccattaccacacatacagagagaaacaaacccactccattaaaaaccaaagctttaagcttagattcaatcccaagtcagtaaaaatagggttaatcgaagaaccccaccggaattccactgaggaattgcatcagtcgcgttcttgttgcggcttgaggaagaaaaagaacacctacactaaccaaaacaagaacaaggacgaattgaaaccgaagatgacaacaacgaatgaagctactacacagcctcctcagcagatgatgagcttgagttttagtagtcagatgtctaaagaagacgaagagatggctcgttctgctctctctgcttttagggctaaagaagatgagattgagaagaggaaaatggaagttcgtgaaagggttaaggctcagcttggtcgtgttgaggaagagactcgtcgtcttgctagtatccgcgaggtttgttttcattttttgctttttaaagtccaaaactttaagatctgagagattttgttttgagcttggtctgaaaattacactcatgcaagttgactactttctgtgtgtttgtcttttttctgaattgaattttgatactgtttatgtggttttagaatattagggttttgaaagatgtgaaattgtagatttggactcaggggatagggaaaatgggatttttttgtcctttttaagaaatttgatgatttgtgaatgatttatacagaaatggtttagctttgtaagcatatgattttgcatgtactcaatttggtgaacaaagaacaaaaatttgtgttttgagtaaatgggttttgtaagtctattgatatgtgaaagctaggatttggacatgaacttgtgcttcttgtagttgggtttacaagttctgttatcaggaaggtgtttaactttgtagaaattatcatgtttttgtttcaggagcttgagacaatggcagatcccatgaggaaggaagttaattgggtgcgtaagaagattgatagcgtcaacaaagaactcaaaccattaggctctactgttcaaaagaaggtaagtacacttgtcaaagagcagttgcttcattctcactacctgttgctatgaaaagttttgctctttaccaaacccaaaactcaaacctaaatgtcaactgaatcgatttgtggttgttatggtgttgactaaaagatttgatatcgcattagtcaactttaaagatttgtttttcaatgaacaaaacctgaaactcatgtttttgttttatgtgatgatatgacaacaggaaagggaatacaaagaagcattggatacgttcaacgagaagaatcgtgagaaagttcagctgatcaccaagctaatggaggttagtttcgagttgttggttatagttttgctgaacaatgagaacaaatccgagttttaccgcgcttattaataactgtattgatttgttttatgtttgcttaatattctccctggggagatgggacagttggttggagaaagcgagaagctgaggttgaagaagctggatgagctaagcaggagcatagacacagagagtgaatctatctcacaagacaagaccataccaatcaagaactaatttggtgtattttttctattttatttttacgttttggaatgttttcttagtttctgggtgttttagttttcttttgctatgatttgtgggttgatttgtaaaattatgatggggtttttcgtgtttttgattaaccattattgttagggaagggaaatgggataatgcttcttctgcttaggctactgaatgctaaaagggtttgtaagtttgaatttttttcttgctttgttttttctaatattattttatttgttatattgtttagctttattttaatttcttttcccccccaaattatgtttagctttttgagaaagtagcctctcgccgtcgagcgtgtgtggtgggtgttttgaaattgaaacgacttcttcttgtcaaagtaaatcatgaccttgacccacacaatagactcgataaattccaattattgttttcaaagacaaaaatgtaaaatgatattttagtaaaatggaaagaaaaacacttaacaaaatgggaaagatatgatatttggttgtaagatcttcaagtattcccattttccaaatattgttttcctaatctagcaaattccttattctttgaattacactaaattattcaatcgagctggtaagatagaaatattcgatcgtacaaaacacagcaatgtgctaatctacaaactatttggtagacatgatctggaaagcaaatgcttttttatttatgatattcagtggagaaccaatttagtatactttcatacagtaggccctttgaggcccatcttacacataaacagaatatcataaattagctgtgtattctcattacagcatttggcaataagctggcttttggaatgcttttgaagacaatgaaaacacactacagtcttgttcatattcttgtgtctgcaaattaattgagaaagtgtataactttcctatgtttctgaatcttgttcgaggctcctttcagcttatggttgtagcctcatatagcaattatgctctcacatactagtcatattgttgaaaaaatgaaacaggaacgcttggttcatactcttcatagacagatttttatgtgtttaaaagacgagatttcatatacgaatcagagaaccaaatacaataatttaggctcaagaagcggtaaatcaacagaaactgattttcaaattccacaagaggttcaacagaaataacctcaaatgacttttttatttgggcgtgtttttaaaatactcaattctaaaaaacaaaacccaatcaaaatcaaaacacaaatccaaaaggaaaatgaagaaaaaacacttataatccgataatgtcaagtagaaaaacgaaaaatccctagaaatatatccaggaagatgacaaacgtcacaattcaacccgtggacgatgctcagtacttgtaatccttcacgtgaaggctctcagctgctccatcaccaagcttagcgtcacccttgtaggttccgagtgtggcttcagagttagccttgcacctcacatacaacgcctcttgagctgccttgacattctcctctttacctgcccatgtcttcaaggtagactgctgcaacgcacgtccgaatgagaaagacaatgaccatggcttcttggtcttcaactggttcatggcgttcaagttcctggtagcttcttcctcgctctgtcctccagataagaagacaatggctggaacagctgctgggacggttctctgaagggcacggacggtgtgctcagcgatgacttcaggtgaaaccttggggctgtcagatccgggagtaaccatgttaggcttcaagagtgtaccctcgagcaagacgtggtggtcgctaagagccttgtagcaagctgcaaggacacgctcagtcacggcagcacacttctggatgtcatgggatccatcgactaggatctcaggctcgacaattggtacaagaccgttctcttggcagataacagcgtatctagctaatccgtaagcgttctcatgaatggaatgctcagatggctcgttctctccgatcttgaggactgcacgccacttggcgaaacgagcaccagcttcgtagtacttcttgcatctgtcaccgagaccgtcaagaccttgagtggtggtctcaccgtcggttccagctagctcaacggtacccttgtcaaccttgataccgggaagaactcctccttccttcaagatatcaacgaaaagcttacctgtacaaagaaaacatcatcatcaataaaaaacaatcacaaaaccacattacagagtaaaacattaagtaatagtattgatcaagttcataccatcggaactcttttggtacagagtctcttcgaaaaggatgacaccactgaggcatggaagagcaccaggggcggtgaagagaagctcacggaggttacgtctgttggtctcaacgttctcgacgttgatgctcgcaagacgctttccaatggtaccagtggactcatcagcagccaaaataccttttccaggtgtgccgatgtaggcagcgttggcgatcaactcatctatataggtttcaaaaatggaaaaacttaaatcaatcaatcaccataagagaacaacaacagaaaaagttccagatcgtgaatactaattagatccgtattaaaaccgatgagaacatagttagatctacgctagtttttaacataggaatcatcgactgattcatttcagctttcgaaaccaagctaagttcacgaatcaactagatctatacgattaaacacgctaataagaatcaaaacacgggataacgaatcgaatccaatacacgaatctaaacatgaataaagaacttaagagagatagagatcgagatcttaccggcgaatttgcttgtgaaggcagacatagttggacggagagatcgagaaatcagagagaaatgaaaagagatgcggaagaaggcagacgagtggtggaccagtagaggaaaagggttggttttatagctgcggatgagagtctattggttggtgaaaatattaattaagggtcagatctttgcatgttccccaagaaatagctttttcagccgttggatctctaattggcaatgttggctaatcttaattctaccccttaatagcgtggattctcagcaaattagctgaggggtaatttggtaactcgtagtgttatttaaggaaaagcatgacttcggccttacgacggcccaaaccgtcagacgaattgtataattgagatcgtaagataataaattacattaatcattgattatagtagttttttaatcgtaataaacacttaatagttgactacgaatctcaatagaatattcttattggaaatgttatgtgtttctagattcacagaaaaagtgcgactttgatatctccgaacatagaaaattaagatcttagatttagatagagacatataaccggaaaacagctgcgactcttcaaacgcatgaataatcaaaaactatcaaagtcttttgctttctaccgacacagtatgtatgtagtctagaacttttttgttgctattgttgttgtatacattttgaagttttaaaggtgtcttttaggatcttcaatggttttattgtttcttatcttttaggttcaagtgattataaaatgaaacatcttattattataacaaattatgagatttttacacgtattttcaacatttttttaatatgtgtatataattttttaataaaacctcgttgacaaataaataaattttaaaaaactctatgacatactaaaaataaaatatgattataaatggaaacaactgttacgatatgccataatatcttaagaaagaaactgatatagaacatacaatatttaaaaagaaaataggggaaaagaaggaaatatactaaaaagacaaagaatatatgtatattgacatgtaaatagaaacacggatgtgtatggtccatttaaattgtctccaagtcgattaagatggtacatctagaaacttcgtaatcgtcaatttctatttttgtgataattttccattttctcctataaacatatccatcagcattatcatttatcaacaccactctgttcctctattagtatttttctcagttttacataagtacaatattactttatcatgacattttacatcaaacaaatgtcttttgtaaaatctctggtttttaaacaacccaaaaaataaaatccgaaaatgctgatatcaatgctaaaataataataaggactgaagttattctcaaacgtgtactacaaagtttcactcgagcattgctaaaataaaacaagattatgaaaaaataagacacaagaggatgaatctgaaaggattcatgacttggctcttggcacatctaataaacataaggaagtattctccaggggacaagtctaagatactctgcccatatctccttgtacttctctgcacatcgaacctcgtctcttcgttctctccatatcaatagtatcagaaggtatatcgggtagaaatatggaaccggagaactgagaatacacaagacaaaatatcataaaaacagctttgggaaatgaacttgaaagctttagacttttcaaatgatggttagagatcaatatctttaagtcagccaaatcaacttcgaacgttttgatattggtattagtttctacatgacttttggtagctgtaagatgaactcaagcagaagaagttaccttattccacatggcaaactgaaggacagagcaagcatcaagtcgccaaggtaattacagtgccttgcaattcccctgtcatatatacaaaacagcacctaagttatcggaaatgtgtcattgcggaactttcaactctttattcccagcatgatgaacaatcaaacacagagatggcgaaaccaagcaaagaaacaagagaagataaatataacataccaatagcctgaaaccagtaactttccaccaactaccactggaggcttgccccatattggtgtttttgggttcttcttaaagatatgtttttgtttgttagctcctcgaaaaaccatgtacctgccaaagaagaaatagtgggtttcttagtgtagatatgtaagaatggaaaataacccaatgtctcagaacttaccctatcaagaagacaaggcaattgactacaatcgcaggaactgttagttctactttgttgtgcaaaagccaccagccctgtaccagagagaagacaattcagtcacagagtgatcaagcattctagaacaatattgtttccgagaataactgtaacatgccaagaagatactgtcaataagataaattaatatcttgtttgtgttcaggctcacagttacatgcctgaatgctaaaagtgaaaggaatccacaggagatctccaaacactagcatgaagcctagtctctctgcaattatgtcccacctgaaaagagtaaaatcaaagtagatgtaataatgcaaatggtcattttttggtaagacaaatgtgtttccttaacacgccatgaacttacgtagaggtcatgtattcttcatgaacaaagtagtccaatatatataactgcaattataaaactaatcaaaactaacaaaacacagatgatcataacttcaagaagcaagatttgtaagtaaaaaccaaatttaccgcacagaagatctggtaaagaatcatcgactgactcaaggaaccatcctgcacactttttgccagaatagagagattgataagcagccatcccatcatcccggctctgacaaagaaaaacctacacaaggaataactcccattcatcataaccatgcataactgctgattacattattaaactgccactcgattgagtacggagcaaactgaagcaatgatgtagccttggctgacaaatagaagaaaaaacagaaaaatggattacttgagatcaatgctcataaactgaggattcagctgtattccaaaccacctatcacatgaaacaaacaatatgagaaaaaattgaagcagttgtttggaagagataagtgaaagacaaaaaccagaacttctagtttcagtagaaaagttcaaaagctaaagtcactgcggttaaaaggaaaaaagaggaagctacaaccgttctaggagaaattactcaacactctacgaagttctatagaatcatcttgtccaattcagtgtttcaaactctatatagtaccagattatttcttagttttgctcttgcaggagtcaaaatatataacttttaacaacattttgtgtaacaagaaagtatcagatctacaattgtattatgttagtaccagtcatgtacaagatttcctgagacatgaggctttagggaagaacccttattcgaggaacttcgcccagtaacatacaatgctaatgtcacctgagaatattaagagatatcatggagattacaaatcacaccaccaaaagcaaatctgatggtaacacaactaaaatcaagacaccggactaaggattgaatcatcttaccaaaacacagaaaataaaagtagctgagagtaactcaagtcctctatccgcaaccacctacaaaacatctcagtggaatgagtgtgagaaagcaattgcaatcggattcatatagcatatagcattcggattcatagaaatacaatcgaaatcttgtaactacacttacaagaggtgatacaatgccaagttttgcacagattcccaaaatagctaccaacaatattagtgccaatagacctgaaattgaattaacaaaactaatggaaatgaactttcgagctcacagactctcaggaattgtagagagagtaaatcaaatcaaatataccattgcatcggtaacgaagttgagagccatctgataaaaggacgccgcgaataactttcccggggagaatttctccggcaacggccaagtaaacgaagtaaaacaccagcacataaacctaaaatctcggaacgaatttaacaaaagctgatcaaaagcgaacaaaaatttcacaataacaattgcaacagtcaaaagctaaagagacagctcacagattgcaatgatggaagaagaacaccgagatccatatctagcagcattaagcagaagaaggattttcaaaggagaagatgaagcattcgaaatcgtttgtatcgccttttctcgctttgtttaatttcagatgacagaagcaacaattttcaattttttagtgggaagctcgtggactctgatgagctagctcacttgtgtgattcgggaaaattaccaaaaagaacccttaaactcttcatttgttgcaagtaaagccttaaactaatgattgtttatacaaaaaaaaccaatcactaaattctgccaagcacaacttgagcctatggcccatgggatggcctggccagtctcgcaaacgactgtcattttaagatagctacatcttttgggtttcttttttaacatctaaattttagattgataggacaatgtctttagagaaaaaggttaatgaatactagtttctcggcaatgcgattgttatgtcttcatgtgtatatcacctcaacactggataagagtttgaaccaaagatggatatatcaaatatctagttttccatctatgtgttctcttttctaccattgatcaagtccacgagttattgatgaaagcctttttccactatggtccatctaaaaccgcagattcacaatgtatgcaaagagtgaaggaagctaaaaccttaggctaaagcttttgtttactattaagatgctgccattacataagggtgccgtaatggttccgaataatccatctcgatctagttctctcactttggtcgatcgcaaaagcttgcatcatggttgcatttgagccatccaaacggaggaggtatctacttggttccattaatcggtgttgttatttccacggatatttttgcattaaacgtctaccttaaaggcttaaacgtacatagaaaaatctgcaccgatcacatttcactaaaatatttttctgtcaaatcacatgttggatggtgtaactggtaagttattaaaagagggaattacatgcgagtccacttgtaacaaacagttgtgaggctcgacggcaagttgaccagaaacaacttgcactgcatctatacaatttttttttgctttattatttgacaatttttccatgtaacccacacaaatcatatttatttgaattaaaaaaattttgtatttatgttagccattaactcttctagatacaagagagaaatgtcatcaaatttcattgtttaaaaagaaagggtgatttatagacatttatcagaaaaaaaaaaaacatttttgcttttacgaattttatagaaagaaatattagtattatatttaacatttttagtcgtcgattataagaaaggaggtggcgaaccaccacacacgcggaaacaggaacaaccaatgaaaactcgataaatggcttaactcaattgttaagagccgtttgttttttggcaacaaaagtgctcgagagagagaccttgaagaagaaagaagaaggtaaaccctaaattcccaatcttcccacataacttctgctcaaatccttagggtttcaagttgtttcatttccctcgtccgttaaattcgaatccttttcgtgtatgttgcatcgtattctcagagcaaatcgtctttattgtgaattgggttttattcagattcgtgctttagatgaaatttcaatagtttttgaattaaaggttgaatttttcatttgcagagacgagtttgatatctaaaggaatcatttttgacggatttaggatctaagtaaaccctagattgaccgaatatgagtactcaagcgacgggtccttcttcaacatcagggaggagaagcaattctactgtacggcgaggaccaccaccttctaagaaaccagtacaatcagagaatggaagtgttaatgggaacacctcaaaacccaattcacctcctcctcaacctcaatctcaagctccttctaatggagagagaacagtgaagaagcttaggttatcgaaagctcttactattcctgaaggaactactgttttcgatgcttgtcgaagaatggctgctaggcgtgttgatgcttgtttgttgactgattcaagtgcgcttctttccgggattgttactgataaagatgtagctacaagagtgattgctgaagggttgagaccggatcaaactttggtctctaaggttatgactaggaatcctatttttgttacttctgattcgttggcgcttgaggctcttcagaagatggttcaagggaagtttagacacttgcctgttgtggagaatggtgaagtcattgctttgttggatattacaaagtgtttgtatgatgctatttctaggatggagaaagctgcagagcaaggtagtgctttagctgctgcagtggaaggtgtggagaagcaatggggaagcggatattctgcaccgtatgctttcattgaaaccttgagggagagaatgtttaaacccgccttgtcaacgattattacagacaattcgaaggttgcacttgtagcaccatcagatcctgtttcagttgctgcgaaaaggatgagggatttgcgggttaactctgtaatcatttccacggggaacaaaatcagtggaatcttgacttcaaaggacattctgatgcgagtggtggcacaaaatttatctcctgaattgactcttgtcgagaaggtaatgacaccgaatcctgaatgtgcatcgctagagacaacgattctggatgcgttgcatacaatgcatgatggaaagtttctacatcttccaattatagataaagatggatcagctgcagcttgtgtagacgttcttcagattactcacgcagctatttcaatggtggagaacagttctggagctgtaaatgatatggcaaacacgatgatgcagaaattttgggattcagctcttgcgttagagccacctgatgattctgacactcaaagtgaaatgtcggcaatgatgcatcattcagatatagggaagctcagttcttacccatctctaggactagggaattcgttttcgttcaaatttgaagaccttaagggccgtgtacatcggtttacttctggagctgaaaacctcgaagagctgatgggtattgtgatgcaaagaattggcagcgacaataacaatgtggaacaacggcctcagattatatatgaggacgatgaaggtgataaggttttgattacatcggatagcgatttggttggtgctgttactcttgctaggtctacaggacaaaaggttttgaggctgcatctggacttcactgagtcaacaaggagcttgagctcagaaaccacccaactcaagaaaggtgattctcgagacagaggaagcggatgggtttcatggcgtggtggtgtggtggttacaggagctgttgtcctaacaagcatagccatagttgtttacttgaagcgttcaaagaactgatttttgctgaagcaaactgtttgggatgcagaacaaaaactctttttctcttaattttttggtaagtttcatacagtttgtctcttgtcttttggggtcacatgttttgcgaatgcaaacagaaaaaaaaacaaaaaactttgtttccctatgatattaaattaatggggaaaaaccttattcagattactctatttgacagagtttatgtaaaacctctgaaaccgggaaaataaatcaagggaatatcattgcactgcagattctggtctttgatataagtgaatatgtgtttgcttccttcttgtgaatgtgtttgtgtcactgttccttagagcgattgttgtgtggatatgagaaagacagaggaacatatggaggaaaacacgtgtgttatctatgaagcttatctatcaatattacatggaatttgtgaatgtgtggttaggttgcatatattaagcaaaccaacaaagaaatcacaatctcgacacaaatatattatagttatgagaggtctccaaacataatgataagaggaagatacaaacgtttattaagaaggttatatttcatatgagtgacatcaaggcaggtttgcccgagaggttaagggggaagacttaagttcttctgcacataagtgcgcgtgggttcgaaccccacagcctgcatttgtatttttttttcatttttctgagacaaaactgagatgtgttttttttcgtccccttaataaatttagttaccatcaaggatttgtgttcaacatttaagaagtcttatgagagatttgtatagaatttataaatcctacatttttaagaagtctcatgaaaacaatttgtggatttgaatttttaatgattttggaggatttcctgtattaaaaatatagaaatctaaatctcatagtttaaggtgagatttgaatagattttacaaaaatcatgaacttccctaaaatcatcaaaatcatttaaatactcaataaaactcaaatcactttaaattctaatttgaatacaccccccttagtgtctattaaattggaacgaatttgagaaacttagaaattaagttcatggtaatctttagatttttaaccatttagctctttccacgtacaatgtatgcttttttgttttcctttctcaaacataactgcatcaactgatttgtagagctaaagtagtgtgtatatactatctataacttaatttatcctatgaagtagaagttgaataaatttataacaaggtaacgatcaaatgtttagaattaggatcccaaccaaggcctctccatgtagcaaaacaaaacataacctaaggacgagtagaatatttcacggtcgatatcactgaaaatcacgtaagacaaattgtataggtaatgcattttgtaaaatcaactctttcattttttctggaagaaaaacaactctttcattaatatgatatttacaatttagcaaaagaaaaaaatggatagttagaataatagacgcatatttcttctcagctatatagtattcgaattgcgttgaaaaatgaattggttttttttatcattattgtcgattgtcatcagccatcactaaaaatgattcacccataagctaaaaaaaaaacaatatgatactcaaaacttgcccatgtgaaatagaaaatctttaacatcttacacatcatgacataaaagcctccaacatgaataaaatagttagtatatctaaacgtcaagacaagcgctcctgatcgaaccaagtcttaagcatatacaggaacaaaccagaaactttttgagcaaacgtatcctttaatgatgtcatcataagcgttgccaaaaaaaagaacatctttgattgtgaccccatgaccaaatatcaacaactcacctccaagagaatgtactctttcccagttactactttcaaaattcatcttgaagatgtaaaacaagcgtgagttttgtaaccgtttaatgctcacagcgatcaaaacatccattgagttcgtaatcgcaatcctcgtcttcccaccgtattccccaagttggttatcaaagcaaaacggatggtcacggtacgggtttccttggacgatttcttttgggaaagctccagagaaatcaagtcttgatgtagctatcaattgtatacacataaagcttatcgtctttataagtcatgtgtgtacaatatatgtcttcaacattccaccaataatcatcttcattcttgtatgtgaacaaacagttttcttcggtaatacaagctacaacataatcctttgttctctcgtttatccaaaaacaagccaaatttttgagaggagacgtcaatttggtttgttttcctttatatgacttcattgatggaagattgatcatctcgcgagtaaacacgttcaaaagatataagaaatctaaactaggatcattcatcaagagccaactactccaactagccataacaaagcttttcaataaatcaaatccaagacattctacttcgaaggagaattcgcgatcttcactgtgatgacccaaaaaagtaccatcctcgtcgcgcataagttgccatggataccatataggtcgcgtacatgatcttgaaactaaataccattgtgagcaaacgctcctcgctcgatgataatccttagtctctaatccttcaaagattgatctcaaaatatcgaaacaaaggttggaccaatcactacgaattctagacattctctccgtagtgcctacgataccaatggaaacctaatttgttttttttttttggcatcaaccctctttaaaagcaaatatataaatatcaaagccttaggaacaaggcggtgaaaacaatgtaggcccattaaggcccaataacggcgttaggaaattccaaattattttgaaaaagctttccgatttcacgctcttttcctcttccctccaatctcattgtgtccaccattttttgcatcaaccctatttaaaagcaaatatgtagatattaaagaatgcggtgaataatacaatttaggcccactaaggatcaggcggtgaaaacaatgtaggcccaataatgacatagcctttcatctttctctactcaatccaaaacaaacctcaagtcacacactcttcacctaaacagcatcaatggcgacttctctctccgtttctagattcatgtcctcctccgccaccgttatctccgtcgctaagccgttactttcccccaccgtatccttcaccgcgccgctctccttcacacgctctctcgctcctaatctctctctcaaattccgcaaccgccgcaccaattccgcctccgccaccaccagatccttcgctacgacacccgtcaccgcctccatttccgtcggagacaagctcccagactccactctctcctacctcgatccatccaccggagacgtcaaaacagtaaccgtctcatccctaaccgccgggaagaaaacaatcctattcgccgttcccggcgcattcacaccaacatgctcacaaaaacacgtccctggattcgtatccaaagccggagaactcagatctaaaggcatcgatgtaatcgcatgtatctccgtcaacgacgcgttcgtgatggaagcgtggaggaaagatcttggaattaacgatgaggtaatgttgctatccgatggaaatggcgaattcacagggaagcttggtgttgaattggatttgagggataagcctgtgggacttggagttaggtcaaggagatatgcgattttggctgatgatggtgttgtgaaagttctgaatcttgaagaaggaggtgcttttactaatagtagtgctgaggatatgcttaaagctctctgattcttatgattttctcatcaatttcgtcttcttctctgttttgaattttctttactctgttttgtgttgctgtttctttaaatctacgaatcattatcggatttgtaatggaataatgaagttagaggttctgttgtttgtgaacattttagaaaagcgttgtgtttagttttcggatgttactacttttggttaattttttctcttttgacttttataattttgattgagtttaggtattaacctaacacttactgatagtttgtcacagtgacaagttaatataaacatgtaatgaaaattttccacttaaaaattcatgaaatagagctattaatttctagaaaaagttaacttatcgaagtcgggttctctgaaacgtgttgctgatcaccggtcggtcagggatttggtccggagtaagtcttatgatatggagaggttttgaccataaaatcctcttggtaaaacattagtaagataccaacccaaagacctctccaaaaggcacgtttttttattattatactacttgacatgatcctttttttttcctcggtgcatctttgatatgattatcttaagtttaaggagcataatgaattaccttttcaattgatctatgtagagtaatggagattggagaccaacaagcaacaatcctgacttttggaaaggacgttggggttggttgctagttggatgccacgtctacgtgctaacgtatgcattgatgcacaaatagcgaaaaactttagtttatatccttttttttataacaaaacagacaataaagcccaaatgtggtcagcttcactactggatcggctatgtcagtttaccgaatcaaatctcccacaataacgccaaattattcttagatatttttttctttttcttttgggtacaaatatcggattgctttgatgatttgaagtgttcaagtacactgtacacatgcatgtaaagaaaacaaagagaaaagaagaaaagaaattaagtccctcgataaggaattggaatggcttccaaaggaacagcttttttcaatgttataccaatcctttctcccatatccatttcttctgcattaagcccattttctaaagcccaatcaaacgatctcaccattgacccaatggccaacggcaaaacccgtgatgccaaaggcaaagctggacacatccttcgacccgacccgaacggcaagaactcgtaatcttgtcccttgaagtctcgggcgtcagggtcggatataaatctctcgggtttgaacattatcgggtcgatccatgttttaggatcgcgtccgatggcccatacattgaccaagacttgtgtttccttggggatagtgtattgatcgaagatgtgacaagttgacatggctttgtgtgggacgaggaaaggcagaggtgggtgtagccttaaggtttccatgataacagctgagagatagggaaggtttggtaggtcttcttcttggagcttttggttcgaggacttgaagtaggtccggagttcggtttggagtttggtcagtgttcttgggttgtgtagaagctccgctagtgcccactccaacgtgctcgttgtcgtatccgttccagccgtaaacatttcctatcaataaactttattaatttgtacatatgattgtaagaatgttggtaataattaattaaggtatgcataacttacgaaaacaataacgttgatatctcttgatgagaagctagaaggttcttcgtcgactccatcgccaccacgaaactccaaaagaacatctaagtaatctttcgtcttctcgtcgctcttttctctctccctaacctccgttcgttctctgatgaactctccggcgatctcaaacgctttttccacgtggaattgcgtttttctcctgattccttgagggtcaagaaaccttagcaacgggaagaaatcggcaacgtttggttttccggcgaactccatcactttcccggtgtggtaaaagaattcggatcctctttttgaatcaggatcaagcaaatctctcgagaacatgaggtttcctatgagattaaatgccatcaagaagaaatatctccccacatcgattgtttttgtacctaataagaaataaatatgtagagttatgatatatatatatatatactgttaatatttatatatatataatacacattttattttttcaaaaaaaaaacacaatttaattataggttcaattagaatcaacataaagagtcatattcagattagtattgttgatgtgtcacattcggatctaagcctacatataatgcatgtcataatgttgttgatagtataatacataccgttttggccaccttcctcgacaaaccgaagcatctgatcaacacacctagagcgtacatcactcatagcatcaagacggcgcgtgacaaagaactgagtggtgcaaagcctccgcagcatccgccaatacgcaccatactgagccgtgatgagcgagccgtcactactcttccctcctttcatcgcctcgtaaatcttccggccagccaaagctgcgtcatgcttcttgaagatctcccgagccacttcactcgaagagatcacaaccgtcagcatcgacccgatccgtaaagtcatgattggcccgtgacgccgtgaaagtttagtcaatgagtcgtgtggcggtaaaccagcgagctggaaaatgtttccaatcaccggccatggatttggtcccggaggtagtctcgtacgacatcgtttggtgtagaagagacatgtaacgtatatgaggacggcaatcgatgtaaataatccgattaactcgttctttgttaattgattaatcattctttttgttttgttctgaatatgagtacaaacgtttctactatataggtatcaaggtttcgtgtgaccttttcctttattcacaagtttcgtgtttcttataaattatgaaaatgctaataattcatgattttgtcgctattatgttgggaatctttaacggatataatcgctttaacaaaaaatctgttgcaacttgtaaggtcattatattgtaagcccattaaagtatccgatgatagtagtaagtttaagtgggacaaaatcagaaggcccatttgatattcttgttgaaacgtatgagcgtttttggtggatctgcagtaggaatttgaccattccacatattttagagcacaaaggtttaagtaatttaagtatttaacgaccttacttttgagatatgcttttcaaaatgatggaggaaacgaaacaatcgacgcatagagaaaaccttaccagttaccacaacatcaaaacttggggaaaatatcgacaagaacattcgaatcgtatcactttgctttggaactcatgaataacaaaaatatgaagacctattcatattttttggctttccactacgaattaaattataaaacaatacaaaagattcaaaacgatgcactacacaaacagtttttcaatagtttttacattcattcaaaaaaaacttaagtatttaacatacatgttcttaagcacaagattagcctatcatattcattttagtttggaccgaaatttgcccatattccattatatatattattatatattggtttcattttcataagtatggtacatgttacagaatacgtatctccattccaattttgtggagatccaaccaatgtatagataagatatgagaagagtcaacggaaatttaaattctttttttttttaaaagtaaatgttttagacatgaattaaaagagaaactaagtcagacagatctcgacaaaatcaccacaaattacagtagttacttatttgctatatttagtagacttggtttacatatgctatatttggcaaaagtgtgtaagcaaatatcaaattcgaagctaagtcagaaagatctcgaaccaaattcgccgaagatcacaacaagtttttttctataattgacttcattgtgtgtatatatatatatacaatatatgtataagagttgtgtatcatatatatgcaaagtctacatagatatacaatatctaaaactatgaaaacattgtacaaactagaaaaaactatcaactaaattttgataactatttttttttttttgaaaaagactaactatttatcttgttgaatagttttagttttcaaaagaaaaatattctagtttccccaaaaaaaaatattcatttacaatgctaataaaaccaattaacaaaatgtgagttctttatcccaaaaaattttagagtctagagaagaaagaaaaagatagaatgaaattcagaaagaaaaaaaacttataaaaatgttaaatagaaatcaaaagagataccaagtcagagagatctcaaattcgccgatgatcacgataataagtttattaactatatttggcaaagttgagtatacacatactcacatgtatatatgtataggtataagagctgtgtacactatatatgcgaaggagaggcaaaagtgaagtgaaaattaaggttgttgtcttttatccaaaaacaaatattattgtctaaccgttttgttcttttttaagaatgttggttgtgttctattattcttgtttacaagtggtgatttaaacagacacacataacaaaaacataggagactgaagaagaataagagagtatatctgcaaacaagaaaaaagtttggttgcctgaagaggattcaacagctatatggggataagagtgtctcagctttgattgcttcatttgattttgtttatatttttcagcaaagacccttctttcttcaattcccaaagaattcttatttacaggtatcaatttctttacatcttttgatcatcattgttatattttttcttctaaattgtaataattttggaatagaactgtttagttttttagtctctattgaatttaaaagtaaatggtaccaaatagaatgcatttaaataaagaacgaagaagattatttgggattaaaaaaaaaagttgttttgattacatatcgtttgtaatgtgtaccctttctatttgtacacattacaaaatgtgaagtatgaacatgtgcgttcatgagtgagatctactctttggtttcttattatatgttacttatgatttatctttataggagtttgacttatccttgttgaaataattaaaaaaattgaatgatttgctatgtagggtgtttttgggttgtgaaacgttagagatgaatttcacagaagctatgaatgttgtgcacaacagaatccatcaacttgaaccagagaatgcatcgaagatcataggttatctcttgttgatgcaagatcaaaacgaccgtgacatgatacgtctcgcattctgtccagattcggtgatgcgttctatgatcaactgtgttaaatgtgaattggctaaaaactctcattacaataacatcccttcttctgatcacattcaaatccgtaaattcggatcattatccggttcatcaaaccaatctcttttggtttctgcctctcctccttcggttctctctatgggaacaagtttttgggagaatacaaacgatatggattcatcattgaaagacaatgttcagtacttcttggattttgaggattctgtgaccagtcctgaattctcaactagtttcttctctcagaagaaacagagtttgtctttaagaactagtcgaagatcactgagtttaccagagtttcctctcaaaatctgccattacttcaacaaaggattctgcaaacacggcaacaactgtcgttatttccatggaaaaatcataccgtagaaagatagttttgcgcagatgtttaatccaaaagacaacaacctaagcgacgaagagcatgttgtttcccctggatcacttgagaagctagaaagagagatcattgagctgcttaaatcaagaagaggtgctccaatttccatagcatttttgccaatgatgtaccacgagaagtatggtaggagtcttcaagctgaaggatatctcacagagtcacaaagacatggcaaagctggttttagcctcaccaagcttcttgctcgcttaaagaacaccatccgcctcatcgacaggttagttacttagtcacgtaacacatattaacaaatgaatatacgaggaagtgtagtttatgcattgttttgcttaatggtgtttgaattgtaggcctcatggacaacattcagttatactagctgaagatgtatcaaagtttgtggaatatacgggagagagaagcgaacatggagcaatcttagctggttcaaggcaggtttacttgacatttccggcagagagtagtttcactgaacatgacgtttcaaactacttctctgaagttggaccagtggaagatgtaagaattccatgtcaacaaaagagaatgtatggatttgtaacttttgtttatatggaaaccgtcaaacgcattcttgctaaagcaatcctcatttcatatgcggagcacgtgttctcgtcaagccttaccgagcataattaggttcgaggaaattccaaaaactgttatcacatcatcgtctttgtctttggggttagactgtttggtcggatggcatgggccatggagttaggttttttagactatttggtttatgacagtgggtgagacacaaaacatatataaaggatctgttttcaggtgagcaagttaagaaacataaggtgcatgagttatctcttattgaacgttttgatatttcattgtatcatatgacaaatccttctagttttacgaacaatgttagaaaaatgtatgggtagtttcgcctacttaagaaaatatcgccatatcaacgatgaatagtctgtatgatcagaaacttatgaatgttgaacacttatatattgtacaatgaataagagatgaataacattgaaaacataattttttcgctaacaatgaaagaaatgaatattcaaaaaaatatttcatcgtgtcttgtgaaatgtagttaattctaaggttataaaaccaaaaaaaaaaattgatctggaaaatatacctgaacaaaataatagcaagatttgttaatagaaagaattgacaacaatctggaaaattttatagcagtataaatagatattaaatctaacgcgagccaccatttatatttcattcttcttctcgtgttccattacacatgcgatacgtagttacgtaccagaagacatgtatctgccgcgcattgtgagcgtttggatatcacctcctagcaattaacactttagccgaccaaaagcttgcacaagcgcaaagagatgcgcgtggtgattacttttaccccttctccacgaaatcaaactggtaaataaaaaatcaactacgttaataaagatcatccacgtggctacgagatgtttacgattttagtcctttaaaatttagattattgcagatctagtttttacggttgtacacttcaatagttttaattcgtttccagtccttacattctttttaacttgattttaatttaaggtataatttggatttcattacctaattaaatactaaaatgagatatgaggttgttaaattgttttctgtttgctgacaaaaataaacaccattttataaaatctggattaaagttcaaaatttagcaacaactatagatgtattatttctatacatatataaccatgccatatgttgagtaactaggatttaacccgcggattaccgcggacaatcggtttatttggttcttatactaaatatttgaataaatatgatattttaaacatataaatataaatttctagtgattagtgaaaaatcgtaatatataatttggatattattgattattgattttgtgattgaatatagtgtttttaaggatggaatgtgattatattttgatttaaaaaatgacatagattctttatttttgttgaacgatttagattaaagggaattaattttattgaacggtttagattgaatcggattatataaagtttaggagattgttaagaccaaattacccttaatgattttgaatagcaaagaacaaaattcaaaattgaaataaaaattgaggctaaattagacaaaattttaatttatatttcccttttaataataaagggatataaatatggcaataaataaaaattgatataaataaagagaaaaattaatttaaattgaaaatgttcaaacaaattcataacctatataaaataacaaattgcttttactttctacattagtgatggtaacaaaaatcaaaagagaaaattactagggtttaagaaaataagaaaaacaacatagggtataatttgaattaaattgagaatgtttaggttaaagagaaaataaaaaagcgtcgacttgttttcttttttgtcgttgttgttgttgtgagcaacttttatttatttatttgtcttccgttgcgtgagatattattgaacggtgtttgttattcggagaagaagaagaagaagaactgaagaagcatattcgacggtcaccaccaaacctcttccgtcggattttcactctccgtttatcgaacatctgagatctctctccacttccgtcaccgaagatgcattccagtcatcttcttctcgaggagccgatcaggatggcttcaatcctcgagccttccaaatctgtgagctctctctctctctctctcagcttgataatttagtatcccagttcttcatcgatttgcaatttcgcatggattcgattttgttgttgaggttgtttctctgatctctttttgatgtattttctcagagtttcttcccggcattgactaagatcgtcggaactctaggtcctaaatcccgatccgtcgaggctctctccggctgtctcaaagccggcatgtctggtactaacgatttacttctcttttttttttggggtttgctaacttgatttgtgttcggtctcactgataactgttcatgttctgtcatttagtggctcgatttgatttctcgtggggagatgctgattatcaccaggagacacttgataatttgaaagttgctgtgaggagcactaagaagctttgtgctgtatgttttctcttctcttatttttttaatctgatggatcttttttttatgtgctatatgtatttgatttgagatttcttctgcgtttgatcaggttatgcttgatactgttggacctgagctacaagttattaacaaatctgagaaagctattactttgaaagctgatggccttgtaactttgacaccgaatcaagatcaagaagcttcttctgaagttcttcccattaatttcaatggacttgccaaggttctctatgacctttgtataatgagatgacattatatatgtaaacaatggtttactgtttactaatatagacgtgtgatgggtgttcttgtttgatgttttcaggcagtgaagaaaggagacaccatcttcgttgggcaatacctattcactggtagtgaaacaacttcagtttggctcgaggtaaaatatatgaagctgtctaatgggaatttggtggtatctctatgttaaagttttgatttttatatgtgtaggttgatgaagttaaaggagatgatgtcatttgcctttcaaggaatgctgctactctggctggttctttgttcactttacactcctctcaagttcacattgatctcccaacgcttacagagaaggataaggaggtcagttttcttctaatctccaaatctcggtgattcacttcctccctttataatatatatttttaatcagagtgtttgaccagattgttttgatttggttatcttctaggttataagcacatggggagttcaaaataaaatcgattttctctcattgtcttattgtcgtcatgctgaggatgttcgccaggtctgtattattaatctgcctttccgttcttgtgtcatacttctatgtgtatcagtgtatgcactattaattctgagcttctgataagcctgaacaataaccaatttttgtttcataacacagacccgtgaaatgcttaaaaagttgggcgacctctctcaaacacaaatatttgctaagattgagaacgtagaggtaagtgctatgcatttatttattatgtatctgtaatcttcctttttcttaagctgctgacattgaatttatttatttatttagggactaacccacttcgatgagattctacaagaagctgatggcattattctttctcgtgggaatttgggtatagatttacccccggaaaaggtatgttggtggttagtcatctaaattaatttgtgcggcaccaaaatttatactcttttataacttacttggtgggttctggtgcaggtgtttttgtttcaaaaggctgctctttacaagtgcaacatggctggaaagccagctgttcttacccgtgttgttgacagtatgactgacaacttgcgaccaactcgtgctgaggccacggatgttgctaatgctgttttagatggtatgattatccttgaatatacttcttttaacattttatagcagaatctacttggtttggttagtattgtgaaatgatggaaggaaattgtcataacttgaggtttcgtcttccattttttgtcctgcaggaagtgatgcaattcttcttggtgctgagacccttcgtggattgtaccctgttgagacaatatcaactgttggtaggatctgtgctgaggtaggctttatgatatatttctttagtatggtttcattgcttgcgtctttaaatccccacacatcttgcaactatgtggaacctagttgtggcttgtcatccgatctgctcttatacaatttctttacctgttcgtaggcagaaaaggttttcaatcaagatttgtactttaagaagactgtcaagtatgttggagaaccaatgactcacttggaatcgattgcttcttcagctgtaagtctatcttctgtgctgcagagacataagaaaggattataatttctgctattaagacgcaaattgctatcacaatctctaatctgggttaatacacacttgatcaggtacgggcagccattaaggttaaggcatccgtaattatatgcttcacctcttctggaagagcagccaggttcatataattccttttggcttaaactgttatgttcctttgatctaatcatatttgtctaatgaattgttattcctttgatctcccatgcagattgattgccaaatacaggccaacgatgccggttatttctgttgtcattccccgggttaagacaaatcaactgaaatggagctttagtggagcttttgaggtatgttttccccactggtctctcaagtttagagattacattcacgccaatctcttacaaggtcaacgtgtgtgtctcttatcaggcgaggcagtcacttattgtcagaggcctcttccctatgcttgctgaccctcgtcaccctgtaagtcttgttatctttcttctattgtatattacaacttcctctcaatttgagaaacaaacggtctcaacacttgtatcatttccaagactagtgtcttagagccaatatcatctctttaagtgttttaatgaaattttgctaattcttaaggcggaatctacaagtgcgacaaacgagtcagtcctgaaggttgctctagaccatgggaagcatgctggagtaatcaagtcgcatgacagagtagtggtgtgtcagaaagttggtgatgcatctgtggttaagatcattgagcttgaggattaacttttgcctcgcaaaaacattatataattggctgcattttgggttgccttgaattgatgataactcccaatgccggagtgaaaatattatctccgggacttctggtttctttttgtatacttaggagatttgatgtctctaaggtttcagctatatttgattaccttcaaatgtacgcatatgataaaagtatacaatgcctagcaattttataataagctgttacattccctattttttcgttctattacaaaattctatcctatttgactgttttctcttctctcttgcaaacaaatatcatttttcaaaattaattattgttttattttctgtttttttgtcgtcaaatgaaattaaaatagaaaaaattggtggttgataattatttttcatttattttacagaatttggttctgaaaatatctttggacaaaaaaaataaaaagtaaaggcaagacaaaacataagaaaaaaccatagtagagttacaacaaactctttatattctgaaattctgaatgacatgatacaagagtcattttggttcgctaagttgtattaaactttgaccttatacaccattaccgtttttctttaattcgtttacttattagggttttcttcatcaactatgtactaatgtagaggtatttgtttgtgattacgtcgtcagtccaatggttattatttgttatgtgtgatttaatatatgaccaaataaacactatttaaacaacacaattcgttgtacaccacctaaatagtcttattatcttatatcaatttttatttttagttgtgtttcaatttatatggtaggttttcatttagtcttgcatgcttaattaagtttggggaccaacacatttctatgattagtttgccactgaattaagatcttttccccgattagtctttttctctagagaaaagatagtcagtcattcacgctcgatcatgagttatgatttatgaatgatgaatccataatataattatgacgttttttcttttgacttctctttgatttgtttccctaactctcccatccataaacaatccccctgtcggagtgataacgatgctcccaaatattacaacaactcgatgcaaattctgattaaaagcaagcaaattgtctcagtctatacatttatgtttgatctcttcaatcccaatattgatcacatggtgtaaatatatatcacaaaaaactaacaaaaaagaccctacatgaaaagattattgcttgagaatatctcaatatctacatgtatatatacaactaataagagactagttaccacataaattacaactcgaataaaaagttgagaaaaatacgggttcttaaaaaagttgctgcagtaggactaatgaagatcgtaaagattgttacaaagttgctagccaagttattaatcagacaaaacattggttttgttttcactaagaattcaccattgtaattttgtttaaaaatgtttagtagatttgatgagagtaaacttgtttaaactattttattaaatcagacgagtgattattaacggtaatggattcagagttacaacatcaccattgttacacgtataaattaaaaagaatacatattttggaagaatcttattttggactgatatacaattaaaacatttcttccaaaatgctttacaccaaatcaaacggacttttcacgattgttcggcgccgccacgtgtcatctataaccttcgttggatcttgcctttcacacgtcaccatttttcattttcttcttctttttaatatcatctctttccctcactttctccgtttctcgtcaaaagattttccgagaacaaaattcaccactgagaaagagagcaattacatttatagaaagcttcataagtatcttcttcgccgccatggctatctagattcatcgattacacgtgtttttatgactatacgtgcacaaagctctgtgtgtttgcgtaacttcggtcaactattagaaaacgagagcgaggtttgtgagataaagagagaggtatgggttcgtccttgtcgaatctaaacgacgggacgaatggtttggctatgggacctggtctcggcgatataccggaaagttgtgtcgcttgtgtgtttatgtatctgactccaccggagatttgcaatctggctggattgaatcgttcttttcgtggtgcggcttcttcggattctgtttgggaaaagaagcttccggagaattatcaggatctgcttgatttattgccgccggagaggtatcatagtctctcgaagaaagatatcttcgctgtgctttctcgtccaattccttttgatgatgataataaggtatttgcttggaagttatgaggattgaattgtgattttgatgtattggatttgggaattagggtttagtttctgagtttttgattttggtttggatgaattttctctgttggtagttgaactctctgtgtttttgtttccaggaagtatggattgatagagttacaggacgagtttgtatggcgatttctgctagaggaatgtctattactggaattgaagaccggagatattggaactggattccaacggaagaatctaggtactatacactaacgctgcttgatttgaatctcaaattgaattttagaagatcaactagtaggtgtcaagatcattgcaatacttggtttgtgattatgtcatttgcctttaactcatgagctgttgatacgctgtttcttaggtctttcttgaacaatttatgtcttaagtatataaaagaataagacttgagaatttgtgtgagggttattgtttgattagttgcttgttttcttttgctgactcggcttttgagttttgatgaatagcttaataggcaatgaatgttcttgcctaatctttatgattatggatttgagttgttattgtagttatgattcttctcgacagtacatatttctgaatcaggaggttatgtgtgagactgctttataccataaaacatcaaacggcttctttatgtttttgattatggaacaaaaagtaaaatccttttttaattatccattgaataggttccatgttgtagcctacttacagcagatttggtggtttgaagttgatggaacagtgagattccatctcccacctggtgtatactctctatcattcagaatccatctagggagattcacaaaaaggctagggagacgtgtgtgccactttgaactcactcatggttgggatctaaagccggtaaggttttcgctttcgacttctgatggtcaagaagcatcatgtgaatattacttggacgacgtagagagaaacgaagcacttggaaaacacaaacgcggttactggatcgagtatagggttggagaattcatagtaaatggatcagaaccatcgacagaaatccaatggtcgatgaaacagattgactgcacgcactcgaaaggagggttatgtgttgattcagtcttcataaacccaattggtgatgtgaaagaacacaaaaggaaagctgttttgaaagaagcttgaagaaagaaagaaagaaagaagatcacacaccaaaacaccaaaatcgttttgattctttcaaggtataatatcaatgactgatggtttaattttcatttcttattagtgattttgtcgtcaattttactggttcccaaaattagggtacatcgagtcaaatttcattttattattgtgcatttcatcgagttttttattttcatactcattttgttacatattttaggcgagaggacattttctttttgtgtatacccatgtttctgtgactatctgtatccaaccaagattatctaaattattttgtgtctgacaaattccaattatttttgtggtgcattttatttttatttttattttttttatcatatctattacccaatcaaagatagtatgcataagattggatagaattatttaattctaatttttttaatcaaacttatccaaatattcagatgcttgaaatataaaaaaaaactatactatcagaaaaatagatatatgaatacaagatattttcaatattatctgataagatgtcaatatacactatactaaagatattttcattttgtgtgtaatctacatttaattcatgaagtgaaccaaaacttaacgatattttctatattttctttttgtgtataatctatacttaatataaaaagatgaacaaaaccaaaagataaatttagtttaattcatgaagtgatccaaaacttaagattcttctctagaataatttgaacatcataacgaatccaagaaaaaaaaaagagaaaagaatattaaaaaatgctaaagaaaatgaaagatagttccaaaaatatttaaagaaacataaagggaacagaacaaggagaaaaaatgcatgtagagtgatggtcgagctgaatttggaatagccaagaaactctcggctatcatgtgaccgagctggacctgagaggaagtggtcagatgcaaaccgtccggttcaagaggtaggcctctggcgtcaacgcaatacacgttctcaagatcagtcttcagttgagcttttctcaccgcgtcaagatatggtcctgctcctgtcgctagagccaccttttgttgtttaggtcagaacaaaaaagatattagaagaatgtaactatatatcatattctttctaaaattttgaagtaaagaccaaaaatgtcaattttgaaacaccctgtaagcttggattggtacgatatatttagctacagcctggattaaaacaatgactaatcacgaatcatgtggaagctaaacttaaacaaatatgcattaaatacgttaaatccatgcttatgtattctttacttttattttgcatgtattttgtctttttattttccgaaaattacccatcaaagttttattttattttaaaaccgtggaatgacactttttggttactacacttgcagaatcactaacataatcaacattcaacaaaattataaagatctgtgaaattattctgttattttacgtatttaggcaacgtacctggataataggaagatttgggtgttgtaaatcatttcgaagatcactgaaaaacttcactagtctcttcttatataccgaagcatcgaccatatcaaccgtatcagactcaccctgataccacaaaaccgcccggtacgagccaccaccaccactagccatcgccgctttagccctcttcaccgtctcctcgtaaagaaactcacctttttgccattggcttagtttagtcccaccgatagagcacggaaccaaacccacctgaccaaaccggttaaccacccggttagcaaagggcatccccggtccaacaccattagtcttattaatgtcaatgtcaacgtgaagtggctctttagcctctttccactcgagtttactcgtgagacggaggatcgaagggtttgatcggcattctggcggaattacaccgtcccacacggtggtgtttgtggcagtgtcgttataaacaccgcctcgacccgccatgttgctttgcccggccaagatgaaaatgctgatgttccttgtgatggtttgggattgaagatgcggtggagattgaagaaaaatgatgatgaagaagtagtagaagatctttgtcattgttttgatgagtaaacttgaagattgagattgagatccaaatcagagtcgaagtaagatgcaagacagaataatgttttcttcttgttttgtctctttctttctattcacttcaaaaatccttgtttatctttttacagaaagaataataattggtttggtattattagtcaatagactcaaaaaaccttgtcatacacaacacaacatgattaaatataaaaaggactatattctgtctcgccacatgtacaaaccatcaatgattcatttctttaatttcttaaaggtcatgttttgcaaaattttggaggtgtttggatcagaaaaaaaaaagtaattaatagccaaaaaaaaaagagaggaataagatcatgatgagcgaatatgcaagacggcgtgggcaagtgagtgatgagttcttcactctttgtttcttttttgctttttatttttatacttcattttcgtataggatacattttctttccttacttaattagtgctttcttatcattagtttttactttttcaattatactaggtatattcccatgagttttaccaaagaatcagagtgagtttttggccttccctatttttgggcttaaaggaaaacatagaacatttccaaatcacttacaaactccgagagagtgtatagagctgcaaatagagtaggccaaatatgctttaatttgttttttgttttttttgagcaaaccaaggaatttttatttggacataacaactcgcaccaagttctatacattacacatgacttctactgaataaagaggaagaaaaggctattcaagaaacgttttgagctctttgtttcacaaggaacaatagaagtggaacacagtacacattgtaccaaagcaaacaagcttgcattttacatttgcacgtaacagccaagaatcatggccaaaaaatataccgatcaaaataaaaaggaggttattactaatatattatatacctatagatgttgcaattgcggtttctgacttttagtttatttttaccaaaacctgacaaaactcagcagaagcataataatagccaacaatcaaaattaaaattgtgaggctaatattttggcttgacgaatactctttaaccaaaatcattatgaattatgagtttggatagccacatataagatcccattcttgattctagctagggacagaacttatcgagatcaataattgccaaatatgtgacttacttatcttgaccatggagacagttaaaaactctcaatgaaacagctctcctctccaaatcagaaaacctgcatatcaatttatgattaaagtgttaacgatgtagagttgtaagaaactttaacatacatcatctaacattcgacatgaacacctgaggagccctcatctacgtctttacaagatcgtggcatgcactctattgagatcattgtgagggctaccacagaggctcatgacgaatttagatgatcagtctacgtttttctatgaccttaacacttattgaggccggttggttctctatgcccacttaacaacaaacaagtttcatcaccgtagtaaagtgtctgttgggacacaagagttcacatgatatttcaagttctgatggaactggaatagggattgtcgtctttgtttgccacccacacgtagcctctcgtgatgattgttttcataatctccacaaaagattacttgtggatcgcgaaccgagacgacagtcccttgctttccaaaatcaaacgaaaaggaaaagaaagaaaaaggaaggtgtaagaatggtggtaatgtggtagagttatcattttcttcttcttacctccttccattatatagtgtttcacatgcccatttcgtaatataacctaagccaaagaaaatcgcttcggttttaaattatataattttattttataaagttaaaactcataaatcagtaaataaaaaataaacttaggaaacgtttttgtttcaacagattatatggatttcatacttatacacaaactataaacattcccaaagttttagtaaaaattagcacccattatccaaaattttaaaaacttagcttagttttattatacaatacaatagaatcgaacaaaagggacaacagttttctatcatatctcgaatgtatcgaaatgtacttaagcgagtatggctttttgggggacaaggatcatgcatgaacgaaatatttctccaaccacatatgttatgttttggccccgtgaaaattttccacaagtaaatttattgctaaagttattgaccaacaacataaatcttgttgaaatgaattaactgaacagtgtgaaaaaatcaaccaatattcatggtgttccttacaatgcaatttcagttctgatgcaatccgtaacaattgaagttgtcacatgttcacaacaatccttaaatcgattttagcaaaagagcataagatacataaccaaggttgctgttagctcagtagttgcaattagaatcggctattgaacacaaccgggtgatatgagattgcgtagcaagatagtaaacaatgttttaaaaagagttattataggaacacaaactcttctgattttaatgataggaggacaagagagagcagtgaaataaagttcataagcagcaaaattctcaagtctgatattataagagtagcaaaagtgagagacaaaaacgaaataacaaggtttatgttttgcaaatattcagaaatgaacatcaactactaaaagtagctactagcagaaaagacgcagagtgagaaaagatggctttaagctcttcagcgtttgccaccaccacctcccaccttaggacccttggatgcagcagcagctttggggaaattagccttgaccttctgttgcttagaagcaaattccaccttcttagccttcttttcatctttggtctttttgattctttccttgatctcactgtttgttgaatcatcatcacaatacatttattaagtcaaatataactattttaatcctagttggatgatttgacagagggagaaaactaaccgcagagcagcttccctggctgcatcacgaacttcaggcttctcagctctcttcttctgaattacttccaaggtagcaccaacaatggaccttgagtatggcttcttggtggcacgtctccttctcttcacagcctcttgtgctgcatcctataaaagaaacagagttttagaatgttaacaaatcaggatcaatgaaaaaaaacaaagtacaaacaacaaaacagatccaaattactgagttttttttttaccttcttgtgttgctttctgtacatggcagtccatgcaagcttggatggcttcaacttgttatggaagtacctcttacattttgagttaagaaacaagaaaacctgaaaacaatacaaaccattaaaagactaaaaccaaaacatttgcaaagtataaacaaatcaatttgattagctgaagattcataaaagaaccaacctgagaatcagatcggataaacctaattcctcttcctgggtaaatcttctgtccactgaaacgacaaagctccgtcctgtatttcatagataataaacaaatgagacattgcaactagaaatgacaaccaaatgatctttgacactgaaaaatctcagtctacatgatagaaatgaatcatccatataccaaatacagactaatcacagatattaacgaagtatcatacttttattacttagaaccagatccagctacacagagaccatgaaattacccagcttagctaacggtaaagcaaaacatatcataaattccgattgaaacaagagtcaatttcagtgaatcgatccttccgatagtgtgaaatcatgaatcattatcactaggcgatgttaatagattcaacacaggaacagatacagagagagagagagaggtgagatttgattacttgagaaccatggtagtagctgctcctcttcttcttcgtcttcttcctcctgctcaggctgctcccggaaacactagactagaaaaccctaattctctcgatacttatatataagagacttcacatttcacccaatgccattttcgtctatatatattattctggcccacactttaagcccactaaataggcccatcacaaataggcccataattttattagcccatatatttttgtagtgatgacgtcagctctcctccaataattttttgattttttcccatagccgacgacggtagaggaaacttgtcaatggacctaaaaaacggtgacgtttcgtaaaaggtagatgaaagtttgaacaagtagctaagctctctctctgcacaagcttccagaaaaaatcaaatcaaaagagagagagatccacaaaattggattgaatcgtcgccggatattccaagagtagagagcttagtttgtctcgcgttgcgtctagatttactgaatatggaggcggagaagtggaacagcgacggtggtgaatacacgtcggaggacgaaggtacagaagattaccgacgcggcggttaccacgccgttcggatcggtgactcattcaaaaccggccggtacgttgtccagagcaaactcggttggggccatttctctactgtttggctctcctgggatactcaatcctctgtacgcatctatctctctctctcgccacacgaattgcttgaaatgctttagagattaatttttcgttgctttgtttgtgtgattttcttactcgtatatcgaatgtacagagatatgtggctttgaaggtgcaaaagagtgctcagcattatactgaagcagccatggatgagataacaatattgcaacagattgcagagggagacactgatgataccaaatgtgttgtgaagcttttggatcatttcaaacactcaggtccgaatggtcagcatgtatgtatggtttttgagtatttgggagataatctgttaacgttgattaagtattctgattaccgtggcttacctattcctatggttaaggagatttgttatcatatgttggttggtttagactacttgcataaacagctttcgattatacatactgatttgaagcctgagaatgttttgttaccgtcaactattgatccgtctaaagatccgaggaagtctggagctcctcttgttctccccactgataaggataatacagttgttgactccaatggtgattttgtcaagaatcaaaaaacaggaagtcatagaaaggcaaagctttcggctcagggacatgcagagaataagggcaatacggaatctgataaagttcgtggagtgggatcaccggttaatggaaaacaatgtgctgcagaaaaatcggttgaagaagattgtccttctacttctgacgcaattgaattagatggtagcgagaaaggaaagcagggtggtaagaaagggagtcgatcaagtcgaaggcaccttgtggcatctgctgacctcaagtgtaaacttgttgactttggtaatgcgtgttggacatacaaacagttcacaagcgacattcaaacgagacagtataggtgtccagaagtaatccttggatctaaatactctacatctgcagatctctggtcattcgcgtgcatatgttttgaacttgtcactggagatgtgctatttgatccccatagtggcgacaattatgatagagatgaggtatgcttaagttccctgctgtcttttggctgtgtgcatttgtggtttttacatattttggctttctcttctcttgttttgtgggatcttagcgtggatttgcttcaattttctattgtgggagtttggaaatctaattggcttttctgttaacaggatcacttggctctgatgatggagcttcttgggatgatgccacgcaaggtaatagaatcatcagcagataggtttatcattttactaagaaatttatttcgatgattcataattcccaacactttctctgttgtgttttgcagatagcattgggtggccgctactccagagatttctttaacaggcatggtgatcttcgacacatcagaagactgcgtttctggcccatgaacaaagtgctgaccgagaagtacgagttcagtgagcaagatgcaaatgacctgagtgattttcttgtttcgattcttgatttcgtcccagagaaacgaccaactgcagctcagtgtctgttacatccttggatcaactctggtccccgctctataaaaccttcgcttaaagacgaaaattcagataagctcgatacagagaagaacaagagggagaatgaggagcaagaagctgtggaagttaaaatgggaaacgttgttatatcatccttagactctaaaccaggtatgagccaaagctcctccactcttaagctagcaatttgactcctgagatatgtctgttcgatatctgagatctgtgtaccactcaagctgtttaatagaaagaacattttcatatacgcagagtggtatcttgtttgtgtacttctacgaatccaataccaattattcacatttaccatatatttgatttttagtaatatgatcttataaaaccaccgactctgtttccgactcctgactgcttctttgttcctaaatctgtgtgcaagtccagtttccggtttagtgctagtgttataacgccattaagtagaattattattcacaacaacgaaaatcaaaatcgaatatgcaaaccagaagtagttttattacaagtcaagattgaacaaagacataacataacagagagaaacgaaaaacttgttatcatcgttttacagaaaaccacaaaacgtatagttctaattttactacagctttttctctcccacgacgattctcactttctcctcgtcatcgatctctccaacgtcattgaaagtttgaccggtcatctgatccgcctctttcagtaccgtcgccacgtatccaggcctagtatctttcacgtcaaccgccacaactgtcttccctgtgctctcgtctccatgggccgacgcgcgcgtctcctcatcagagggcgtcgtagcaccagtcagcttgctctttatagctccagtcatgttccccaacgcacccattatacttcccttcccttcttcacctctgcaaacaataattccaacaactattatcaacacatccactaattccgaccattgggttaaatcgctttcaggacatcatgtcatatacctttgggctacggaatctttagtctcgtgagctttgtcagcagcagattcggtactctgttgtgtctttctagaagcatcctcgtcaagttttttgccctcaagtctcatctcttccatcttccgccttgcttcttctcccgcctcgtccatcttttcctattaattaaggacgaacatcatataatagccaacaaagcatatataaacacattgaatactctgctagttatattaccttggccgtgtctttggtctcaacggctttttgtttggtttcctctgtcttgcccgacaagaaacccatagctcttttagcagtgtccactgcactatccttcagttctccgatcttactcacacctgcatctttcgtttctgtcgccttctctgccgtgtagtctctatattctcccactttctcagctgtcttatcttttgcttccctcgccttatccgcagtttcctttgctttctccgccgtgtagtctttatattcgcccactttctcagctgtcttatcttttgtttccctcgccttatccgaggtgtattccgcggtttcctttgctttctctgccgtcttatccttagcttctttcgccttatccaccgtgtagtctttgtactcacccagcttctccgccgtcgtgtctttggcttcctttgccttctctgccgtgtaatctttatattcacccaacttatccgccgttttatctttagcttctcttgccttctccgccgtgtattctgccgtttccttagtcttgtctgccgttctatctttagcttctcttgccttctctgccgcgtaatctgcggtttccttagtcttgtccgcagtcttatctttagcttctcttgccttatcggccgtgtaatctgcagtttccttagtcttctgcgcagtactgtctctaacctctccggtggtgtctctcatccccgctgccttctccgatgcaatatcggctccctccctcgttgactcagccgtatcatgacttttaccgatgactgcgtctttagttccttgcaccgccttcatcaccgagcctatcaggccaggcctctcaggctcggtcgtcgttgtcctctccgttaatttgtacgtcacatcacctttgttgatatctttcaaatcttcagccgctagactcgctgcagcctcagctctctcggccttggcggacctctctgcctcccgttgtcctgatgccatgatttgtttcttgtttgcttggcttccaagtaaagatttaagatggattctttaaactttgccgaatactcgtcgtgttaatgaagcatttagagctgcttgttgtttttatagcaagtttttggttccaatgagatgccacgtcatgactttgataaagcaaaacctgccacgtgtgttctggtacgcatttttcttattttccaacttatcttccaaatatcatttcgcccgacacgtatctaagaagatcgttctattgaggaaccatgccacgtgggattttcatgcatcgagagagcttggacttaacgtgtaaggaagcaattgtggtcggctcccttacttctaaattgtgtagtacgagtattaaaaattgggcgtttcttgtttctttctttcttgtttttggtcgaaggctatggaagagaccattattgtctccaatttattggaaaaaagtaagaaaataaactgcagtccaacatctcctggataagtagcttcatcggtatttaagaacaaaatcaaatgaacaagttcggaaatagactcaaacgaataaaaatccaacatatataaatgaaaacacatagttatcgatttaactttttatacacatgagttatgtgcattatctaatcttttgatataaaattatcgcaaaaacgtatcaaagatgacagtggatgaaaattaatgatcgctatcttataaaccagtcactatttttgaatccacttcaatttccagtctcgtaacctttccaaaacaacacgataaattgtcgacgaagcattttttcttctcattaattgccataacttcattttgaaattatagtttctttcttactcgtatttattcattaacgtattgttcacactactcacatcttatatatttatgatctttagagattctttaagcatcttaattttcgctttctgttgacgagtctcatctttagcttctaataagcttagcttctgctacccatatggtccatatcgtttatcttcatctgtccaatcgaaaaagtcatgagctacagatttgttttttttttttttttagattaccgtttgtccatgatttaacaaactgtcgtttttctaccaccatttgctaactaaatagttaatgttgtttttaaatatttgtgtaatctttgtaaatatttgtaaacccgatttctgatccatgacgtgcgagtttagttagtggaataattttgttatattattaagtttttaaatggcatcctaatgatatttgttatactttcaaaattataacttacgatgtactccccaaataaatagtataagattaaccaaattagtattgtctatcagtaaagctcagcgcttaataccattcatgcatcttttgtttttcaaaatctactcgcaactaaacctagaaaaaggaagccttaagttatttagcaaacatatagaagagagagtctcaatatcaaaccaacagctgaatgattttgagaaacatagattgtttgttgtttcactggctggacttccttataattttgccaaaaccgttatgcccatattttgtaccccaagaattctgaattttccagtagttgacaccttccagagttgtgtcgaaaccagtcattaagactacatggccacatgtgcttgtgttttttcgatttgtttgaccatgatagattttgtcatattcaaaatttacaagatatgaaatcagttgtaatatgtttaaaaatgaattataccaactacaaataccacttacatctttacattcctttaagctttcataagtatctatcacaacaagtagagggccgtcgttgacaagttagataaactcttcttctctcacttgtttgtctctcttatataccaaatccttgattttgaatgcaggtatatcctataagaattcgtttataagtatgattagttaaaaataaatgaaatttgtaagaagacaagatttaaaaatgacacttacatagttttcggaacttttgagacagatttgtttgagttttcatgagtatggacaagtttttctagaacaagaacttgttttgtcaaaaactttttgatacttgccatagttacagatttttcatacatgttcctaatattgtttatcaaatgttgcggtgatagttcaacaactagacctataagagcaagtcatgcttcgatgtggcaccaacctagagtttataaacccctaagcaaaatgaaaaaatgtaatttataggaatgaaataaattttcaaataataacttatatctaaaatataaaaagttatgcaaaataatttataaaatagttagtcacaaaaattgtacaaaactaaaaaagtcttatgtgattaactataacctataacctattatttaggaaacaatttaaaaatcaatgatatttacttatttttgctactgaaaatgcaaacctgttattaagtaatcgtagaaaagtcaaaaggattgttattcattaactcccccaaaagccaagaagaaggagagtgagaaatggagagaaaacttcacgaccacattcacattataactcaaatgtatataaaaattatccataaatagcctagtcctcattctcatattccttttgattattagtgagaacacaacaccaacaacaaaatgggagactcacattgccgttgtcttcatggctttattttgcttgttgttctgtttctttccttcgtgtttagtttcgcttcaaagatagacgtttcttttcacggagacgagaaacgtagtctctctagctccattaattcctctcttagtgagtcagcggaatacacaatgtgcgcgactcataaagaggctaaggatggtaaaccaatcgcattggatttcgattgcgaacaaggatatgttatttcaaagatcacttacgccgactatggccaatccactggtagttgtgggaaatttaaacgcggtaattgcggtgcaagcaataccttaaatatcgtcaacaaggtatacaaaatcaatcaaaaatacaaattttctttcaaatagtgttcttattaattattatcgtttgtttgtgcagaaatgtcttaggaaagagaagtgtaagttgtttgttccagacaagatttttggtccgagccactgcaagggagcttaagtctcgttattgacgctacttgtagaaaacttagtttttttcttgttttccaagttaaagtttctttatgtaatcgacctagtcaagcttttgtttcctactttacacgtttgttacattttttctctttgttgcaaaccccaaatgtgtatgtgccatacaatatcaatcatctttgccatattttatcgaactgtttataggttactcaatatttttctcctcaaaaaatgtgaagactgacacgtaccaaatcttttaagtgagaatcacaacaaatcacataaaacaccaaccaattccattctttttcctcttttgacacactttaatccaaatctgatcaagttttggggccacattgcaaaattggggcccgttgtaagttttggtcccaatctgaaaatgcatatcccaccgactctgacaattagggcttataaataaacgagcacataagttcataacttggttacttcattattcttccatctttttcatcaaattgctaagagagtaaaatcgccccataacgaagtaaccatgtcgaagaagataatcgtgttgacaagctccgatgatgataaagggtatggcagaagacgattgtgccgataatggaatccctcttccaaacgtgacaagcaagatactcttattggtgatcgagtattgcaagaagcacgtcgttgagagcaaagaagaagatctaaagaagtgggacgctgaattcatgaagaagatggaacaatcgattctctttgatgttatgatggctgcgaattatctcaatatccaaagccttcttgatctcacattttcaaactgtcgctgatttgctctcaggcaaaactccaggcgagattcgctcatacttcaatatcgagaacgatttcacagcagagggagaagctgagatccgcaaggtgaatcaatgggcttttgaatgaaagtggatcttcaaagttctttcttctttagtgttttcggttttcttgatgcgatgttagatgattacttcgtctatttcttgtttgttctgttgtttcttttcttttggtttcttgatgcataagtaaaccaatgtttgttgtatctttaccctagagacgatctattgttggattttagtatatgctaaccaaatctgaagattgatgtttttgtttttgaagcaattcttgaatatatgtgaagtcaaatccttccttttttttttcttatggtaattgaagtttactaatccgaaactaattatatgacacttgaattttgatattctatacttgtatcataattaataatcaagcaataaatgcaaattgtcaagattgaacattctaaaatagatagtgtgaaaatttgttgttctctttgcgaaataaaaacagttgttttaatattctcgtaggaatatgataaacctaattatagaaaacttcgcagccacatccgcacacaaattcgcatctctaagaaactttaattactaatattatcatatatatcaatatcaaaacattacatatttatacttaactacacgtactaaaccatcttagcatttttcaacacccttctgatttagaagggaacgaaaaactagaataaaaatggaaactacacattctcttcatcgtcatggcttcatcgttttgcttcttcttttatccgtttcttatgtgtcttgtttttatacaaggaatatcatcaacggttcttatcgtttaaatccaagagaatatcgaccgaatcaactgccaatatgcattgatcatccggcgcctagcgtcgatctatcgcccatcttttgtggtgaaggatatgttatctctgagataaaattcgccgactatggccaacccactggtgactgtaagaataacacgcttaaacgtggaaactgcggcgcacccgctactttgaggctcgtcaaaaaggtttaactaaacgtatatatatgaattatctgtttgaaatgagtactaatacatcatatcttattattgttatctattgttattacttacgcagaattgacttggaaaagaagaatgttggtttccagtgacagacgagatgtttggtccaacccattgtaaaggaccggcacttagattcgttgtttccggtacttgtaagaaaaaagttacttaaagaattagtgattcttgtaacaaattttgtcttcttcttcttttttttttgtttatcaagtagttgttgatcatatttatgatatatttttttcttagtaaaaccttttatagagcgcatcattatgtgtgctaattaggcaatccactgaatcaggctcttgtttcctatttgcgtatttgattgaactctttttcttaccgattatatatgcataagaaagagtgttataataaaatatgctattaccaattcatctatgagaagatataccagccgacaaagaggaactcctcgtctccgatagaggttctttgcaaatgaagttcatgcgagtagcttaaaaggcttaagaaaattaacaattcattaatgcataccatcgccatacttatgtttttgaatgctaacctaattcaaatgacaatacaatgtccttagtgaaaaaataaagctccaatagtacgactttgcttaaagaagtagagattgtgaaaaagcggtcgatctaaagaatccataacctgccaacttggtaagaatccacttcagaagaaaaagttatgtttcatataagaagaaaatgagattaacaaatctctaaaaaatataaatcaaacttttgttggtattcaaaaccttaagaagaagatcaatcttcatgttcacaccaaacccaccctaacaataaagcttatgtataagaagacatatgacttgtctaattaaaaacatattcaaagtataataatacaatcaactaggggagacaaaagcctgaagatctatgggatgtgaaagccaattagactatcttttttaggaaccaattaaaatatcttctgaaaatgcaaatatgttttttagtaatcgcgaaaaagtcagaatgaatgtccttcaccaacatctccgaaagacaagaagtatggaaagtgaataaagaataaaaataaattagaacatagctaaaaggaaaaattgatagtaaacttcgtagctacatccgcacacaattcgtctctatactaatttaatctaacaagcatatattttgaaaacacacctatatatctaagttgcttagaaattttcattatccttctgatttgtaagagaacaaaaacaaaatggaaacttcacattattttcgtcgtcattgcttcatcattttgcttcttgttatgtttctttcatcggtttctaatcttgcttcaaaaatcaacaacagttcttttgatgcaagaggcactaaaatcaatagtgatccgaaacatatctccaattcaaagtccggaggatctcctcaacgggacaaagaatatcctctgtgcgggtcgaataacccgtcagaggatggtatcatatatgcacctttttgcgacaaaggatatgttttttctcgaatcaaattcgctgactatggtcagcccggtggttcatcatgtgaaacgcttaaacgtggaaactgcggtgcgccggctactttgagactcgtcaaagaggttaacaaagttactcaacattagtaatcttgtttgacgataaatcttcttatcgattactattttttgtttatgcagaattgtcttggaaaagaacggtgtaggatttatattacagacgagatgtttgggccgacgcattgtaaaggacctgttagcttcgttttttctgctatttgtaaaaaaacttgagctttcttatttcatacgttaagggaaagtaattcttataacctttttttcttccctttaatgttttgatggatcgcatcatttttgttgttaatttacgtaatccacggaatttaattatgattttgtttcctatatcaacttttttttttctgaatttattttatgagaaagagtatatagtttggagactaactaaatagctgacgatatgttttaccgcatatctgttcaactacacagatttatgtttcaaggagtgaacttgtactcgcctaaagataacaaactcaacaacgtattttctctttcaatatttcggccaaccctagcggaaattcaatttcttgtacactgatcccacttttccttgaagatcactagcaaatttcaaaaattacataaggataacgtattcactttttttttttaattcaaaagagtttctccatatttatcataacatgttaacaaagtggttttaacatataaatgaccctttaactagttatacaacggattatttttataactcagaaaaagtgacaaactgatgaatactttgaagtttgaatagataccagcggaataatttaacgttaattaacgtcaaagtgatataacacatgcatcatttctatttaacacatgcatcatttctattttacctttatagcgagcattgatgatttaatttgtcgggaacaagagcaaaaaattaagctttttataacataataaactctattagcagagggccagagacaaaactgtaataagattgacgaataattgtgaaaccaattaattaaactctcttttggaagattttttgtttttttcccactgaaaatggaaaatctattaataagtaatcgtagaaaagtcagaatgatgtccttcaccaacacctccgaattccaagaattaaaaagaaaaatcgacagaaaattttgcggacacattcgcactcgaattc

SEQ ID NO: 100 - DNA, 92611 bp, Arabidopsis thaliana
aagcttgaagaaatcaagctcattgcgaagagtgtattttgagtgtgaggaaaatatgaatcgtatcaaaatcgttttatttatttattgaaagctcatgtacaaggagaatgagaacatgcttctacagtttttgtcagtataaattggtaattatttgagtactttgtgtatttttatggaatagctaaatactttatatgtttttatatttttttttgacatgacataagtaaatatctaacaaaaataaattctcaaatttgagtctctatataaaaataaaaccaataagcaaaaaatattaaaatctaaaaaccaatggagaattaaactgtcttctactaacaaacccttatttctttttcttcttcacttaattaaaaatagtaaatgtattattagataatcgtggaaaagtcagaaggaatgtctctcccctacacctccgaaaaccaagaaatacgagatttgaaaaatagaaatacaaattgatagaaaatgttagggccacatctactcacgaatacgcatctccaaagtagcatacttaacaatttccttatccttgattatgagaatagaaaaataatgaaaacttcacatacttttcgtcgtcgtaatggcttcgttttgcttcttgttctgattcatttttctgtgtttggtttctcttcaaatatcgatgtttcttatagagcaagaggcatcaaaatcaacggtgaccaaaaacgtgttctctcgaattccaatcaccctcgcagcgattttcggaaatctcttcaacatggaaaggaacattcagcatgtacgaatcataaatctgttcgaggtccaataacgcgtattttttgccaagacggatatgttatcaccaatatcaattttgccgactatggaaatcccactggtacatgtgaacactttagacacggcaaatgcggcgcaccagctactttgaggcttgtcaaaaaggttagcagaattaactagcgttaatatgttatgttggttttcttgtcaatgaatcttatcgtacgttggcattgtttatgcagaattgccttggaaaaccgaagtgtgtatttttagtgacggatgagatgtttggtccgagccattgcaagggacctcctacactcgcggttgacgccacttgtacaaaaacctaggtttcttattcctacttaagatttttgttatagagattgttttttttttctctttctctcgtttcaatcaagttggtgttggtcattgtatttttcaaatttcaaaacataagcaaagttagcaaaccaagcttttgcgttacatgtacaatcctatacaaactcgattgacgcttacgtaacgtttgtgcatgtatacaccataatcgtcaatgggacaaatgttttggaaaatgttagttttaccaacacaagctagaaaagttagcctgacacattccctagctaacattagaacaactagatagactaataataaaactaaggaaataattcaaaataatgaatataattgtgaaatctagttatagaggtaactggatttcaatcccaattttgaaatcatttatttcgtatatatagtacattataattatcattagttgggtgggaatgtaagaacacaaatgagctgtcatgagatacataaattaatggataatattctgacatttatacaacaataaaacacttagcagaggcataattctctaaaatttaactaacagctagagataactgtgaaacaaattaaactcatcacgtctatgaaaatagaaaatgttactaattccttctctttcactggagaattaaaactattaataaataatcgtggaaaagtcaacaggaatgcctttcaccaaactcctccgaaaaccaagagaatggaaaaatatagaactacattgagaggaaatttcgtggccacatttacaaacgaattcgcctctccaaagtttgattaatctaagtttaacgaaagcaaaagtgtaactacatccataagaagtctacttaaacaaatgtcaataccttgattttgataacataaaacaaaaacaaaaatggaaactttacaatgtcgtcatcagcatgtcttcattttgcttcttgtcctatttcattcctctctgtttggtttagcttcaaagatcgatgtttctgacgatgcacgaggcatcagaatcgacggtggccagaaacgttttctaactaattctcctcaacatggcaaggaacatgcagcgtgtacgaacgaagaacctgatctcggtccgctgacgcgtatttcttgcaatgaacctggatatgttattacaaagatcaatttcgctgattatggcaatcccactggtacatgtggacactttagacgtggcaattgcggtgcacgagctaccatgaggatcgtcaaaaaggttaaaaaaataagctaacaaaaatcaacattaacgtgtgtatagttaatactaatagatatttttatgagtcttatagttagtaatgatttgtgcagaattgtcttggaaaagagaagtgtcaccttttggttacggatgagatgtttggtccgagcaagtgcaaaggagctcctatgctcgctgttgaaaccacttgtacaatagcttaggtttcatcatatattgcctgcccctatatagagagatttcttcaagtgtattgtttttgttcatcttttctcgttttggtcaagctgttgtttagagtttctttgatgcatggatctatatgttgtcgtcttgtcgattatgtttcaagtgctttaattttacataatcaatgtagtcatgtttttgtttcaacgcagacattaatggtttactatcacttttttaaatatggaagtatatccatggtgaattttacgaatcaaactcaagattgattataagagtcagtacttcactctattttatactcaacgttagcacttggcagtgcatagatcccacatttattaagtcaattttcttattactaatctagatgggttaacatgcaattatggaaattgtcaaaaaaaattatccttagattggtttgggaaaaaagaaaaaaaaaacaattatggtaaagtaaaaaatgaagaagatattaatgacttattaagttcaattatgacttaaaagctgacgtcataaagaactggttggagttctacgaagaagtagtttcgaatccttgacgtcaacctaaagccaatacgaagaagaagaagaagaagaagaagaagaagaagaagaagaagaagaagaagatcgtgagccactatattcgcttccttcctctaatttccgattccaatggacctgaatcgcaaacacaaggtatatctcctccttcttctctcgctactgttgaacttgaaccatttcgatgctgtttctgatcatcgctttcgaattcgatgtaaaatctcttcgttgcattgaattttgttttctttttttctctctcaaaattggtggttctaaaggaacgtaatcgttttgataccttgttcgttgttaaattataacacttagggttcttaattcttatagcactcagatttgttgggatttgaagctcctcgtagtgaagaagaagcttgacatgcctcaatttgaatcctagactaataaatttttcctgaaaaatcaattcgaaattaggattgggaatcggaaattatgtttcggtttgcttcacaaaagttgatctaaggttgattacatgtcttttaaattggtgcatgacgatgcatctgtgattgttaaatgaactcttatcaggtgtctcttagaggtgccagcagtggggagatttcaagggatgctttgcttgctaaagtgtctcaagaaagggagctacgcagttatgcaagacgcgctaatgctgcatcactttttattcaagtacttcttctttctgctaactttggctgacttggaatctctcgatgttgtttttggttttacgggacttttatctaagctacatagaagaaggcataaacttaaaagtaaatttttccattacttgtagagagtttggaggtcttacattgtgagaaagaaggcagctatagagatccaagaggagtgggagaatttactgagttgccattctgttacactgaccaaaagttgggtatcaagcagagtattgagaccgtttctcttctttgtcagatctttgtctgtccaacatcaaaagatacaggcaagagaaatacactgcatgcaaacttgctttaagattctattggaaagcatcaactctaatggtatgattctttcttttttttgtcttgctttaatttgaattgtttgtcttgcaaataaggagggaataaatcttgttgtcttttgcagatcaggggtacaatttttgttcactagcagttggtacatctgaagatagtaaaacatgggcctgtcaaacacgaaggatggtttctctctgctctttccttctcacggagtgtaattattcgcaggaaaggataaaagatgttattggtgtcaatgcccttctattacgtattcttattgttttaactgatcccaaaagctggaagattattacaaatgaaaactttgaagatgcagaaacagctaaaaagataattattcagtttatagggagctgtaaaagtggatattactcagcagttcggagatatatcaagacattaaccaaacatacagacgagagactagtgattactacaagtgcagtaactttggctctacgaccattccacgtgaaacagcctgcttttgttgatgacaaccaaccggacacgaatttggctgttgaagaatatgtttctctaatactgacgattcctcggcttgtttgctacctgccaagcgctctcatacgtgcactgaagcacaagagcatactaatgccaagctttcacaccatattggtaaaactcatatcatattttcttagaccaattaatttcttcttaaagtctcaaataggatgtagagagaattggctgactagttttaaatctctgttacttttttcgacgaactagttacttatttttttcaaaaaatcgaagtgcttattaaagtgtggcaggtgacaccagcttttgaaggacaaaatcttgaacataatatcggaaatggagaattcagagaagcaaagttgtaccatggagataccttctgttggatgggttatcgggaacatcatatccctcgcaacagttagtgaaaccgattttatggatccacaagaatcaaatccagagatgttttatgtcttgtatgttcatgttattgtgactctcgccgagaatctattgtctcaggttgaaagtgttggaattcaggatattcatcttgatattgaggccacatcgaatgagacagagaaaggaaattcagttaagatttcttttgtggaaatgcttcgaccagtatgtcaacagtggcatctcgcaaaactgttggcagcttctgggaaagaaattcgtgttatagcagataaagatgcatcaacgagtagtaagaaaggatcagaaacactaggactgcttgatatagcacgattatattcatgcatgttgagaatcttctgcgtgatgaatcctgttctaggacctttgcctgtccttaacatgttatccttctgtcctggatacattgtctctttgtggaattctctagagagtgtcctactccctgaaaatggttgcactgctgacgatgcatctcatggatctgctaaaacttcatggaatacaagaagtccttctgagaagaaattgaaacatctcaagaatgacagtgtcaacaagtgggtgaatgtgctaaacaagttttctggtaaatcaccgggaccacgtgaacatgtggagtgtactagtgatcaaccaggatcaggccaggttaatgagtcaactaatgatgtatgggatgtggaaactctgaggggtggtcctgtaggtatctccaaagaagtgtcatgcctgcttcatctattttgtgcaacctatgcacatttactcgttgttcttgatgacatacagttttatgaaaagcaggtaaatatgctatatggtttcctgcagcttatatgtcattagtctgatatttactaaaggtttgttatgtcatataggtcccctttatgctagagaagcaacagagaattgcatcaatgcttaatacactcgtgtactatggattgttgcgaggcacaggtcctgagagtagacaactgatggattctgctatcagatgtttgcatttattgtatgaaagagattgcaggcaccctttttgtgcttctgccctgtggctctcacctggtagaactagtagacctccaattgcatttgctgccaggactcatgaggttttaccaaccagtgatgttcttacaactccaagcatgggttctgttataacaattactccgcatgtctttccatttgaggagaggtaatcttacgttgattacccttcatagcctttccatgtcttttatctttgtgctacaataacttctaactaactttatctgttgaatgatgttcatgttgtgctatccctgcagggtccatgtgtttagagagtttataagcaaggataaagcttcaaggaaaatggctggtgaagtggatgcacctggtgcgaggtcaatagagatagttgttcgtcgaggtcatgtggttgaagatggatttcaacaactgaattcaattggtagcaggctaaaatcatccatccatgtctcgtttgtgaatgaatctggccttcctgaggctggcctagactatggtgggctttcaaaagagtttttgactgacataacaaaagcagcttttgctactgagtaagctcttctgtatgtatgcatactttattctagtctttgttgttacttgttccagtggattaagttttatttatttattggtatgtccattatttttcttttccaaaaggtatgggttattctcgcaaacccctacttcagataggttgcttgttcctagcccatctgcacggcaccttgagaatgggattcagatgattgagtttcttggaagaattgttggaaaagctctatatgagggaatactgctggattactctttttcacacgttttcatccagaagcttttggggcgttatagctttattgatgaactatcagggcttgatccagagctctacaggaacctcatgtatgtcaaggtaaaaaccgttgcaggtgatatatctgtcgcctcatatgtcaaaattcaatcttgtaataagtatcacaggaaagggtttctgagatcaagactttgtttatatgcagcattatgatggtgatttgaaggaactctgtctggatttcacagtcactgaagagttttgtggaaaaatgagcataattgaactcaaacccggtgggaaggatacttcagtcacgaatgagaacaaaatgcaatatattcatgcaatggctgactataaacttaaccggcaggtatcgtctttttaacgttttataaataatcttaaggtcaatcatcctgcaaaacaaaagttacttcataattaatgaggtaaacatgttgtcctatgtcttgtctccaatgcagattgtgcccttttcaaatgcattttacagaggattgactgaccttatatctcctgcttggttgaaactatttaatgcccatgaatttaatcaggtgtgcggctctaatgtaatgatttctagatttttttcttttgtacaaagctattgtctcacaaagattcctttacagttactctcaggaggaaaccatgatattgatgttgatgacttaaggaggaatacaaaatacactggtggttacagtgatagcagtcgaacaatcaaaatcttctgggaggtaataactcttaatcagaagtcctgatctctacgttttctttctattctgtttgccaatttatgacatatgctgagagtttgagtgcggcttgtataatttctctctgggcatcctgtctcaggtcatgaaaggctttgaaccgagtgaacgttgcttgctcctcaaatttgtgactagttgttctcgggcaccactccttggtttcaaatacttgcagccaaccttcatcatccataaagtttgtttttgaacttaagcttagaaatgtatgtttgatattctgtttggtaattttgttttcttacttttgtgctttttcatcttctgcaggtctcttgtgatacctctctttgggctgctattggaggacaagatgtagaaagacttccatctgcttctacgtgctacaatactcttaaggtgaagtttcaatagtccaattatctttgtagtctacatgtgaatattcctatatcttttttgttcagtctttctttttggatttcttcagcttccaacgtataaacgagcaagcactatgagggaaaaactattgtatgcgattacttcaaatgcaggatttgaactctcgtagagacctctaaccaggtattcatcttgttatgcacctagaccttttatcctttattctattcaatgtatatggcttctgtcaagttaaactagtaaggctggtgtaaacagtgtgtttggtttatcttaagattatgggaacttgtttcttcttggtagttgtatatgaatatatgataatcaactaagctgaaaaaatcttcttaagctttaccaaaattcttgctgtaatcaaccttagaaatgttaaagaggtagattcggaacaaaaataaaataccaaagattgtgatcttctcaaacaaatcttggacctatagacccatcaggccatcacacagtgacacagaccagattggtagtttctacattcagtcacacacacgcacacacaatctgtctcttatttgtgagttacatatatagagagagaaagagaaagagagaagagagagagatagagagagagagacaaactttggtagctatttgtaggtatacagtttgaattcaatccaactggaatgaagctcaattcaattgattagagaaatcccttgacccagtagttgaccagccaacagctcgtttacagcctctgtgggatgaaatccatcccaaaacacatatcctgtggcatttacacacgttccgaaggatagagaattgcaaaggaacgatgtttctattgtccctgttccgcagcatgccctttttgtttcaaagaatcctagaatacatgtagtttagacatttaataagatgttaatggtatcttgttagttgctaactagattaaatatctgagttcttcttcctgtgaatagctcactctatcatggtctaaagttgaatgaggatttagattttgcaggtgtgtaccattgtcagttgggttggtgatgatgtccaggaaaggttggtagacattaaaggcgacgagtctgaggcctgagtgtctattcatcagtaaccgggttgtgttctcaagtttagtattgaacatgatagcatcattgttcagtctctcaacacaacttttgtttcctgcaccgaaaagagtgatagctgcaggcaggcaacccatcggcggtagcgatatcactccgattctccttgctcctagttcatacagattctgttacaagtgacagtatgattcttgttcacacaaaaaagggtaaataactgatacgatttttttgtgtttcttgtaaatttgcacattcatatggttgccttattatgaatatcgagttctacaagttcgttactaaacttagaagtacctggatgaattctgagaaggatctcaggagaatgtcagcgaactgatcaggtgtatttaggatgttgagtagaggattgatgtaataattctgaagaaagtcgctagatcccgcactcaaaatgtggatacctctagagaacagtatgcgcgcgttccccctcccgatcattctcgttactctattttgatacgccctgtaatagctcagctgtcgtgttaaggagatcgagccctgcaaaaggaagagtaaaaccttatggatcatttcttgggtatgtgtgtaatgatgtttgactgtgttgtctcctttacaaatggaacagatgtggcatcatagtatcctgaagaagctgatgcaaagttggcaccgatcaggatattctcgttgcttgcttcccggcttaggaatgcaggtgggtatgaagagaaaccaaggtactcggctagacacaagtaggcagattaaaaaaccaattagattaggaagagagaaaaagtatttgaaggtaatacttgatggagagatagatatatgtggttttgtgagaaagactttacctgagaaatctacagcgagttttccgttgcagaatcttccggtgggtctttggtcgatgaagtctctaccgtaaggaagaaagttggatttgacaatgctgagtaagttattgttgttgccaacgtcaacaatggagtcgccaaacatgatgagtgcaggaacaacagctcctttggatttgcagaagaaacaagaaaccaagagaagaactctaaaccccgaaactctcatcttttgcattccttttcgttcctgtctaatgcaatcaggtcgttaggacaaatagagaagagagagaagcagagagaaagaaatagagagtagtggtgagaaaatggagacttaagaagatgatgcatgttatacaaaatataatcattctccccatgcttatgtttaagataaagaaaacgcatttgctagtgcaatagagtaggtggaaattgtttatgaggtcagtctctttggtcattgatcatgggaccatgatcagtaatatctttgcatcctcgaacataaacttccgtcatatcgcgaaatttcaattcgggccacgcgtggaggctttggtttgaagggtagctctatcaataaaaatatgggtattggggaaatcatctaatcttgattgattgattgctcaatacttcaataatctaattttggtttctgttgaaccgttggaggcatgaatataaaattctgataggatacagttttcttgataagagatgatatgtttgaggaaatcaaagtgtgagctccaccaacttttagttgttgttcttgtaataatgtattgggtaatgtggcatccacctcaaagattgtggttaaaccatcatggttttttcttttcctttcttctttcttctattgtgcttaagccatcatggtttatttcctttcttgtacatagaaaagtcataagctttttaaaaaaacttatgaagaatattacaaggaaaaaacaagagtttgggccatatcaccaccatggaagtaaaaatctctacttggtacaagacccaaattagtagaaaatggcttcttttgtaacaaatttggactgttgggccatattgttttgtttatacataaattaaagcccaaaatgatttagttgggtcgtctagaataaaccgaactattaaaaaatcattggtagagtcggttatgttatttcaattgtggctagcatgaaattaagttcaattattttacatttttactattaagcttcatattcttacgtcgaaccgaattgaaattagagaaaacagaaagataaaccgaattataaacaaaaacaacatagactagagtcggtttaatcacgtgtagcttataaattaacatcagtaaatttccatttttactagcagcttgaaattaacgtcagtgatttttacaatccttgactagtagcttcaaagtaaagcagcaactcttatttatttggggttttcactttttccccaaaattgtctccgacttcaaacataacacaaatcgttcatcgtcttccttctctctctctgattctctcattcgcgaatttcaaaggttctacttctctcagaatctcagctctttcacgaatcaatggagaagttaagatgaatttgggtttctaatttgattggttttttgttggctacagctatggcggatacggtagagaaagttcccaccgttgttgagtcatcttcatcatccaccgttgaagcatctaatagcgccgagaagactgagcccacgacggagaagaaaaagtggggcgatgttgaagatgatgatgatgaagaagaagctgtatcggagcttaattcattgagcattaaggaagaagagaaacctgattctattcttgaggaacctgaagattctaacatcaaagctgtattacttcaattccctctctctctttgatcctaattacagtctagggttattagattttccagattcgtttggttgattttgaaatctggtgttttttgaaggttacttctggtgacacaccatatacatcagcaagtagatttgaagacttgaacttgtcacctgaattgatgaaaggcttgtacgttgagatgaaattcgaaaagcctagcaagatccaagctattagtttgcctatgataatgacgccgccacacaagcatctgattgcccaggctcataacggatctggaaagacgacttgtttcgttcttggaatgttgagtcgtgttgatcccacattgagagagcctcaagctctctgtatttgtcccactagagaattagctaatcaggtttgtttagttactctgattttggttatgatctgagagtaatctgattgttgacttcttttaatggttgaatgacagaatatggaagttcttcagaagatggggaagtttactgggatcactgctgagttggctgtgcctgactcaacgagaggtgcaccggcggcaacaagaggagctcctgtttctgctcatgttgtgattggcacccctggaacgcttaagaaatggatggcatttaagagactaggtctaaatcatttgaagattctggtttttgatgaggctgaccatatgcttgctacggtatgctctttcttctgttttacttggtcttgttattttctcaactgtaatgatttaacttctgtataatgtgattatattttcccttcatatgttgttgataattgttaattcattgctgttgcaggatgggtttagggatgattccttgaagataatgaaagacattgggagagttaatcccaatttccaggtctgtttaactagtgtctgatttggtcatgcttcttgaattataagtaggatgacagttgatatctagtggcatatctatcgtgatatctagggggcacaagatagtctactgagcttatagttatacttgtttcaatgttcagaagctcttagtaaatagaagcacctcagctgtgtttttttctgttgtttagagccgtcatatcttaagatgacatatatgtctgtgctaaaatgattatgaatatcttcactgcagaaagctgtactaatgactgcttgtgtttcactatatttatggctgttaatctcaattcaaaggaaactctttttctttctttctcgtgctagatttgattgtgtgcttgtgttcttgacctattttcaacaggttcttcttttctcggcaacttttaacgaaactgtcaaagattttgttgcgcggacagtcaaagatcccaaccaattgtttgtcaaaagagaggatctggctttggactcggtgaagcagtataaagttgtttgcccgaaggagcaaaacaagatcgaagtcatcaaggatcagattatggagcttggggatattgggcaaaccattatctttgtgaaaacaaaagcgtctgctcaaaaggtgcacaaagcccttgcggaaatgggatatgacgttaccagtgtccatggtaatctgactgaatcggacagggataagatagttaaagagtttaaagaatgccttactcaagtgctcattgctaccgatgtcattgcaagaggttttgaccaacagcgggtaaatattgtcctttgagccttttcctttcttctcgttttacctcaaagatgcttcgtagttaatacctcttgttggttatatacaatacttgcaggtgaatttggttgtcaattataatcttcccactaaatatgaaactggagagccagattatgaggtgtaccttcacagggttgggagagctggccggtttggtcgcaaaggtgagttttgattcttctttttttctttctcaagtgtttccataagttcttatcagtttctgaactatgtatttgtattgtaggagcggttttcaacttgctgcttgatgatggctgggataaagaggtgatggagaagatcgagaagtattttgaagcaaatgttaaggaggtattataagatttctgaaaactgctatatatctttcaagtgtttgttaaaacagtatccaacgattttaaactttgctgcagatcaagtcgtggaactcagaggaagagtataagagtgcattaaaggaagctggcctgctggacgagtgaggaagagagacagcatgtgttcaaaccatcttaaaagactatgtcgtctgttttcttgagattgttttaagaaagaaacttgtatacctctttgaggttttcttgtaatctttttatctgattgctgagagtttcagactttgtagattttttgttaagggaaaaggaaaacattttttatgtcaatgtcaatcactttagtatgaacctaaacagtaaacagcaaagcattttttttacaacaatgggtaagagtcataatacacaaccaaagtctcgaattcaatgtgtaaagctttttaatctcaaatgtttgacgttttagcggcaagatggatcaatgctcgtcgatgataggtagtacgaagcttcttgtatttctgcacaaatgctgctgtatcaatctccttctctaggaacttttcttgcagggcttcggattcttcatccacctgattcatagcctctgcaaaacaagtaaaaggtgtttagaacagtagagaaaatgagacgaggggagaatccattgcaatggtaaattgttaccttgaagtttatgaagaagagaaccaggggagtagaatttgaggatctcttctttttgcctctcaagctcattaagcttttcttgcgcagttgcgagctcagttgtacggataattctgcactgtaaaataagtaaagactggtaaatcagagatatcgaaaaggtataacatggtaaaactgaacaagaaaagttggttcttgatacacacttggtttctgagctccattatctgtggctccttctccaagttgtctcctgttacatttgatcaaatggaaagttctagatttctggattgaactaaagtttcctgtagaattacatgaaccatagagtacttactagctagctgcaatgtttctctacggagctcatctttgatctgacggacagaaacaaatcacgaaaaaattaacgtccagagactataacaaggaaccagaaagctgatgacatgatacaggctttatcaaacaatatcaatgtatagacttgaaagagcactaatgaattatatcaacacagaactaaagaagctacatattcttagagctacagataagaccctcggttatccagaaacaaccgactgttttagagactataacaaagaaccagaaagctctaattactggcaacatgtagaagatgacgccatgataaaggcttcctcaaacaatatcaatgtatatacttgaaagagcaccaatgaataatatcaacacataactaacgaagctccattcttaggactacaattaatagtaatactcttagctatccagaaacaactgactgttttagagacttacattattctggactttgacctggtcaagagagagcagaaattgctgatacgcatctttgtcagagagaagcttcctgagttcatccacgctacagaaaagtatacactattcaaaaagaagacatacaaaaaaaacgcacactcgagagaaggataacaaacaaacaaacaaaaagagcaaaccttttgtctttcaagaagacgataatgccagctgcttcacccggtgatacttgtgctgaaatctgacctgaactttgaggccgggatgagcttggcgagctaactaaagaaggcgagtaccatggcgactgtgaagaagcttcctgaggacgagattgcccttgttgttggtcttttgatccccttcacgtacacaacaaaaaaaagaaacatcatcaactaactatctcagcttccaagttaatataatacatcacctcataaacttgaaaggtgcatttatacagcacatcattgtaaacctaatatcagtaactatgaaccctaaatcagtagctgagcaaaatctacacttgtcaattcacctcaaaaacctcaaatatatcattatagctcaacaaactacacaacaacaagatttccttaatcgctaacagacctaatgtctggatcacgcaatttcatcaataacatatgaatcagatggcaaaaaattcgcaaaatcataccagaaattgaacatcgtttctagaattcgccgactaacgaaaggaattgactttttcttgttctcttgtacttcttcttcctaccagatcgacaaaatttaacaactttacagaaacagagtttacagagtttcaaagaaaattcgatcttctctgtttcgtttcagattttgctacttgcttttaaaaggcccaaatacgaggaggcccatattaagttttgattaacaaaacgtagtcgttttatgcatcgtcgtccttatccacgcgtaacggttcgcgtttctacacagagtcaaatatttctgcacggaagcttcgaaaagaggtcatcaatggagtcttcactcttttctccatcttcctcttcttactcttctctcttcactgcaaaacctacgcgtcttttatcaccaaaacccaaattcacattctccatcagatcctccattgagaaacccaaacccaaactcgagaccaattcatcgaaatcccaatcatgggtcagtcccgattggctcacaacactcactcgtaccctttcctcaggaaaaaacgacgagtcaggtataccaatcgcgaacgcgaagctcgacgatgtcgctgatctcctcggaggtgctctcttcttacctctctacaaatggatgaatgagtacggacccatttaccgtctcgctgctggtcctcgtaatttcgtaattgtgagcgacccagcgatagctaaacatgttttgaggaattatccaaagtacgctaaaggcttagtcgctgaagtctctgaatttctatttggttcgggtttcgctatcgctgaaggacctctttggacagtaatttcatctcctcctatctcaattttgaagtttttggaattgtggaagtaatgtgtgactgtcttgtatgataagtaactctaattttagggtttagattccaatcttctctattgggcttagctgaagtctgattttttacataggcgaggcgtagagcggtggttccatcgcttcacaggaggtatttgtctgtgattgtggagagagtattctgcaaatgtgcagagaggcttgttgagaagttgcagccttatgcagaagacggaagtgctgtgaatatggaagcgaagttctctcagatgacacttgatgtcattgggttgtctctttttaactacaatttcgattctttgactactgatagtcctgtcattgaagctgtttacactgctcttaaagaagctgagcttcgttctactgatcttctgccatattggaaggcaagtttcctgtgttttttctgtggtttgttgattgtgtggaacaattggattcttgttaattgagagggtttggttgtttttttcagatcgatgcattgtgtaagatagtcccgagacaggtgaaagctgaaaaggctgtaactttgataagggaaactgttgaagaccttattgctaagtgtaaagaaattgtcgaaagagaaggcgaaagaatcaatgatgaggagtatgtaaatgatgctgacccaagtatcctgcgtttcttgcttgcaagcagagaagaggtttaaacttttttccttaagtttataagcaaatttggcctttcattatcgcataatcgaagctgatgttgcattgtgagggttttcaggtatcaagtgtgcagttacgggatgatcttctctcaatgctcgtagcgggtcatgaaaccactggatctgtcctcacttggacactttatctcctaagtaaggtaccttaatgtatcttctactttgctatgctagagaatttacttggatgggagcttctctgttctcatttacctcttcaaattctctatgttcatagaactcatctgcattaaggaaagcacaagaagaagtagacagagtgttagaaggaagaaacccggctttcgaggatataaaggagttgaagtacatcactcgttgtataaacgagtcaatgcgtctctatcctcatcctcctgtaagcaatcaagctcatctctctaattattcatgaactaaattttctgattgatttgtttcctggtaggtcttgataagaagagctcaagttcctgacattcttcctgggaactataaggtcaataccggacaagacattatgatttcagtctataacatccatcgttcttccgaggtacagttctcttccttctctcgtccatagtataacataggggagcctaatccttctcttcaatgatctttgtgtggttcggatatctaaccggagtggacattcctagtattacattcatgcccacatttcttatgtgtttgttgtttgttattccaaaggtatgggaaaaagctgaggaatttctgcctgaacgattcgacatagatggcgcaatccctaacgaaacaaacactgatttcaagtaaactcagtagaacacatcttttgacacaaactactgaatcaagattagtggttttgattagggaatttaaaagatgattttcttttttcaccagattcatcccattcagtggagggcctagaaaatgtgtaggcgatcagtttgcattgatggaggcaattgtggcactcgcggtgtttcttcagcggttaaacgttgagctggttcctgatcagaccattagcatgaccacaggagcaaccatacacaccaccaatgtatgccaatgttctcacactcgagagattaatgagagtgtctgttttgtttagaatgattccaatttctctaatgctgatattttcaatttcagggattgtatatgaaggtgagccaaaggtaaaaaccagaatttatgttttcatgataattgattggtgtgaatggacttgtttcatagtactcttgagaaataaccacaaaaaaatgaattatggaaaatagttgtaccatcggaaatgtgaattttgaacagtgagatgctagtaccattaaagtttggtaattgtgttatcatttcaaatcaaactttcatacagcttgtgtttgttctccatttttcagtaattacgaaaatcaaaattttatttttttttgaatttctaaataatagactaaggtctaaaaccatcccattccatatggaccacacgtaacattaaccttaaaaaccatataaaaccatataaaaccaatactagtgggttctatagcgatgtgtagtttcactttcacgtacgaggaagattaaaaaaaatggagaacgaaagctcagagagtagaaacagagctcgtcttgccattatggagcttgctaacatgattagcgttcccatgtctctcaatgccgccgtgcgactaggcattgccgacgccatttggaacggcggagccaattctcctctctctgccgccgagatcctccctcgcctccacctaccatctcacactaccattggtggcgaccccgagaatcttcagcgtatacttcggatgctcaccagctacggtgtcttctccgaacaccttgttggatccattgagaggaaatactctcttacggacgtcggaaaaactcttgtaaccgactccggcggcctctcttacgctgcctacgtcctccaacatcaccaggtttatgactcattttcattttccaaaattggagtgatatattaaaggactaatgatggtataataaactaatgtctaaaacttgttgtgaaaatgatatatattacaggaggcgttgatgcgagcatggccactagttcacacggcagtggtggagccggagacagagccgtacgtgaaagcaaacggcgaggcggcatacgctcagtatgggaaaagtgaggagatgaatggtctaatgcaaaaggcaatgtctggcgtatctgtaccgttcatgaaagctatattagacggctacgatgggtttaaatcagtggatattttggttgacgtaggaggtagtgcaggggattgtctgcgtatgatccttcaacaatttcctaacgtccgtgaagggattaatttcgatttacctgaagttgttgccaaagcccccaatattcctggtgagattttgtatttatgatatattgtacgtacgttattttctgaaagtaaaaagctatttttagtaatgtacggagtaataatggatgatatattgtatggtttaggagtgactcacgtgggtggggatatgttccaatcagttcctagcgctgacgctatcttcatgaaggtttgttgtaacattattgtctgtcacgagaatacacctactaacatttttgctaataggacgaattctagtttctgtatatagttttaatgtttagtgatataggtataaatttataagtcgcttcggacaatatgtttggtagtatatagtcttagttatcgttagatcatgcgactggtcactttcatttatttatgatcatttaaatattgattatacatttctcaaaccaaaaacttgtgatctgttagaccatggatagggatctcatgtttgttgaaagaacaacacaaacaaatacacacattttttgcttctctggtcccaaattaatatcttgtaatattgttgtttgagtgtaaagtgggtgttaacgacatggacggatgaagaatgcaagcagataatgaagaattgctacaacgcgttaccagttggaggaaagctgattgcgtgtgagccggtcttgcctaaggaaaccgatgaaagtcaccggactcgtgccttgttagaaggtgacatctttgtcatgaccatctatagaaccaaaggtaagcatagaaccgaagaagagtttatagagcttggtctctccgcgggattccctacttttcgacctttctacattgattacttctacaccatcttagagtttcagaagtaatattcaagcatttttcttctcatatttctaaaagcttcaaaataatgaatcaaaagacctctttgttaattgagttgagatatctagtgaagacattaatattttcatcaagatgtaataatctaaagtctatattctaagtgcatccttaaaaggcattttccatatatataagtttcatctttcgagaaaaaggaaaaaagactctttaagtgatgatttcaagagtatttctaaatcactcattaggctaagagaagagttcgaaagtatacatattatgcacattatatctatatgaatttttcttctttggcaaaaagaaaaatcgtttggtgttattcttataaatcttatgtcaacttctacattcgatttttctacacgagactcaattgctccaaaacatcttggattaaaattgaaacgttaatactcgaagatcccttttcttccacagcctttttcgccattactgcaagttcttgaatacgtctccttcgtctcacgaattcattatcatcatcattttcgtctacacgttgacaatcttggtccatcaaaagctttatagctttcacaacactcggtttcttgaccaacactccaagtctctcctcgtctccccatctcaccggaatctccaccccaaccctaaccccgatgttcaaaacctccacgatgagtttctcattgagaaattgttcagcgaacaacggccatgtgatcattggtacaccaaaacatatcgcttctattgtagaattccaaccgcaatgagtcaagaacccgccggttgaaccatgtgagagtatcatagcctgaggactccaaccctttattactatccctcttcctctaactcgctcttcaaaattttcgcgttttagccattcgtctagctcaatcatgtgtttttcctcggtctttatcacccaaataaagggttttcccgattcttctaaccctaaacctagttctatcaattgattaggtattagtcgacagaggctaccaagagaaacatataagactgaccttggtctcatcgagtcaagaaactgcaagcattcggtctcgcttattgcgatgttaccattacttcctctatcgaataggtcagccatacggtcgttgcataaagaaacgggtccaacgaaccataccttcttattgatggcctcagcgtaggcctctgcatagccaggctccaattcctggaagctattaacaataaccccaaaggcttctgattcagattcacgcatcttctcgcgaacgtcatccatatttgctaacttctcaaaagcaccaggtaactgagctctagctatctcaatcctatgtggcattcctggtatagggaatggctctacggccgaagaaaccgagaggtgcgggctatgaagatggatattgtgcgaactcaaaagagagaagcaacacattccatggaacacgatcctcgggattttgaacctctttgcggttcttgacgtccaaaaaaggcatttatcggagattatgcaacttggagggatatcttgttgctcaagaaaccgttccatgggctcttggagtttatccacagcgtcatagaatcttcgtaggaggtctttggagggcaaagtgtccagagtctcacaatctttgggaagaccgaattctttgtaaggaattggaaatttaacgacattgatttcgagacccgactctaatcttgctcggtcaactgtcttcgcaaacctagaagcattttgaggggttgtaactatggtaacgatgttgccttgtcgtgcaagaatcttggagatgtcgaccatggggatcagatgcccttgagccatgagagggatcaaaacaaagtgaagtcttttggcttttgaaactatttttgattccatttttgggtttagcaaatgtttatgcatatacaaaattcgacaatgtgtatatacgtgtgtgaatgcatctggtgagagacctttaattaattgggaaagtcatcaaaagctgtatatatatactgactttgaacaagtcaccaaaaaagaactattgtttagagaaccaatcatgtaccctcattcttataaaaaaaaatcgctgacggtgatgagttacgtcattcatgacacttaatgagttacataagataaaacttcaaggaaaatatatatgtgaggaaaacttcaaggaaaattcacaaatgaaacaaaaaaaaaaatgttgagttatccagtgagatatgtaaatttaagttaaaagaatcttatcttaaatatttattagtaaaacaagttaaatattcactgacacttacgaaaagacaactatatatataaaaatatcgttatcttaatttggtttattttgtattacgacttctgtataaagaagtaccaagtaggtcaagcttggccgatggggctgttagagttccattgattatggttttgtctccacctaaagatagattatttgtttggttatcacatgatcgatcacatcgttaatctacatgagtttcatttaatttctttccggtgtgttcaaagagatcgatttgttaatgcaaatgaaatcaatttaaaattagcactcgatagaatttcaacacatttgtacaagagttcacgttgagctttaaattgaacaaaagaagaagaattaggacttctaattttatacaaaatgtgattttattttcctcataataaagagtcttttttgcgtaggtttaggttcacggagttcctgtttttctttgttccaaacattggttccaagatcgcatgaaagaaagagagaaggaaaacaaaatcaaaggcgctatctcaaagtcaagatagattgaacaagatatgatattcgatatgtaattttttaatttatatttttggaatcaaattcatctggttgtaatgaacgaatctataacttttttattttttttgggcaaacgaatctatacttttgatgcgaaatgattgagatattctataaagttattgtctatcagaatatgtatactaaaaagattattttgatgactaattaagaacaagataatgtatggaaagaaaaaaagataatgaatgacaacttggatatatttttatatattaatgtatgatctcaaccctcggttatgtaggttgcccatcgaaatatattggagattaagcctttaaaaaaaaaaaatatatacatatattggagattgggaaaaaatacttcccaagtttaattttttatcatcaaaagttcataaaatattttaagtcaaggcatttctacaaactaattaggaaactatatacctagctagctagcttttagcccaagaaaatcatatagttgtgatagttaatttaagcattcgttttgaataaacaaacaccaaacaccacggcatattttccttatctttttagagttccgtctgaaaaggacatatttttttgtctgcatgaaaaaggactctttgaaacgttcaaattgtgcgtatgtggcgaacaaaccaacgtaagaccagttcaacttttggaatattggagcattgacgtgtatcactcataccttttgggtaatcttaatttgtctctatattgatgggattttaaatatgagtccttgtcatatatttttttttttttgataagcaggaggttcggggcctagacccttaatccatgcagggtccggagaaaaccaggtgaaagtctctggccaaataaaaataactagcaatttcacgcctgaggggaatcgatccctggcctggaccaaccgggcaattcctgctcaagtggaaaccagtagactaccaccacttggtttccttgtcatatttacaacatgaatggtatacatagtattgcttttcacaagtcgtcttctactgataacaagtttcattattttttttgtaatcaaatattatttgaacatttatcttcaaatgttctcttttccgttcttgttttatgtctttgtttacaacttgtaaataaaaattctaataaacacactatcatgtatatttcatagtttcatttagagcaaaacataatattttaacacaaatgaataaaaaagaatccgctctagttgaattgtttaaaagtatatgacatagtttcactttgcaactgtgtctacgtatatatattcattttgtttgatggagcacgcctatttttgcataagaaaaatactgaaatctcttactcatgtaatgtgtatctgtcttcaattaccaatcattggtattagaagacaaccatggctttcactaactgctctgcgatcagctatgtacaagatcttcatatttgactaattatattgagacgaatcaatcaataaacttagacttttaatcaataaaactatatgagaaaagcaaagccacgtccaaatgtcaaaaatgaatcaaataaaacaacttgcaaaagaagattcaccgaaattttgaaaacaattctgcaatcttacccggcccttaaaggactgactagtatgagtatcatatattaatctaatcaaaatcgatgactggaaatatcttcttacgcaacacattaacatgaagatgatccaaagttccaaactaccgtgccaaaaaacttgatttttcaaatattttttagcagaaaactgaatagactaatattaaacgaagaaaaaacgattcaatataagtcatttgccgatgatcctctcttggtcgtctttgaaatactaatataacttattttcttcatttaatgtgacagcaacagcaacctctttatgctttttaaattttatatgtttaactcattgtatataatttgatgtttttgaatcaaaatattaaatggagatgagtttttggtaaactctagagaagatatgttacccaggcccactagacttatatatgggctctaagtttaataacaaaaacctatattttaatacatatgggtccaaaagtatgaaacaaattctgtctggatattgtggatatatacagcacaaaagcacctttgacacatgaaacattgttaatctaacatggaaaataaaacactattttataagcatatattttgtttttctctggtgccaaataccaaaatttaaaattgattttgtgattgctccataatatcttgaatgagcaatgtgatattagaatctgaagatcctcctttttccaaagccttatttgccaagtcactaagttctgtaacttttcttcttctctcttctgcttcttcactatcacccattagctcatccacagcttttctcacacattctctgctcaccatcgctcctatctcctcttcttttccatatttcatcaatttctctactcctatctttaaccctgcttttagtatctgcacaactaacttctcattcaagaattgttcagcaaacaaaggccatgtcaataatggaactcctgcagtaattccttctagtgtcgagttccatccacagtgagtcaaaaaccctccaatggatgcgtgtgagaggatgaaaacttgcggcgcccaacctttgatcaccagtcctctatctttgatccgctcttcaaatccgctttgttgcatccaatttgctaaatctccatattttccccattctcttataacccatatgaaaggtttattagatgcctcaaggcctagtcccagctctttgagctgagccaagggaagattacatagacttccaaggcaaacgtagagcactgaaccagtttcttgagagtcaagccattgaagacattggtcttgaccaatagaagccttatctcctcttttagctttgtctaaccctaacctattgcacaaggaaacaggtccaacgcaccaaacttttccagcccttgctttcctatattctcttgcataatcaacctctaactcttcaaaagtgttcacaataacaccataagagtcattatcagcttcaataatcttggccgtactctctttcatatttccttcaacaggttgcaacacagagacctgaggtttcgtgaactcaactttgtcaggcaagccgggcaaatcaaaatactcgtcgtttgattctatcattttcaagatcccgctttctcgaaccacttgtatagacatgaggctgaaacaagaaaacccatggaagataagtttggggatcttgaatttcttggcaagtcttgaagtgaaaggaaggctcatgtctccaatgatgcagcttggccgcggctgaaccatctcttccatagctttctcaacttgctcctcaagtgagttggcagcatcaaagaacttcaccatatcgcccattgaagccaacatatctaaactctcgcacccttctggcaaacccgtttgttgagacagaaacttaacttcaacgatgttgatagtcgcaaacaaagaggaaaatgagagtgaagtcttgatcttggctacattttgagtagttgtgatgatgcagacagtcacgccttggcgctgggacaagagcctagagatgtcgaccaatgggatcatatggccttgggccataaagggtattacgacgaagtgaagaggatcatgagaacacattgtagaagatcttacaaggaaaaaaaaaaaagatcttttaaggcttgaaaagcaggccactctttacaaatgatatatataatacgatgttggaaaataatttatgtgtatatagctacgataaagttttagatcacagtttgttttgacccgtctaaagagcctgcgtaagaaaattatattttactttaccaagaaaactttgaattgagttttggttctagacagctgtcccaacctatacgatgaaaacaaatccaaaatatacagacacaatatgtgataatattttctaatacatgtgaaaaatagaccataacatttagactagtgatggcttttattacttacattgactggaatcattacgttttctccccaatgctgatttggttatttcagaaccgacccaaattctcattagtaatggccatgcctctcttgggatcttgctaaccaacgctccaaacacctgaacaaacacttaaacttacaagcatgtgtctccattttatcttgaagtttagagtaaaaataacagtttataacaaaaaggttacctcaagtgattctcttagttggaacaattcacaacttctaaattccttctgcattagatttgctcattcacaaactaaagcatcactccgtaagcctcttcttgcctatatcttaaaacccagtaaaggaagaatagttcagaaacaaattcaaccaccaaatagagctgcaatactcaagatatatctcttatctcagttattatatttcttagaggatatctaaattctcaccagaggaaatcatttgtttctcgagttcctggactgcatcgaatatcccatgagcagtataggttttgatcatagtagcaaaagtgattttatcaggcttacattttctctcttccatttgtatgtataattctttcattgtagccaaatcaccagcctgaccatatgcattgattatgcaattgaagaacggtgtatccagtaccacatctgaattcacaatttgcctcaaaaccgaatctatcttaacgacaagacctgctttgctatacgcgttaacaagcgaacaataagtgattgagtttggtttcactccttgatacttcattttcctgaatacatcatccattttctcaattcttccagcttttccaaacgtctcaatcactatattgtaagtgacagtcgtcagggagaagaaccttttctccataaaatccataacagagcacatcttcttatacataccagcttttccaaatgacaggatcagtatgttaaatgtagtgatatccggttgcacccccatcagctggaaccgactataccagctctccatcttcctcatgttgcgaccatttccatatgacccaatgatcgagttaagcgtacaaacatccggaagagaatctccgtcctcgatcatatcagccagaacactttccatttcctcaaacattccagcctttccatacccatcaataatagtattgtaagtaaccgtgctgcatccaactccaagatacgacatctcaagaacgatacttttaaccagatcaaaccgacccagtttgcagcaacaactgatgagaacagtaaaggtgaacacatctggcttgcagtcactaacagatttcatatactcaagtgtagaaaacgccttgtctagaagctcgcttttgccataaacagagataagagaggtatacacatcaatggttggtttcaatccttcagataacataacttcgaaaagcaagctggcttgatcaggctgtttacaattcccaagcactttaaacagctttgtataagttttgcatcttggttcataccaatgctgcttcctaagaagattgaaaatctataaagtagagaaacaggaaagtgaattctatcgaatctatgtccaagtatctgtaagaatgaagaaggattaaagagctgtaccttgagagcagactgccatcgattctctttgatagcttcgtcaagagcttctagaacagcttttggccataaagttaagtacttttcggaattggctttcctctcaatgcccttcacagcagcatctgttctcagaatccgagacaattctttcttaggatctacttggtgtcttgttgagatcaaaccagaattcattttctctgtacgttcgttggggacctttgtcgaacacattgtgggcgttattgaaatagttggtatacaccgaaaataaacaggggaagatatatgttgctgaaccacgcttctgcaagaatgagaaacagagaaagatagatttaatataaacacaactgaagaattaaagaaacgtaaaattcaaaacagtatgattgtatgaaatatgagaatgttaccgagaaaaaccaagttgtgcgatctcattggcgtacgcggaagtagttccttgaacaggattttgtatcaatgccatcgaagaaaaatggtagaaagataaggtggagaaaaagaaactgcaaattttctgggtagaaagcagagctagaagacgacgacgataccgttgtttttccttcgtttttttcttcttctccggtttggtgtagcttctcttcggtttgtaaaatataatgaaatggttttagttttgatttggatgccggtttaatttggatttacaaaattaaaaatttagcattaatcagttttttcttgtccggtttaaaggattggattgatgaaggaagaaccaaatggagctttttccaatttaattttgaattcgaatttgttaaaacgagattgtccttggcaaggaaccggaatttggaaaatgaaaaaccaagaacacagttgaaagttatccacactagttaggacacgtggaggctaatgtatttcacgtggacacgtgctcatcactctcctctaaacgccgtcgtgaagtttaaaggtcagagacatcggccaccgaccaaatcagacaaggaaaagtcaacgatttgattggatcttcttcacttatgctttaaaaccgttcctgtaataaactgtgaagattgtaagaagattaacacgaatcaagaacatcgaactgttgactttagacagagagagacggagatggagtttagtgagttaaaggaagcaatagagaagatagagctcgttgatgctcacgcacacaacattgtctctcttgactcatcttttccgttcatcggaactttctccgaggctgccggcgacgctttaaccttcgctcctcattctctctccttcaaggtacacgacgataccaagtgtttttgctctagttagttttcgtttgaatcagattctaattaatgaaaacgttagcttaaagtttcctaattagtctcaaaagtattagttaactaaagtttcgagtgttactcaaaagatgttgacttgtttaggaatctcgtgaagttggtatgaatgtttttggttgtatgaatgaaacagaggaacttgagggagattgctcaactttatggcactgaagtatctttagaagcggttgaggaacatcgtaaaacctcgggtttggattcttttacttccaagtgttttaaagaagctcgaatctctgctctcctcattgatgatggattaaagctagacaagaaacatgatattgaatggcatagaaactttgttccattcgttggtagagtgttgcgtatcgaaactcttgccgagcaaatcctcgaagaggagtgtcctggtggttatttctatggttctgagagtactgaaccgcctgtttgggatttagattctttcaccaaaacctttgttgaaagattaaattcatatccttttatctttgcttttttaatacacgcttaatgattgtgactatactcactagtattggttaaccttgactacttcggtcacgcttgttccagagattgttgctttgaaaactattgctgcatatcgtagcggtttggatattgatacttatgtgagtaaagaagttgctgagaatggccttgttgaagtcttgcgaggtaagatggttgtgcttggtctatcaagaagtaacatagttgttgtctgatcaccttaaaatctaatattgctgcagctggaaagcctgtccgcataggaaacaagggcttgattgactacatccttaccattagtttggaggtcgctgtgcgtcgcgacttgcccttgcagattcacaccgggtatgcaagatttgatcaactatatgattgatgttagtaaagtctgatctttttatcaaacaaaccttacacagaaacagaaactcatgctcagaggtttgtagtaatgaaaattctccttttcttttgttgtttgagccagttttggtgacaaggatttggatttgaggttgtcgaatcctcttcaccttagaacccttcttgaagacaaaagatttggaaagtgtcgtatagttcttcttcatgcagcttatccattctcaaaggaagcatcctttctgtcttcagtttatcctcaggtttttcgtcatcccatttcaattatctgtaaaatcatgcctagtcattaacttattttcttgttccttaaggtttaccttgatttcggcttggcggttccaaagcttagtgtccatggtatggtttcttcagttaaagagctccttgacttagcatcaataaagaaggtaaaatttattttacttgcattatctttgttattgttcatgagtaaccataagatattattgcaggttatgttcagcactgatgggtatgcatctcctgagacctactatttaggttagctcaagtttctacctcttttctatagtttgtaacatacttatatatgttccaatcctgtttctaagctttggcacttgaaatcgtcttgcttcagtcttgaacatagctcgctgttttttgcaggtgcaaagaaagcacgtgaggttatcttcttagttctgagtgatgcttgtgccagtggtgatctctcactcatggaagctattgatgcagctaaagacatattctcacgaaattctattggattttataagcttaatatagacacagattcttctagtccacaaaatataatatctcccaaattgaagataaaggagcctgatgttcaagaagatagtagttcttttgtacgcattatttgggttgatacatctggacaacaaagatgccgtgtgagttttttttttttggtttcttctaaagaaaaaacctctgtttcccacctcaacgatttttccttagaagcacaaaaacttaactagaattctgtttattgtattgtttcaggctgttcaagcgcagcgttttaacagaagtgtgaagaagaacggcgttggtctgacctttgcatcaatggggatgacttcatttactgatggaccagcagaagagtctaaattgacaggtgtgggtgagattagacttgttccagatctatcaaccaagcagacaataccttggtactttactcgtgttcattctctttggagttaattttacagatgtttctttcttaattgtttccgtatcatattttatcattaggacgaagcaagagagcatggttttagctgatatgcaattgaagcctggtgaagcatgggggtactgtccacgagagaccttaagaagggtcgcaaaagttctcaaagatgaatttgacttggtaagaaatctccatatagccattctacgaaaacttttatttgctttttggttgcttaagctcaaatcttccttggcttttaggtaatgaacgctggttttgagaatgagttttatctcctcaagaacgttgtgcggtatgcgactatatatttcttgaataccggtttctttgttcaatccaatcattttcacaatcttaacacttgttctgtccattttttaaaagggaagggaaagaagagtatatgccttttgactttggtccttactgtgccacatcctcattcgatgctgcatctccgatcttccatgatattgtacccgcactcgagtccttgaacatcgaagttgaacaggttacaaataattcaaaaatccctcataatgatcagtctgcaacatgcttcttgacatgtatgaaattttttcatagtttcatgctgaatccgggaaaggtcagtttgaagtatctctcggtcacaccattgcatcccatgctgccgacaacttggtctacacacgtgaagttataagatcggttgcaaggaaacagggattgctcgcaacctttgttccaaagtatgtcagtctctcccaccaaattattcgttgtaactgcaaatttttaacatatgtgttttttcttcaggtatgattattgtgacattggttctggatcacatgtgcatctaagtctttggaaaaacggcgaaaatgtcttcccggcatctaataactcatcttctcatggaatctcttccgttggagaagagttcatggccggagttctatttcatcttccatcaatcttagctattatagctccactcccaaacaggtaactcgaaaaccgtacttttcgagtaatttcctcaattgttattaaaagttgtgtgtgtcacttaaatttccagctacgaccgaatccaacctaatacatggagtggagcattccaatgttggggcaaagaaaaccgcgaagcagcgttaagagcagcttctccaccaggaactcctgatggtttagttactaactttgagataaagtcttttgatggctctgcaaatcctcaccttggtttggctgttataatggctgctggtattgatggtctccggcgacatcttcaacttcctactccaataggtaactaaaaacttatgttattcattctcatgtatatgtagtgttaatatgaagcttgatcttgagttgttcggatggaacagatataaatccggcggatgtggctgctacattgaacagacttccggaaacgctctcagaagctgttgaagctctggacaaagacaaagttctccacgatttgctcggacaaaagcttttagttgccataaaaggagtccgtaaggtaacactatagtcttttagtttcccattagattctcagtggtaacaaagtacattagcactaatctattgtttttgtctttttaaatttttttgtgtaacaggctgaggtcgagtattattcgaagaatccggatgcatataagcaactcattcaccgatactaatcctttgagcatctctatgatgattgttggatcatttggttttattgtggactttgtgtcacatgaagggtcgtatttgcaaaatacttgacataaagatgtggttcagaaaattaataaactaaatttcatatttcgagacgcatgctcatgctggagtactatttgtatttcttactttttcgtcccatgctttcaaaagcctcaagaatatacagagtattttcaataatacggagtagttcttaatcatttacatttgtctatgaattgaatttgactactaatactcggaaacaaaaaaatgattgtagtattaggagcgcaaataccctttaaccattgttctttccatgttcttagtccggctattgttatctaggtaggtgcctgatccctttttttcaaatctttcttattcattactttgactaattaacctatttaatcatatttaatctccctttaatctgcaaactaaagcacatgtttttttttatgaaagaaaaggttagtatgacattcttttggtaaatctcatcatattatttatttaattttaagaaattggagtttaaagtgtaattaagttatgctacctagctaatttccttaaaatatgaacgataagtatagaaattaaagtaaagattaggtttatacggtacgcttattatgctcaaacaagtggacgaacaaaatccatctccatgtgactatggaagagaacttattaataagtccaaatttttttcttgcaaactttatgatttcattcacactagacaaattaattgttcgtaagaaggtatacgtacaacataatgagcttttactgcttccctttgcaaacgaatcagctaaaactttacagatttatatgttcaagggaaactataactaagatttgaaggaaaaatctaacctttctactacaacaataaaagtcaatgcaaggtcctttgaaaagaatcttgttgtcgcatgcatgtacgtaattttgtagtcaaatgtacgaatgatagatatatggggtcaaaacgttaaaatccagcctaagaaagacagagatttactctaaatcttccaaaccaacgttatcaattttgttgttaacattcaattgactttgctgttaattttggattgtagaatcgaattaaaatgaaaatacaaggtgaaaacgagacaatagcgtgaaactgctttgcgtatatatcaagtatcaacagttttgtttcgtttttgttggtttgcgttgggataagaaaccggcattttgtacatggttcaattttgtaatacctaaaccaatttccggtttaagtggtttattaatatgataaaataaaataaatattttttacaaaaatacatagataggaccatgggtccatgacgctttgacaagagccaataaaggatttactgtaaaatcagtaactttattgacaaacaaaaaatgcagctataagttgtccccaccgtatattacaaagattcgaatactttaataatacaagctaaagaataaagagcaagagcctttgactatttccacttataagttttcctccgagaccgagagagatcagagatggagcagattatttcaccacgctccggtcaaatatatatttcttctgttttaggcctcagcaaaaaccacctccatagttgttatgttggatactacgacaatttagtgaagaagtggtctcaatctaaattatcattctggataatgacaaattgataaaagatgcatactattacaaaagttgagaaaagaagattactttacgtaatgtaggcgttttaatgaactccttaatttcatcgttcgtggaaaataataacacaagcaaagcaatgacttttatggacactatgattggttacaatgatcttattgaacatgtgaggaggcaaagtgtatatccttatatctataatgtttttttttctttcttctccaaagatgtcgcctaacatcacgttatttaacactacatttagcttacattagtaatctaaaaacaactttaataataatccaacaatcacgccttatttaaccaatcctaatttatgaaaacatactcatgtatgattgtttgtgcgcatgtgtatatgagtatatggacacagtaggtttctttccttggttggatagatatggttacaaacttgcaatagtggcaggtagttagacctgcggttcctaaactccgaataaatacgtgcggttcaactgcaatgcagttctaataataacgaatatatatatatatatagataattttgttactattggaacatgtggttaggttacaatttcaaaccctaattattgattttggtaatttggatgtattcatattcctgttggttttggtctactcaaaatgttagtaaatctcttatgggatgtatcgaattaacttaaaactcttttttctggtccagaaacccattaatactagcattcatattgtatagcactatagctcgtggggttattataacgtcacatcacttttttgtaataaaagttgaaaaacctgacaagaattcaaatattaaagcctatccttagttaaaatctgttaaggcttatgaatatccttatcttatgtgagtaattaggttaattagatattagtacaataaaagaaaaaaggaaaaattgaagaccgtttcctcgagacaagcagattctcaatcctcgagactgtcagtggaaaacaacttcactctctctcttcaaaaagaaaaacaaaaatacaaaagccaaggaaagccattattacaaaagcaataacacactgtaaaaaagccactcacgaacactcctcagtaaccagagagagaagaagaagaacaacaagccatgtcttaactcttaactaatctcttcttctccctccatttcaccaaccaaaaaccctaaaatccttaaaatcacaagtttcttcagcaatgatgcttcaaagaagctgcattgtacttttcttctctctttttctgttggttccacaaatggttttctcgatgctcaacagaactcttcttctcataccacatcctgacccggaactagtcgcttatcaagttcagtggtacacttactacattgcctcttctggatctacatttactctcttttttcaacttctttaatgtaatttttccatctggttattacatttgacaagctattttcatgtcttcttgtgaatctgaggtttttctgttttcctctgttttgttctgttctcttaaaccggaaagactttaataatacggtttgtaactgttttgcaggaaagtaaatgcatctataacaaggcgtcaagctctagacacgacggaccaggccggttcgaccccgtgtatcaccggtaacccaatcgatgactgttggaaatgtgacccaaactggcccaataacagacaaggtctagcagattgtggtatcgggttcggacagtacgcgttgggaggcaaaggtggtcagttttactttgtcactgattcttccgacgatgatgccgtcaaccctaaaccgggcactctcaggtacctttctgttaaccgactcaaccggctttcttgtaagaaagtcttgtataacatcttgacaaatagacaaatatgtgttgtcttttattagttctagacaattatatgatctttaattatcgtgttttgaccgtagctagattttttttatgttgtttagttaacaacactaacactatatactatacttgaacattacatgtcattattgttattagctctaaaccctacctacatacacactttcataatttaaatcctataagaaaataagattctgtaagctataagttaatctattccaaatttacttttctctctctcttttgtcatctcatattcacatgtcccacaccaatctattatgtacgactttttcaataccacttgtttatatttctaaataaaccctccgttttgtggaatatttcccaacaaccctgatttagtgatttttctttaaattcttcaaaacctcctcaaaaccctctttaaacatttagagctgtataattttgataaactaaatccgttttaaaacatagaaacgtaacgtttacgatgtttacacttgatgtccctacattttaattttaacactgtacctgagaagcgaatcatataataaatctaaagaaaagacaactataataaaacaagtgtatcagtctcttgggacatgggacctcgaataattttgggggaatctttatcaatgtcaaaggaaacgggtttacaatgtgaaaattcttaaaattttggtgacagatatggggtgatacaagaagagccattgtggatagtgttcccaagcaacatgatgattaaactaaagcaagagctaatattcaatagttacaagacacttgatgggagaggagctaatgttcacattgttggtggtggctgcatcactcttcaatatgtctccaatatcatcattcacaacatccatatccaccattgttaccaatccggtaattagttttagctcttttcacactttctcttatctcaaattatgtatactccaaaaatcaattatcttttcttttttacggccaataattgttagtcttttaactttttaaccttttttttttcttgccctaataatttagtaggtcccttttgttggtgtacatattttccttctcattgattggtgttttcacacgcaaacaaagaaaacatgttttgtttgaatttatatgcatttattgatttattcataaaagtatggtaagcaagaaaaacaaagtaaaaactaaatctttcgtccttcctgaaatagcattgattgattattcataaaagtattctgaaaatatgtttgttcacgctttcgttagggaatactaacgtgcggtcaagtccaacgcactatgggttcagaacgaaatcggacggtgatggtatctctatattcggatcaaaggacatttggatcgaccattgttctctatcgagatgcaaggacggtctgatagatgcggtaatgggttccacaggaataactatatcgaacaacttcttctctcaccataatgaagtcatgcttcttggtcacagcgaccactatgaaccagacagtggcatgcaggtcaaacacacactaatccgtaatatacattttcttagtgactactttattttaaatgagcgtaatatttgaatgttagtgtgatttttcaggtaacaattgcgtttaatcactttggagagaaattgatacaaaggatgccgaggtgtcgacgtggatatatccatgtggttaataacgattttactcaatgggaaatgtatgccattggcggtagcggtaacccgactattaacagtcagggtaaccgctacaccgccccaaccaacccgtttgccaaggaggtaactaaaccctccgcatgttttctatagtcttggttcgttagtccattcttagactttgcttttggtttcatgatgttttgagctataccaactttattagggataaatatccagcttgtgaaactttcattaataagtgtaatctttaaaacattcatcttactaatggagagtgtcattgtgtaggtgacaaagagagtggaaacaccggatggtgattggaaagggtggaattggagatcggagggggacattttggtgaatggagccttcttcgtggcatccggggaaggtgcggaaatgaggtatgagaaggcatatagcgtcgagcctaaatccgcctcattcatcacccaaatcacatttcactctggtgttcttggcgttggtggcaggtttggattctacattttgtcaataaatgattcactctttgccaaatttttccctttgaaaaagaacatttcattttttaacaaatcaatactttgaaacttttattttaccaacacaaaccatattaaaaaatggtatgtctacatacccttttgttttcttctacttttggctttaactttattctttttcttttgtctaacttctttttaccccactattttcataattaacctcaaaaagtcaaaatggagctaatttagggtgtttgatttggtacaggaataacaatctggggatgtggactactactggatcggaaggtactagcggtttagattcttataatgactataccgatgaaatgtctggcgctggttcaaccaaccggttatctttttcagttcttgttttcttgctaagttcgatatcatatttggtcgtgttcacttcttcaacccaaatgtttatgttgtaacatgaattgaatttacctattttatcaaggaacaagcaaaaagttgtttccatactcattcttgtgcattcttttcttctatgatctttatgtagttttaatggacctcataatttgtagttttacaaaatgttatagttcttaataataataccacgtgtgtgtttattgtatacgtatatgcaatcgtgacgttgtaatagtcctatcctatctttaattaattacataactaatagtctaatagagattagatattaatctttagcattatattatcttcttccttgtcttttctaatatacaagagggcgttccatacatgcatctacacttcattcggatcataccaatataatctactttaggatattgtaatttagtatattgaacattaaatacttttcccttgaaaaaataaaatataaaacatttttaacaaatcatttggcacaaaagtacactaaaacaattaaaattaattcatattaaaggtgaagcccatcaaccaataatgttaacataaaaaaacttataatttttcatcattggagcatggacttctcatgtttttgttgctgtatataacaagactatacacatcaatgctatatttttacttaatttgttattatggatatgtacctttatttttattttattttattttgtttaggaaattgtttattgtgtgaagattaacaactttatctttgaccttgactaaacttgcgattcaaatttcatattgataaccgattcaaattgagttcaaattttacatatttgtgtacattaaggttgaatattggaacacttgttactttaatatagcactttcgaattcaattatccatcagttaaaaagtaaataaaccaactttagaattatgaccatagagaacatgaaaactcctcaaagtccctagtctcttgaaaccaccaagtaccaatgttaatattgttctcactgcagctattgctgctgtgatcttctgaaagatttgcttcactctggtcagtagaaatctctgatatccaatccgaaatccgattttcatacggtgatttcataacaccgaagctttctcttccaccaacaccaccgttggcttctttaccactttccatgctcacaacttcaacaaaaccatgttcttgagacgtcgtctttgtcctagtgatctctgtttccttatacttgtgcaacaattcttctcctgtatttcctctccactcaaagagctttcctgcagaaaaacacatcatttttttcaatgaatgcttatctaaaactaacatacatatgcaacaatgaaagaatatctaccatagttttgagcttcctgtttctttctataatgagttctccaatagttctttatctcgttatcagtcctaccgggtaatcttctcgcaatcttcgaccacctattgatatacaatatttgattaatcaaaccgcaaaaaacaatcatgtaagtacaagattcaagggttttttttgtctctcacttgttaccccatagagcatggagctgaaagatgattctctcttcttcttgactcatcggtccacgcttcagagtcggattcagatagttcatccaccttagcctgcaactcttaccactcctcttcaaacctatacgtatgaacacaacaaacatatatttcggacatgtaaatttctatttttggaaagtgacacaaaataaggtttcaaagtgtaccggaaactattgctaaagaatcccaacgacgttctcccaaaagactaatgaccttcactagccgttcgtcttcttcttcgagccatggccctctacgaagtgtttcttccttcttaaaatccatttttctttcttttactctgtttctttgtgttattatacttaattaaatcctttctaaaattgtgctttgaacttgtaagcatgctttggctttgcttaaatagtaaagtcatgagtttacccaaattgggaaaaatgtccaaaaagctgacgaacacaaatagtttagtggataataacatcatgcatcagttagttaggttcttgtttttccttgatctaggtcatcttttaagttatagattatagatttggattaggttccaagtatctttccttttgaatcatcatcaacttgtgattttttattatcattgtcttcagggattatggctttcatcatcttaaaatttaattaactaatctaagtatccaatcgggtttggattttggaatttcaatatcttagggacttaaaaaagaagatagaaagagatgaaaccagatcttttttccactcacttaaaagtttaagccaacgaagcactcttaagtatgattagttaagtaaatcccagtgttaagcctaatctcatttttgcaacaaagagagtttaaaatcgacgcatctaattgagccggttaatgaaatctatcaatgttgaaaatggctttggttaaaatcggtttagactattcacatttcacgtgagactcagacaacctgcacatgacagtcttatctctgtttttgtcgttttcaagaaagtcgccacaagagatcattcgaactaaaaaaagcaaaacagatctctcctgccgtctttggttacttccggcggagaacgatgtctccgataccggaaagggcaaagcttcacatagctatggtggtgtttcagacaggctacgctggtaatcacgtgatcatgagatatgctctaaacttaggagtaagcaagctcgtcttcccactttaccgcaccatcgtcgctttctctgttcttgctccctctgcttacttccttgaaaagtataattacacttctttaaaccaaactaaatcttatatcttcaattctttaattcttgatattatttgtatatttctaacagaaaagaaagaccggcgatgaaaatcagttttctgattcaattcttccttcttggactcgttgggtatgatcttgtctttatatcttggagtcaagatcaatgacaaaaaacttttgattacaatactcatttttggttatagaataacgttaaaccaaggattttacatctttggattggacaatacctcaccaacattcgcatcagcaactgaaaatgttgttcctgctgtttcattcctcatggcagcgttgctcgggtatgttcttgattctttattggagataacttgggaaacaagatgtgtatcttgcggaccaattattgtggaccctcaaagtgggctctgataccactcatatctcatttttattatgacacaccaacaattgtagaatagagaaggtggaatggaagaggaaagatggtatagccaaagtggtggggacaattgtatctgtcgcaggctctttggttataacactctataaaggaccaaccatttaccaaccgagtctgaatatagtgaaccaaactattaaacctgaagaagcagaggaagaaaacaagaactggacgttgggatgtctctgtttgatgggtcactgtttatgttggtcaagttggattgtgttacaatcaccattgcttaaaaagtacccagctcgcttctccttcgtctcctattcttgctttttcgcagtgatacagttctttggaatttcggcttatttcgagagagatctagagaggtggaagataatatcaggaggcgaattatacgcgttactctacactgtaagtgtttgtttattttcttagattaagactcttttgaatggtgtgattgattttggtgtgagtttgaatatatttcagggtttagttggttcagcaatggtgtttgcaatacaaatatatgtagtggaaagaggaggacctctgtttgtatcagcgtatttgcctcttcaaactttgattgctgctgttttagctactttagctcttggtgaacacttttaccttggagggtatgttatctatatgttttgactcattatgcgttttattttcatatcttatagttaagtttcttacacattttttaatgtttgttttggtcagattgataggtgcaatactaatcatgagtggactatacttagttgtgatgggaaagagttgggagaatcaagctctttgccaacaacaacaacacatgatttcttcagcagcatcagattttggtgatgaagaagactaccataataataaaccaagatctcctattagtcaaccattaatttcttcctaaattttgttagatcctatttatgtcttaaattcctagttcctactctcttcctcattaaaatcgaaatggacccggttgacgaaatagagataaaaataaatttggttaaaatcggtttagaattaaatcgattggtttgggtttagtgccacagtggttaggtgagtagagttgtggttcggttcaggttatgatattataacctggagggatcaaaattggcgcttttaaaaaccaaacaaacaaaaacagagaggaaacaaaaaaatgagaaagcaagaatcagagggagcgaatcttgaattcgaatccaaatcaaatgacaatggaaatgtgaaaatcgcaccaaacgaccaaagtttcctcacaattcttgacgacataaagtcttccaaatctccggttcttacacacgacaacttatacatttgtacacgtttttaagaccgaagctggttttttttcgtaatctgactgttcttcttgtttttgctttgttatattcaggctgttattaactatggagcttcttggtacaccttattctctgtttttacgattacgcttttcatgcttataaagtgttcgatgaaatgcctcaatgagaacggttttgttttgaaactttcaggtgtggagtttgtagccagattcttcctgcattccgaaagctcagcaacagtttctcgaagctcaagtttgtttatgcagatatcgacgagtgccctgaaaccactcgtcacatccgttacacacccacgtttcagttttacagagacggcgagaaagtcgatgagatgtttggagctggtgaacagaggctccatgatcgtctttggcttcactcttgaatatgttcatcaaatattaactatgaaaatctgcattccttttgtgatactttaaatgccaacacaaaaaatacttggctcttcgacaataatcccctgaataagtttggactttggtagattaatgttagggataaacttacagaaacatcaaaggttaaacagaggatggagctaacattcatgatacaactcttgacaaataaatatgaacaccgagctcctcacggcggctctttccctctcaaataatttggtttaaccgggtataatgaccttgagaaacattgaagtctctaaatcacactcttgccaatctcaaaagcaccaagcttcacctctaaacggttttgttttccaggaatgaattgggttaatgtaactttctaatttgggtcaggtttgagattggacggtcttccaccacaaaaaatatcaaccattaaaacttttattgttgcccattaagaccgaccttcttttcgtaattttttttttaaaacgtaactttgttgaatttgtaaaaaaaatctcttgtgaaattatcacaatgtttattcaaaactaaataagaacatactagaagcttttctaaattggaagatgtataaaaaaaaaatagaagaaaagaataataataatggaaaacaaatactataaaataaacgtttctttgataacaagaaacggatttgtcttctatataaataaaacacacacctgtctatttatttacacttctcgaatcttctttttcttctctgcgaagctctctctctctctctactcgattatcaaacatggcgaatcaagctgaatcatctgattcgtaagtacttgttaattactgagtaactctttaaggttttgttagtcttcgtgttggggtttttctaattctatttttttttctctgaatatctcaggaaggggacgaagaaggattttagcaccgcgattctggagaaaaagaaggcagcgaatcgtttggttgtggatgaagccattaacgatgataactccgtcgtttctcttcaccctgataccatggagaagctacagctttttcgtggtgatactatcttaatcaaggtttgatttttgaattttaaggctcttcttctcttgtttcctttactgaattagggtttataaggttttgtgattgttcattggtttgctgctagggtttatcagaagggttgttttttgaattaggtctttcaattttcatgcttttgttttgggatagtttctttgagttgtgtgtatttacatctttgttttctctctttttgttttgggaatctgtggttgcagggaaagaagaggaaggatactgtgtgtattgctttagctgatgagacatgtgatgaaccaaaaattagaatgaacaaggttgttaggtctaatctcagagttaggcttggggatgttatttctgttcatcaatgtcctgatgtcaagtatgggaaccgtgttcacatcttacctttagatgataccattgaaggagtaagtggcaatatatttgatgcataccttaaacgtaagcgttttctcttccctgtttttgtcatttaagttgtgctctgcttatatgcttcttgatgtgttctgtttttatcacagtagtttaatgtctgttttttttattttttattgccagcttatttcttagaggcatatcgtccggtgaggaagggcgatcttttcctagttagaggagggatgagaagtattgagtttaaggttattgaaactgatcctgctgagtactgtgtggttgctccagatacagaaattttctgtgaaggtgaaccgataaagagagaggatgaggagaggttggatgaagttgggtatgatgatgttggtggtgtcaggaaacaaatggctcagattcgtgaacttgttgagctcccattgaggcatccacagctcttcaagtctattggtgtgaaacctcccaaaggaatcttgctctatggccctcctggttctgggaagacacttattgcccgtgctgttgctaatgagactggtgcatttttcttctgtatcaatggtcccgagatcatgtcgaagctagctggtgagagtgaaagtaacctcaggaaagcgtttgaggaagctgagaagaatgccccttcgatcatattcattgatgagatcgattcgattgctccaaaaagagagaagactcacggagaagttgaaagacggattgtatcccagctcttgacacttatggatggtcttaaatccagagcccatgtgattgttatgggagctaccaaccgtcccaacagcattgaccctgctttgagaagatttggacgttttgatagagaaattgatattggtgttcctgatgagattggtcgtcttgaagttctcaggattcacaccaagaacatgaagcttgcggaagatgtaatgttctgttacatataattattttcttcttttcttttacctttttctatttgtttagatctgacattattttctcttattcaggttgatttggaaagagtatctaaagacacccatgggtatgttggtgctgatcttgcagcattatgcactgaagctgctctccaatgcattagggagaagatggatgtaattgacctagatgacgaggagatagatgctgaaattctcaattctatggctgtcagtaatgatcatttccagactgcccttggtaacagcaatccttcagctctacgtgagactgtcgttgaggtgcctaatgtgtcttgggaggacattggtggtcttgagaatgtcaagagggagctccaagagactgttcaatatccagtggagcatcctgagaaattcgagaagtttgggatgtcaccgtctaaaggagtcctattctatggcccccctggttgtggaaagaccctcttggctaaggctattgcgaacgagtgtcaagccaacttcattagtatcaagggtcctgagctcctcacaatgtggtttggagagagtgaagccaatgtgagagagatattcgacaaggcacgacagtctgccccttgtgttcttttctttgatgagctggactccatcgccactcaggtattgtacttggtttcttaatctctctacttaggcaacttatgccctttacctttatctcagaaaaattaatgaacatctcttataataacagagagggaacagtgttggagatgctggtggtgcagcagatagagtattgaaccagcttcttacggagatggatggaatgaatgctaagaagacggtcttcatcatcggagctacaaacagaccagacattattgatcctgcacttctgcgtcctggtcgtctcgatcagctcatctacattcctcttcctgatgaggagtctcgttaccagatctttaagtcttgcttgaggaaatcacctgtggcgaaagatgttgacctgagggctcttgctaagtacacccaaggcttcagtggtgcggacatcacagagatttgccagcgttcttgcaagtatgcgatcagagaaaacatcgagaaggatattgagaaggagaggaagagagcagagtcgccagaagcaatggaagaggatgaggaggagattgcagagattaaagctggtcactttgaggaatccatgaaatacgctaggagatcagtgagtgatgcagacattcgcaagtatcaggcttttgctcagactctccagcaatcacgtgggtttggaagcgagttcaggtttccagatgcgccgacagggactactggagctttccctggagctgctgccacagttgggggagtcgacccgtttgccacatccggaggagcagcggatgatgatgatctctacagttgaaaggtctgatcagaccctgtgactactctctttagtctttaactttgttctgcttgaaaaactttcgatggtctttgttgtgttttatttataagtcttttgtatataatcgttgagactctagaacaatgatggtgtcatgatgaaataaatctagagaaatgagaacactgcattcatcccaaaggaaaccggatatacatacacagattttgcgagtacacagattctacaccctaactagaaagaatcatcaaactgatgtaattgttgaaatatcttctttatataaaatagaagtgcacagttgagatctcacgagtctctctctctttatttattctggaagcggaaccagacttggaacgtaaacaaagttaacacaatagttaagttcatcttcaccgctaaagggttgtcctgtctcaacttgttttctgatctcatccagaccaccaatttggtacaagctggttcaagcataatcctctcctgcaactttattgcagcataaggcctgtatctgttatgtatcaagattataacaaaaataaagacgatgtcaaattttgttcaaaaagagtccaactaaaaattcctcaaatttttcactcatttacattgtttacttttgcaagttatgaaaatcgctctataaaacctttttgcacttagtagaagtccttttacaaaaaaaaaagttaaaaactttgtgttttttttctttcttttgggtgacattgtgggtaatttacttttcgagtttgttgtgctcatctctcaaacatatctcatttggactcttttgattattgcaaatattaattataaagtcttcatgataaatcttatgaattttgttatacagatagaatcatttgtgtaacctgagagaaggttgagaatatacacttcttttctcattcttcgtgattgtatcacatataacagttttgtaattgtaagattatatacaaacatacacacataaatactttatttgtttgttaataaaagattgatgttttggacttttttaattaaccatgcgtgatctcgtgcatctagattcttttccgcaagataagtcatcctcacagtaaagtatgtatatcagtatatacagttatgcaccactactacacaagaaacaaacttatgatgagtgagacgatcgcacaatcacgatccttgtcagaaggaccatcatagctagcgtctaatattgtcatcatatacagtacggaactacaactaggcctaaaatcgacgcaataaattaccttttaaagtaaaaaaatgcatgatcatttcatcatctataacgattgttcttaacgctcaaacgaccacgtcacggtaatccaaaatcttgttttctattcaaattaaaaacttatactaaagcataagtctctgtacaaaatcaagttagcttgcacgttacgatatattggcatattggttttgactggagaaacatagcagaatttttttcaaaatggaaaatttttagtcaccttgaaaatcttataagatttatactttaatttatagagaaaaatatgcatgtgacacacgaaagaggacggtcttggggttggacttggcccgctctcttggataaaatctacacaagccgcacgtgggaagtctacaaagactgctacaaaagacaccacctcgtggggggtctagctcataaactgatcacacgcgagcacaaaacctttttatgtttattattatctttttggatgtttattgttagaaaacctaattatgtcatctaaatggatgagtaattagttgtaaaaaaaaaatggatgagtaattcactaatagatacaaattatacataacttaattaacggaatgcaatatattatacaacaatggtcaatgaaagttcaaggagtgaagatattggcattatactgtattgatactattgaatatgataaattgatggaaatagatggaaattgatggaaatagtcatgagattacaaaaatcataaattcgaaagaagaaaatggaggcaagtgtttgggtttcaacgtatgtcagagagatgcacgtgttctctcttcttttccaaccccaacgggtcccaaatcccttttcttagctttttccttgtttgagtccaatcggcttttgcaatccaatgaataatgatctttctcttttattattttaaattttgtaattaaggctagaagtctaaattagtcccaaacattacccatgtgactaatgtggcaatgtcttacttaagatatttctattgttatctgtttttttttctaatgttatatgttagtaatgtgaatatgacaatatgtgatatgaattgcaaaacaccacactgatctgacgtatatatcttcctcttttctccctattttcgtagtaacgtccaaaggaataagaagcaaaacaacaaaactctccaccgattcacagttagtggaatacaacacaataaaatagtagagttaaggaattccttaaaatctgttcgggacaataattatgagaccaaccatgttttcccccatctctttcgtcaatgatgctgacttctacttatacaaatcaagtttcctttctgaaaaaagttgaaagtcacgtttctcaattatcccatcatcataaataaataaatacacttaaaaagaaaaagaaaagagattgagaaaataatgttctgagttctgtagtaataaatcaaacagtagtgggaaaacgatgaataatagtaacgaggagggaccgcacgagtgcatctgcacacctttttcgcctcgacgattcccattgtcggctcatagttttttttacctacatttggttttcaacatatgtactatatatattcacgatccaaatattcaaatcggacatagatattaagattcagtataacgctcaaatcctacgagtatctgacaagtatctataattactttaatgattaaatgttttgaaaataataatctaaatttaatcagcggttgcggcgtgtcggaaaagttcgagacttggaggaagagcatgcacgtgatgttgaacgtttaagtttgtttgttttcttggcttcggattcgttttaagtactatatagttttataagtgtagttgggtcgtatttttgaagatatcatgaatctaataaattagtggtaacactgactgcattggtcaaaacatagttgtacgttacaaaattttctttacgtaacgtaactaaatatcctattacatatatgcttaacataatatattgcatttggaccctttagaccatcgcaatttctataatctacatttcaaaagtgaacaatatcaaaagagttaataacttattcattttcgactttataagtatctaatggaagaaaaaccaaggcgatagtatcaaatggaattattatgcatgtactaatatatatttttcctatgaactaaaatgtattatttaatatgaagaagagaatgcttttaggattactattattttcacttattttcttcatggtacggacattgaattccagcagtattccacaatctattatccttttgcttttccttttaatatatatatgcatttgaatatttaatgaatcgaatggaaaatgatgttggtttctcgtcttcatattcaaattttaatctactacccaattaaacatatcgccctccctaaaccgacaaaatagaaaagaaaatagtgcatagtttcgatttgcattattagtatgaattggactcgatcgagtcacatctcacatgcatggactctcaggccgtagactttgtcataattacattctatcttctccaccttttcctctcattttttcgctggtatcgttacactaatttaatgaaggatattactctcaaaaacgagacttttgttgtctattgacatctatcgtgtttaaaaaaaataaaaaatatctgaaatctaaacttatactaattaaggtttatagcaagctgaatttgttttgtcacttaaaactgtgcagtgcctaacatgaaagtacagtggatgagatttgacctctgacctcaatatctataatgttttcaagatataaattacatgatatctgtactgtatatatgtaactgggaaacagatgttgccaaataaaagaactagtaaacaaattattcatcagcaaagttagttttcgaagtttttgtgattattcgattctttaaatatctaaattattcatatgattaatgataacgagcatttgaaggattaatgcatgtctgagtaattctgaatttacaattaattttgaataacctatgtattccaagtaaaattgacgatatttccagggccagtggtttacaaaaagaagaggttagtacttgacaactaaaacatgtttttaagaaagaccattctaagctttcaaaagagagagataaatcttaaattaactaagcatttcaagaatgcattcacatcaatatcatatattcatgtgtatataacttaaatatcaaccctagttcaaaagtttgatactagagggaaaaatgaaaaacggcgacccaacccaaaaagttggaaaaatacaagaagagaaaacaaaacataaggtaaagatctaaatcaatatacggtcacgctcgcggtcacggccacgcccgcagactaacatggcaagacaacggccaaggatgtaaaacttggctcgctgtttcctcaccatgtggctacacttcgccttgaatgtcttggacggcttgcatgtcccgctcgtgctgttctcttctcccattaattacttgatgattccaccactacaaggacaaaatttgatattctttgttgaaaaatggagagctttgttgtggaaatgtgagaagacggagaaagagagggagagtttattaatggagacatattgcgacatagaaagagtcaatatatggagagagctaagcctatgaattagaacgagggtcacttgctttggtacaataaatgattgatatgtgacatattttctttttttttctatgaaataggtaacactaatactgtatatatgtaaccttacgcattctagaagaatattaatgtgatatatgttctgtggttctgttttagggtgtagtgtttttaagtttttttcaagagatcttgtagattaagtgaaactgtacttaaataaaatagtgtggtatgtgtatgtggtttgctatttagaaataatgtaataatagagtgtatatagagtatatagtgtgggtatgtttaagaacctatttggctacttcagtaaggtttttattttttaaattgattctttttttcttaagatttctaaagctcagacgcttaatctaaaattagttataacttataaggttagtagtttattaaaatttaacgtgaattatgattaaacacacaaaggaacttatatatgttgtcgttgaaatacatagcggattgaaatacataaacgaactatagttttgatttgatttataaacgtgtaaattggataaggctaatatttcatacaaatatctggaaaccataaccaaattttgagctgtaaacataaatatagcataatcaattcgaagcatactagaaacttgcatgtgtgtaatttctaagagatgtgaccacaaatacagagtggactaggacccgatgttctatattaaatgtctttctttattcttagtcaaacatttaatttaattttgatgtactcattggtagatctttggtgaacatctgaaatgtgaatggtcggtctacgtagaacgaaccccacagacggtaatttcctgtcgtcgtggcagctcattaggttcgtacgacatataccacactttttgaagtttacgtatcaaaattgattgcactcttccttcatacaaacatgacccttttgaagtaacaagtaacaactcttagaattcttgttccatctttttctttgtgttgtttattttgttaactgtctgtaatcccacttgaccacgctgaatcgaaatgctccatttggtcaaaaacattgtcttgaccgctagttattagttgaaacgaatgagcagattaaacatttatagctctgcggtttaaatgtgctgtgtataaataatttgagtcacaagaggagagaaaattacaagatatatagttcaaatcattgatcagatgcttggaaaacaaataacaaacacacgtgaaataaaatttaattttttggccggtgtgttgccgggaagtaattgtgtgggcatgatcttcttaagtggatacctcaattctgaaaatgatctacagaagtataacaaatggatgaaagatgtcgacgaactaaattgctttgattttggattattttttgttttctgcataaaatattttttttataaattaataatttcgaaaccgtgaaattctattaatttatcgataaataaatatatattatcagtttgttattgtaaaactaaattagtacaaagaaatgattatttttaagaacatctataacaagctaagcattcaaaccttcaaatttgaaggtttttttaactccaacaaactctcaaacccttattttttgaggatgtgaataatgaagtttcaaatttcagggtgcatactattcacacattcaaaatctcttctaaattttattttagtccttatacttaatatatcttacaaataattctattacatttaattatgacaaatatatgcatataaattcaaatatattaaaatattaaaaaaataaattaataaatttatacaacaataatattacattgagcatatatgaaagcattatagacataattacattgaatatttttgtaattttacatgtaattttataaatcattttaatgttttatgttatgtttcttttctaatttatatttaattttatataaaaaattaaaatattatttaacataattattttgataatatatgttttatatttatttatgaaacttttatcattatcagtgattattgttactattaaagactataatgtaaataaagaaataaaaaataaatttgagggagtatcatcggtggagatcaccctcaaaccttaattttaagggtttattaccttcgtagataacgtttttttattttgtttttttcatctattgccttgttggtatgaaaggacctggtttaattgatgtcaagaaaagaacccggtttaatttaatttcggtcagattcaccaatctcgaatccattctctcgccgtctttcaattctccgccatcgaacgaaacacagaatcttcaggatgtgacaacactggattcctccgccgtcttctccttcggtggagaagcgattcgaattggaagaatcggttggcttgacattgattcaacgatgaggctccttcaagctagtcccggtaatgaaaaagtccttattgctgcatttgcataataaattgttgcctgatatttcttggagatttggttacttgctttagctttttgatgcaatgatctatagtagttagtgggaatttggtgaaagaatgtatctttcttttacttgcttggttagttcaggggatacatacaactaatcttgaagtagctattgtagtactttaaggaagaagctttactggtaatccaaagcatggcgaaaactaactgtaaagtactaattttaactacacctaatttccatactttctgtttatgaactcactcttatgagtgttaaataccattcattcatcacatgtgcacacctcaagtcttatcaaaaacatatatatacttaggattacatcacaaaagcagaaaacataggcttaatatccgcttcatcacatcacagtctttacatatactgatatacacacatatacacgtcttaggagctcctttgtcccaagtcatatcttttttctcgtgttgctgattctaacctgttccatcttctccaccaccaccacctcctcctccgtttgcaccccaattgtcaaagttttgtcttggaatgttatggtggttgtctactcctcttgttgatggaatggcggatctgtccttctgaacatggtgaagcctctgatcttttgtgtatatccctctccctcctccctccacagttaaagagctcataaccaccattattaccagcaccactaccaccacgacatgccttgtctgaatttgcatttttgttttgtcttgtttcatgcaatagctttcctttttatagaattgagaagtaaggtttaggtatgggaaatcttgcaactgttttctgtgtgttccactaggaaaagacaaaacaaaagattgattgattagcctttaattgatgtgtttgtttgttattgttgtgacttgtgacgatgatacaaaaatcaaaagaaataataatcactcatccaaataggaaagttccaccgttaaagtggtgaagacgacataagaatcaatgagaagaattggttagttgcccgaataggaaatttccaccatttctagtggatcacctttcttttaatcatagacttttatatttgtttgtgtaattaaaagtcaatgggatggtaacaacttacataaagtaaaatttcaagcaatttacataattttcattcaatgatttcattcttctttctaatagcatgcgttgatagccgaacaagttgatgacaagtgtcttttaatctaacccacaaagctaccatctgaattatctatggttaaatgatcagttacaaataattcacttcgctaattacatcaaaagatttggtagagacaaatcattcagagaaagtaaccatcatgatcatgcattgggtctttgttgggctgcttaaagctcgtaatgaagctctgtcaattgctcttggggcttaattttattttggaaacggcttagtattatagtgaagaaaatttatatggaatgtaatgtatttttcaactccttaatatgaggataaccatgtgagtttcttcgtctatctgaacactttttaagcatagtttgcagagtttttaatgtttatgtttatatttaaattgatacccattgattaattacaggtcatctatttctactgctgtgacactcttttgacttcatcttcgtcttagcacattgcatcacatgccttgatgtctaaactataaaatgactttgaatcatcattacatttgatatttgcacttaatgtcttcctcgaagttaatggactttggcctaacatggattataatgatgatgatattgttacagggatgtagaagctgcattgaaagtgaaaggcagggtttgttggagatcaaggcttatattatctcggttattactgatccacatttagacattcgtcgaggatggatgagtagtgatcggtcttgttgccattggagaagaatcaagtgcgacatcaccagcaaacgcgtgatcggaatctccctatctttagaatccatacgtcccccagatcctcttccccaattgaacctaacttttttctatccctttgaagagcttcagagtctcaacttgtcgtcggggtacttcaaaggctggttcgacgaaagaaaaggtttgtacattcgttttcgtttttgttcttgtattcaagtcccctaacaatgtaaaatactttactgcttatataggtggtaagggcctgggaagtttaagaaatcttgagactctggatctcggtgtcaacttttacgataccagtgtcttgccatacttgaatgaggctgtgtcgctcaagactttgattctccatgacaacttatttaagggtggctttcctgttcaaggtaggtactccagaacaaatcaaactatatatatgtcactgacattgaaagtctttttcactttgtttctgatatctcttactttggcacagaactaataaatctgacaagtttggaagtactagatctgaaattcaacaagttcagtggccagttaccaacacaaggtatatttaactatgatcctgcgttaacactgataaaatcaatgcgacgttgacgttgtaacataatctataatttttttgttgcaatttgagtgtctctacgtcaatcttgatacacataataatcaagttgagtgttcatttatttataagccatgttgcatctttttcaattgtggcagagctcactaatctgcgaaacctcagagccttggatctaagcaataataaattctctggttcattgcaaaaacaaggcaagttatgactaatagtccttttttagtagaggaactcgtctcagcttcgattgtatatgccttgacgtttctctgtgcatccatcactgcaggaatttgtagattagagcagttgcaagagcttcgtcttagtcgaaacagatttgagggtgaaatcccactctgtttttcgagattctccaaactccgagttcttgatctatcatcaaatcacctaagtgggaagattccatatttcatcagtgacttcaaatccatggaatacttatcacttctcgataatgactttgaaggcttgttctcgttgggtttgatcactgaattaacagagctcaaggtttttaaactctcttccaggtctggtatgctgcaaatagtagagactaacgtttccggtggtctgcaatcgcagctaagtagtattatgttgtcacactgcaaccttggaaaaatccctggttttctttggtatcagcaggaattgcgggtcatcgatctctccaacaatatattatccggagtgttccccacttggctgctggaaaataacacagagcttcaggccctgttgttacagaacaactcattcaaaacacttacacttccaagaaccatgcgcaggctgcagattttggatctttcggtgaataatttcaacaatcaactccctaaggatgtcggtttgatacttgcgagcttgagacatttgaatctctcaaacaatgagtttctagggaacatgccctcctctatggccaggatggaaaatattgaatttatggacctatcttacaacaacttctcagggaaattgccaaggaatcttttcacaggttgctactcattgagttggcttaagctctcgcacaacagattcagtggcccgattattcggaaatcgagtgatgagacctctttgattacgctgatcatggacaataacatgtttacagggaagatccctcgtactctactcaacttaaggatgttgagtgtgatcgacttatcaaacaacttactcactggtacaattccaaggtggttaggcaatttctttttggaagttctgaggatctccaacaaccgtctacaaggtgccataccaccgtctttgttcaacattccttacctctggctcttggacctttctggaaacttcttgtcgggtagcttacccctgcggtccagctcagattacggttatatattggacttgcacaacaacaatctcactggatctattccagacacgttgtggtacgggctacggttgcttgatctgagaaacaacaaactgtctggaaacattccactgttcaggagcaccccgagcatcagtgttgttctgttgagagagaataacttgacaggaaagattcctgttgagctgtgcggtttaagcaacgtaaggatgttggattttgctcacaatcgattgaatgaatccataccttcgtgtgtcaccaatctatcatttggctcaggaggacatagtaatgctgattcagattggtatccggcgagcttgctctcaaactttatggagatatacaccgaagtatattacgagtctttgattgtgtcagatcggttttctctagactactcggtagattttaatgtccaagttgaatttgcggtgaaacagagatatgacttgtacatgagaggaactcttaaccagatgtttggcctggatctgtcgagcaacgagttaagtggtaatatcccagaagagctaggagatcttaagagagtacgctcgctgaatctctcacgcaattcattatcgggttctatacctggaagcttctccaacctaagaagcatagagagcttggatctttctttcaacaagttgcatggaaccattccctcacaactcacattgttgcaatctcttgtcgtctttaacgtgtcatacaacaatctctcaggtgtgattccgcaaggaaaacagttcaacacctttggtgagaagagttacttaggtaattttcttctctgtggatcacccaccaaaagaagctgtggtggtaccacaatcagctcaggaaaagaatatgaagatgacgatgaaagtggattactcgatattgtggtattgtggtggagcctcgggacgacctacgtaacggttatgatggggtttttggtgtttctctgctttgattctccatggcgccgagcatggttctgccttgttgatacttttatcgaccgcgtaaaagatgtactgggagttatctagagagggttcgtggacgtggaggatgaaacaataaaatgtaatagttgaatcttgcaaatattttgatcatattgtcaaatttctccatcgtataaaactttcgtgaagattaacatatcaaatattttgatcataagctttcaatattaagagaagctgaaacctttagtaagaaaaatgattacaggaatctacaataataattgaaaacgaatatttatctttttgtttcgaattaacgcaaatatttggtttatggacaaacgaattataaattgaaaccgagagtaataatatcttgaattctcaaactcattattttaaaactataatggtccgaccagcgagttcaccgtctatacttcctacatataaataaataattattagaaccatgcatgagaaaaagaatgtgactactgcctcccaaaatgaagcatgggcgagacttaactagagttagttggactatggaatgttgtacaattttaaactatatctgttttatttgatgtcttaaataaaaagatctgttcttttttaaaagggatatcgtaattcgtaaactactattttttttgttttgtttgtaaaataacaaaaatatttttatcaggaaggttcttaaactttttgagaacgaccttctaaacacttttgtggtatatttgaaatgatttaaaagttatcgagtattacggtctctgatatctatatatacatttttgcagccattttgtgaaataaatcctgtagttaagacttatttacaatggctgctactggattttaatgtttgtttttgataattagaaaaaaatcttcgaattaaatatttgatatttaacaatcttccctaaatctcttcacattaactacacgattagttactaaaataaaacttccaaaatatttaatatcatttaattactacaaaattatcatttttgatattgcttttctccatgactataacaattcgattataatcatcaaaccgcagagatatttgtatcaaaccgcagagatatttgatagcatttaattattacaaaattacaaaatatttagacaataattcataaacatatcataaataagatcaacattaataaaataaatagttttattacggtacgggttggcgggacgggtttggcaggacgttacttaataacaattgtaaactatgaaataaaatattttatagatagatacaatttgcaaacttttatgtatactaactttacaaactaaattgttcccgcggtgtaccgcgggttaaaatctagttcatatatatactttgaacaaaattaaactagtctgatattcatactctttgaacaacttagtttaaatctaactatctaagtattcctcgtattttggccgaaatcaccgaatctctagagtctagaccttttaagtcaaaatgattattacaaagtgtcttgttatcctttttcaaacctaaatgttttttttttatagtgtaaatcactatttcttatactgaggttccaatttttttattttttggcactcaatactgatataataatgaaaaaagaatgacagctactaatctgtggaaagacacatgggaaagtcaaatcaaataattgtgggtgtaataagggtatggctacctcatctaggcccttcttttttctattttctttcaaaataatcaaagtcaaaatagggtttgatcccaagagtcgctaatcgatcgatgatccgagtatgaaataagtacattactccatcgtgacccgatcttatgatgtaatgtttaagtacacgttcattacaagtttataacaaaaaaaagttacaacaccgtttccttactaactaaaatatctattgaacatatcgataactcaactactcattattttttgataaaccaaaaatattgaagaatatacgagcaactgagttcataagcccatagacaagggcaaacgaaagcattagtgctcgtgaaaattagatttgttatattttgactagtatttgttatgtttgacgtttatgaaagaaaacctactccaaagggctggctggctataaaattcatttcacaattaaaatttagggtattgttgatcctaaatcaaaggttggtaatttcgttaattaaagtttaaataattcctggttatcgaatgaggttatttgtaagaattatgagactcaaaagacaaacatcataaaagcctcacgttcccacaataaatttcatgcagacgaagccagcctacttttttagaaatggccctccttcttatctcaaaccagcttgaccgtcccgggtctgatgatacatcagttctgtctggtccaaaggctagtttaaaacttttaatagattcaaatttttattttgttaacaaaaagtataaaaaaagagttataaaaacaaatatatattaaaaaaatttgaagctgatgattatatgtttagtttgtcaggctcaaattttgattgaaatagtttcgaaatcaaaatcatgacaaaacattagaaaatgattataaacaaacaaaataatacagatggtaaaaaaacttagagaataaatctgaaagactaaaaccaaataaccgcataacatgaagcataatcgtttgtattagtgtcattgatgtgtcaccatccaaattcaattctgtacaatgcatgttgttaacaaaacaaaaaaatctgaaaccaaatagaaaatgtctcccaaaagataatctgatttccaaatccaatcccacataacccaaaaaagataaaaccatattatattttcactaaaaccagctcaaactttcttttgttctacattaaacaagcttaattttagattaggtcctagttgacacctattgggatgaaaaaaacagaacataccataggctcatctgcataagtaatgtgtaagaaagaatgattgctcttctcatactcagctatttcggggggatgaatctgaatcctaatgaatagttgatctgctctgttctgtgctgcttcccaatcatattggaccctgcaaaagctgacacttctttatcagtctacacttgcaatccatgcataaagaaaaatcacaaaacaaaataaaaagcagacctatttagatatattattatcatatatctattcatagaaccattagacaagaatgatcctaatcaatcttcacatgctaatcagcttgagatttttttttttttttaaatgaacattggatttttatagacaaattaggctaattcaagaagtcacttcaactaaagccttgatcttcaagaaatcaccaaaagaaaagagagtacattttagaatcataaaatccatgaatcataaatcgagatcacactttgtccaagaagatttaaaacccatcactcttcttcatttcccttatcttctctctatctctcaattctttcttttgtggggtcttacaagtcttagctcccatgatttcagttacagtcgagaagatgaaaataacatttcttatttgcaattgtaataatgcaatgcatgttcgtacagtttcagttttatgagggaaaataacggaaccgcacgagtgaaaaaaaaatggcaaacaattctcataatttaaagccctcgtgatgtatcttaccatttatataaaaaaatcttgcccatctcatactcaaaaaaacattacatttaatatcactatggacctaagatttttttcatttctatctaagctctgtaaatcaatcatctatatatatacatgtacttcaccattgtacttctcatcacaaaaccatctctatctctcttttattcatcattcatattcgaaacctctcattctatactcaaaatgaagaacaagttcataaaatcatgcgaaaacaaattcagaatcatgaagagcaaatccatagttctaccttgttgtacatcttcatgcgagagttgctgcgacaaggtttcttggggattcaagaaggaaaatgaagcaatacctaaagatgttccgagaggacatttggtagtgtatgttggtgatgattacaagaggtttgtgataaagatgagtttgcttactcatccaatctttaaagcattgcttgatcaagcgcaagatgcttataattcatcaagactatggattccatgtgatgagaacacttttctcgatgttgttcgttgcagtggcgctcctcagcatcagagaaactgcattggcatgtaatgttaagaagggagggattcaaaagacatattcatttggttttgattcatcatccggttctatgtttctagagagaattaatgttgaggattgatttagataatcttgtacactaattaagtaagagttttcgtaatataagtaatcatctatcgtattatataagtgagtgttcactaaacatgttacattttcaaatgtttccaaataaactgaaacattaagactatgacaaatatctgaagacaaatagcaaaacttccaacattatctgatcatgcttctgttctgtgtcatagaaaaaaacttgaacttctctgatgtagatattgtcagaaaatcaaacaactttcagtttctagcaattgtcttgactagccaaagggaatgagtttgcagctatcttattcgagtttagagcaaacttgaactcttttctgatgcagatattgtcagagaacagacacaacttccagtttctatcaattgtatctgtattattctacatcattaaaatggatgaatgtcaagaagtaagatttttttgttactcgcaaatgaaagattatgacaaagaagatataatgtgtttgttattgcacgataggctccaagaaatggccatgagatgcataggatagatattagtctaatatctaaaaagagaaactcacataaaaggattcgaaatgtttagagaaaggccagaaacatacatttgaagccaaacacaaataaatcataaagtcttttgtcaacggtgtcaaatccacatttaccaacataaaaagtaacaagttaacaacgagttttacacgtaagtttttatatcatatatatcatacaaggtgtgacaccattcacattacaatcaaaaactcaattcaaacattaacacagcaaaattaaaattgaaacaaaacacaaaaacacagaacagaaacagaggaatgctctcttagcaaatcggaatcggagctccgttccattccttgagacaatccatcaacggatcaataagtttaccttcacacatagcagtgaagaccttatcaaactcctctcccggagacacaaccttttctccagtcaacaacttcgttccaagctcttccctcacgaacctatacaacggatacgacctacattccttaatccggttaggaatcggcgcagttccattcccataagccgctctagccgcttcaacttcctttggaagcacagccttaagctcctcttcaaaagctccaatcttttgaaagatcgaagtcactgcattcttctcagtctcaccgttggacaaagcgtgatcaacaataacttgtcttagtctctgcatcaacgggtacgtagcgctacaaggatcatccacatacgtgaacacttgctcacgatcaacaaccttaagcaagtccttctcgcaaaaccttgacggatgtaactcaccgttgattccagtggttaacactttcttagcaacttgagaaactgtgttcttcacagtttgtctcagattctcctccaaatgtctcaaatcaacagcttgacatatccccacaaggaacgttgttgacattagcttaagaatatccacagcttcagatgttttacgagacgagatcaaaccaagagagttcacatcttgattatgttgctcagctgattgaacatggcttgtgactggattagccaagtattgaagctcagaacaataagaagccatagcaatctctgctcctttgaatccataatccaaacttggattactcgaagcagttagattcgaaggaagtccattgttgtagaaatcattaacaagctcagagaattgagcaaacattagcttcccaatcgcagcaatcgccaatctcgtgttatccatagaaactccgattggtgttccttggaagttaccaccgtgaatcgccttgttcctcgaaacatcgatcaacggattatcgttaacggagttgatttcacgctctatcgatttcgtagcttgacggattacttcaatttgaggacctagccattgaggagatgtacgaagagcgtaacgatcttgttttggtttctgcaatggatccatctcgtgaaccttttgagctaatttcatgtatgagcttccgtcgagtatgtgctccattatcgccgccgcttcgatttgtccgggatgatgttttaaacgatgagtcagatgatcggtaaactcaggtttcccgctcataacctccgcgaagatcgctgataaaacctccgctaacaccgcttggacattcgcttcgaatagaaccatcgacgccattccagatccaaccgccgtgccattaacgagagctaaaccttccttaggttgtaaatcgaagaatccagtactgattccggctttctcaaaagcttctttcgcggttagcgattcaccgtcgggaccggtggctttggaattaggacggccggtgagaagtccggcgatgtaagagagaggaacgagatcgccggaggcggtaatggttccacggagaggtagtgacggagagatgttgtggttgaggagacttgtaatcgcttcgaggatctcgaatcggatcccggagtatccttggagaagagtgttgactctgacgagcatggcggctcttgtggcggattgcggcagtgtgtgacatgtctccttcgtgtttccgaatattccggcgttcaaaaatctgaaatcggaaataaactttaattaattaaaatagacccgacccgaccggtatcaccgacccggtatatctcccatgcaaattgtatactcgtgagtatgcgttatccacttaagccactaatttatttatttctctgatcacattcctaatgagttctctaattattaattagttatataatataaggtataggatttaattaattacctaatgagttctgtttgtaatgcggtgccgtttttggttctccggtgagaagtagcaccaaagccggtggtgactccgtaactgtcagtacctttgttcatgctctccataacccaatcactgctagctttcacaccggctcttgaagtctccgctaactcaaccttaacgctgcctcctacggtggagatggcagcaacttgtccgatcgtcagtgtttctccgccaagattcacgactggtctacgatactcttcgaccatcttcttcacttcatctaaatgacttcctttcatttgatccgctgctaaaccccaattcaatggatctgccaaagtcttcgtagtaaccgccacttttgtcttctctcctccgccgcacaacattgcttcgatttgatccattggttttcaagaagttgtgtttaggtgaatgagatcagatctcttgtattgtttggtgaaaggagaaagagagagtttgaattgttggtggtttttggttttctgaggaggaagaagagagaagagacgtttaaataagaaggacaatgttagtgttgttgttaggtaaggacaagagaagagagaagagagaacacaagttttgattttttggagaaaaaaagtgaagtatgaggggtgggtgagagtttaatgatgaccgttggatgaagattggtgatctaatggtggataatggaaaacgtgaatttggtttgagtcgcaaaaagagtttgtcaattagtttttagatttaaaacgcgtttggttttggtttggtttggttaaatttgtgtgttccgtcaaatatcaacctcaagcatcgaaaaggtagtcgtggctggtggctgaggaattgagaaggtaataactaataagcgttttgcggttggtgagactttttggagacaaaaatgtttatacgagtgattgattatggtttgggaatgaaatgggagtagttgtggaacgtaggaatgtagttcagtcaattcaaggtcgtccccactaatttcgttttcaaaaaattattttagttgctatttgtagtttggttttattgtgaatatttgtttatatgtatcaaaaacaaaagttgctaaaaaaatgtattaaaaaaatatattcttatacaactaactagttgaagtcgaaccaaaccagcatgaattgtttatcttattatatttttcttatctatacttgaaatttgttttggtgagaaagacctgtccttttatttgaaattttattaaccaataatttttttcagtttcaacactaaaccgaacatttgacctcaaaacatatatttaattagtttgctattatgttaatgatattacaagatttgtataattttggtgactccaattaaacaaattatatacgtttccaaatatgcttctctatcaagtgtaaaggttttttttcataataattcagtacatcacaaaatataaggaataatttgttagaggaaatgaaatagaacaaaaagaagcaagtaaatgtatacacaatgagctagtgacatggatgaagacatatttagaaaatataagtttttgtttttcttgtaacatatatatagtcatatatataccatcggtccatgaagaatggaacataaatttattattgtaaagaaccatttctatctaagtaacattgaaccctctgtgacaatttttttctttggtttgctatctttggactatagatgtagaataacatgcaaattaacgtcaagaccatgtcactttaacataaaaggtgacaataagcttgtcaatcatcgatggtagatgtgaacgtaattagtttcaaaatgttttaccccgatttggtcagatcctaaagtacttgaaactttcgagggtcatttatttatgtagaatattgtcatctcattaactagctcagaaaaactcttgttataatatagatagatattcaaaaaaatagggtacgtagtatacttgagaccttgagctacctaaaaaattaggaaatttcaataagaatttaaatttgtggtggagaatatatcattacgtagacaggaggaaggtaaaccgatattaatgcgacgcaatatacaccaactagaagctaagtaaagaaacacacaccgtttgcatgacaaacgaaatggcatgtacgcaatatttacgaacatactaaaatgttttgctggtctaaattgaaacgatcaactaattacaaggagccaaggagcatgacattaggtgtttaaaataaaataaaattgagttaggtgcttaaatgatcttttactttcaaatgggaaacagaaagaggggaaaaaaaacagggaaatttaaattagacaaacaaacatgaattattgctttgtaaagccagatttgtattacgttgaaaggtaaaagattcaatatgatttcgatcatagtctattttgttgtaggttgtaataacataacgtgaaatcgtctaacttgtatattagatgatcggaccaatttttttgtttttgtttggttttatatagaaaatatctaaaggagagttcgatggtgatatcgaaccactcttttaacttgattgctgctaataaatagccaaaaaacaatatctaacataatttaagacaaatcaatgcgtaaacaaataaagctgagacggaaatgtaaagggtctccgaaccaaacaattatggctcaaagaagtagtgggttggtaagatgggttcattgaaaaacacttgcatgtgtgtatggctctttaccacatcttctatttcttactaaacattcttcatttttttgtccgcagatattgtttgacttgtcggtaacagtttttttttattagtgaaaggtgtatctgtttttgtttttaacaggaccccattgatgatatttttaggccttattttatacaaatacaaagactaattgagagaccattttaagataacaccatgtatcacgaggcagattattaaaccatcaatcaactgatgttttcttcctacatcatcacttaagtttaatattttcttcaatattttttcaaaaaaaattataaatacggctgaataacttgtttatttttctcaacatacaaaccttaaaaatcaatccaacaacaatttttttggggttaattgatgagttgtggacggagctcatacatctttccggtgcaataaaaacccctcgaaaagaaaaaattgaacctatgttttggaacgcaaaccccttacacacttggtgacaacaaacttaccaactagatgttccgaacttgccaactatttctttttataattttttttttttgaaaaataatagatgcctaaggaatttttaattctttataataaattcttttgttaatatataaaaaaacaaatattataaagaatcaaaaaataactatcccttatgcatataatatctgttatccactcttcaagactcttaacgcattagcttcgtcgaacctaaaatgctgactaagccaagaaaaataaaaaagcactcaagtatatatgaaattacgtgagccgtgaaaaaatagctagaggaccaccaaccacagtggcaaagatcgatcaggcaccactcgtctcaccaacccctttagtatcctttcacatgtcccacattatctcaaattttacaatcatcaaacgtcatttgtccaaatcagccacatatataaaacttcctcttctttataatacagtactagtagataaatgcatacctccgaatctccaatagctttatgacgtctttgaaaacaacatcaagttcttgatagttttagcacaacaccatttgctaatcaatatcttttgtgtgtcaacaattataatcagtgatttttctttgtgttatatgataaatatagcaggtctataaaatatatgtaagctcgtaaaaaactcactaatcttgatggatgtcttaagattatcaaatcacatatactctgagaatatgacaaactacataatttccaatcgtaagaaaaaccgtaattaaaattttcttaatctccttgttagatacagaatttactaaccaatatattctcctaatcaaacatgctctcttgattttgtgagagtgtgtgtgtagctctctcctacaaacctgactctgatatcgatcagtgattgcaatggcaacactagctttgagaaagtaagcgatcaagctcatcaaacccatcatcttcatcatgttccacatttgtcaactgttttggtgtcgtagtaaaaccatcaagcttggtttgttcataaaagtaaagtctttgtgaatcccattcctctttcaatttctccattctctctcccatcaactctttctcttctgatatatgctttatgtcatcaatctccattatttctcctgcaccttataagattaagaaaacaagggataaacatgattataccacaccaaacattactacacacatgcttaaaatctcacagagctcaaaatcaaataaactttgtaattttgctctttcagagatgggatgggagggaaacagcaccaatagtaaaacttagagaaataaaaaaaattgcgcctaaacagttcatataaagtagcataccttcgactgcacgcttcttggcctctgcatattctatagacattttatctagggaattcagatcaacttccttaccctgataagcacaaaagcagcagcaagaatggtgcaatataagatactttagtaaagaataaaatcaaaactgttggacatatatatcctttatcttggggaaagagccctagagatatacaattatgcaaatcctgggaatgtaaatacttcaatatctcgttcttaccatatccaaatgaataaattggttaatactagtgtcacagattaacctggcaagtcaagatgaaaatcatatcactaaaaatgttatttcaaaatttagtcctccgaaaaactcaagggtcaaaatcacatacttctcataggcaaaccgcacacgtgcgttctgtagctcggttaattgatgaattgtcttggttgcagatgtctcatccacagctccaaatattaacatgttctcatcaagcattttttttgccacagcagcagctatctctacacctttatcttttgcctcaactacaagatccctaaatttcccaagctcttctgcaagatgagaactgtacaagtttagtatgatactcaagatacggagagcttcaaacgaatagaaaaaaaaaatagttgaaatcagcaaaaacccaaagaatgagtcacatcacagcagctttcacgtttcaggcttgaaaaaacaaatagtgacaaatgatagatagatcaaacttgtgacatatacattataaaaaggttacaacaaccacgacaaaaggtgaaacacttacgaagtgagatatagattctgaacttgggtttaaagggttggatctcatgaaggcaatagagacagtaaagacctccaagtctccgtgaaaaagaatcaatactaaccatgtgacctgtagaacataaggttggcttgtgtgtttagctaggaacaagtacaaagtgaatgcaaacagcaacggaaatccaacaaaacaggaattagacctcaacgtaccaatggtatgaacatatagtgactgcatgaaaaaggctaggttgctgttaggactagcttcatatatatgagaaaactttctagatagccagacactcttcatatcagcaaaggttgtcaaatcatcctgaaattaaaaccagaagagattcaagattcaacaaattgggagatggaagagaagtgaaattcaaaattttccttaagctataacaaagattgaggaaaaaaaaaaaaaaaatacctccacaaactcgtctatcagctcatcgatatctctcttgaacggagaaagattcattcctgagtcctgacatacacaatgaaacatggagacaaagatttagtaccaagaacagaaaaaattggctctattcagaatttatccgctgcaacttttaaacgattttgtcacaccccttggatacaaaacatgctaagtaagctactcataagtcataacacaaaattttcgataatctaacatgaacccaccaacatacgtataagaaaacaccaacccagatcgttaattagagacaaacatgaacacacatcacctttagggattagggacgaacacgaacacaactaatcgtcttcctgaattgtttttccaggtctcttccagacgaacacgaacccagatatagagagagcactgagcaattgacaaagagattgaagtcgatttcttgactctcctctcctcactttatttgacaaagaaaggaacaagactgaaactcacattcttgataaaccagttgaggtttcaaacaagaaaccatcttttaagggaccaaatcctgcagcctttccattttcgattacattttccaacaagcaatcagaattgactgaaactctactatttagaatcacaagcaatacatatttctctgaaactaaacacaaaatcaaagagttttgtggacagaattcatttaggcatatcatcgaacacttggtatgcaatatataataagctttatatcttgagtcaaaagctaatgaatccaccattgactatactacaaaagctaatgaattgataaaaagcagtttctaaattccaacttctacaatttcaacattgtttgtaaacgaaaattacataactttacctattagagaataaaatgcttcgaaattgagaagatgatgatgttggagacgattacggagagagacgacggtagtggcctcaaaacaacgccggtaactatgagatcgatgaagaaacgatgctcgtgagagagagaccacagaggggaataatgttttttgcgtttcataaatgaagaaggaaagaaaaacccatatattatatgcacatatatttaatatgtatgtataagtataacctaacatgtaaagtctaatacttcttgactttttagtcgatcagattttgacacattttttgaagaaaagtctatacaatctctcaagtcccaaaagtcaagaccgaaacttttgagacaactacacgttacgagtttttttttttttttggtaaaatataaagtatttatatcattttcaaagtttcgacaaaaattacaaagagtacaagtagcgaaaaaataccagaaatctacagaaagaacatacaatgacaatcgttggtgtcagttttgtcttccgttgttgcttgtttgtggctcctcatcaggttcccttttctctgttacagtggttcgatgttggtgttttgattttgtctttcagtttttggaggtgcatgtcttgtctgagcggagatttcttgagaagaatagaggcggcgttttggtctatgtggcattgcttatccgtgagagctggtttttatcgtttttataagaatggcgaccggaggtggtttctctagttttccgtagatgctcttataaccatcggatttgtgattaagtccattgttgtcatcgcgtttttgcgttagtttgcggagaagctgtatgctcttgatccggagattttgtggacgggcctctagttgggtttgctcgtgacaactaggatgggactccagctcctttgaattgtggaaatcacgcaaattttcgagtttggcatttcggaatcgctgtttcttcttttgtttccgctctgcacgttacgagttatctctctgaaattttacacattgcaagagaacttgcgactttctaataaaaataaatcgataatcgcttataaagtcaatatataatttttgaactgaagtacgagatcctaaaattttcatagattcgtaaagaaacaattgaattgatattgtttatataacgcagacctcgtcacgtacaattttttcgcgacgttgtttgaccaacgactccgtatatatggggtaaacctcctcatagttccgtacaaatgcatcctttttaaaacgtttaataattgataaaatcaaaaactaattaaattagtatcaatatcgcattgaaaaaaatgaaccgtaggttacaaaaagtgataaattggatcaatttggaatttaagaggactatcaaagtagctgtctggtggttgagcttcgttaatggagtaatagatagcaataatacaacgagtttctatcaaaataacataaaataaaataaaataatggaacgagtcttgtaatgattttttttaaggttaattttctcatccatcaatttcagataacgatcgaatattcatatacagtacatcatagagaactatccaaatatagttgtactccacaaataactgttaaccgtttatatgttgtgcaacaaaaaaacagtaacaaaaaatgtacgcaaccgtctataaatagaatgataaacgataatcattggcaactacttttgtatatatagtttctgcaaaataaaaatactatggtagtatatgttttcatgatgataatctacatttcggctaggttttcttatacataaccaaatcatgtcccttgtcaaaactacatttaggagattagatttaactacaatatggtttggttggattttcatttgattagatatatatatatatatatatatatatatatatatatatgtctatgtaattttatatattagaaaataaatctgctatattgatttaaaaacaattatgccccaagtacaataaagttagatttgtattaaaatcagatatttgttttaaatttttttttctttcaataatatccatttaatcagattggatttccgaaaatagtaacataacaataacgttaactcaaattattaaaatatgattttgtttggctaagaaagtatgctttgtttttagtttggatttgttgagtatctcgattttagtcgtcccgccagaattgttccaacaggataaaatgtgctgcacttcattgggtctataaatgttgaagattgaaatttaagacttttaccaattacaatacatttgaaaaaaaaaaaaaaaacgtttgcgtttctcacaccatcaaccttacatatggctgttatatgagcctcgagagacttggctttcttcaaacacaataaatagatctgaacgaaaaaaaaaaagatgtgaacgagttaactttattgattcaaaataatattcagagtcggctaaaaggctttagataatgacaacttcttcttctaccacattcttctagctaggtattaataatattattccaataataagtgagaagttttgttggtgaaaaaaagagaagagtaaaataaaaagaaactttgaagggaaactttgatttggtcaaaagccaacgacatgcattggctctatatatatgtgtctttaagaactcatttattactcttcacttcaatcaaagacaagaagaaagttagccagaaaaaaaaacagataagaaaatgtctatctttctttgtttcctcttacttcttccactctctttaatcttcttgaaaaagctcttaccgtcgaaagggaagcttcctccgggacctaagggtcttccgatcatcggtaacttgcaccagtttggaagatttcttcacaaatctcttcacaaaatctcccaagaatatggaccggtgatgcttctccatttcggggtggtccctgtgataattgtctcttccaaagaaggagctgaggaagtgctcaagactcacgatcttgagacttgtagccgacctaagacggtggggagcgggttgtttacttacaactttaaagatattggttttgctccgtatggtgagaattggcgagagatgaggaaaattgcggtttccgagctctttagccagaagaagctcaaatctttcaggtatattagagaggacgagagccaattgttggtccggaaggtatcaaaatctgctcttgagacaccaacttcatcagttaatttgaggaaggtcatttttaccttcgcggcaagtatcatttgtagactttcttttggacaaaatttttgcgattttgtcgatatggagacagtggaagagttggtgcttgaatcggagaccaacctcggctccctggcgtttgctgacttcttacctgcagggtggatcatagatcggatctccggtcagcattccacggtgatgaaagccttttccaaactcaccaatttctttgaacttgtgattgatgatcatttgaagagtgggaaaatcgaagatcactcagacatcatcagtgtcatgttggatatgatcaacaaacccaccgaagttggttcttataaagtcaccgatgatcatctcaaaggacttatgtcggtgagtataaataatacctttagtaaaatcttcaaagttctacattagaggtaacttgagggacaatattatagcttggaaagcaagttaacttataagtataggcaaatataccgttttgttcttatttttctgacttggttcataatgctccctagatttatattgatgtcctattttaaaaccaaaatcatgaattattttccatgtcattggatcaggatgtgtttttggctggagtgaacgcgggttccatcacaatgatatggacgatgacagagttaagtagacatccgagagtgatgagaaaacttcaagaagagattcgagcagcgctcggacccaacaaagagaaaatcacagaagaagacctcgagaaagttgagtacttgaagatggtgatcgaggaagcattcagattacacccaccggctcctctcttactcccaagactaacaatgtccgacatcaatattcaaggctacagcattccaaagaacaccatgatccaaatcaacacgtacacaattggacgtgaccccaaaaactggacaaaacccgacgagttcatccccgagaggtttgtcgataaccctatcgaatacaagggtcaacattttgagctattgccgtttggagccggacgtagggtctgtcccgggatggccacggggatcaccatcgtcgagcttgggcttcttagccttctttacttcttcgattggagtttgcccaatggaatgaccactaaagatattgacatggaagaagacggagcttttgtcatcgccaagaaagtctctcttgagctcgtaccaactcttcatcgctggtgaagcatgcaactataactatgttaaataatgacaagaattctatatttatgtccactttactaccggtttggattttgctttgttcatgtaatccgcatgtttcatgttatctttcaagttctgtttttatgttattgtcaaaaaaaaaaaaaaaaaaaactgtttttaagttgacaaaagaaaaaaaaaaaaggttgacattacattacattaaagtatttgactcccgaagatccagggtttgttatgataaataattggttttcaaaagtatgaaggctactttaagttacttgtagaagaccaatactacgtagtcaaaactgctctaatgcttttcattcaatgattgaaccgtgttattaattagttaattagatgtatccaaaacagtttaattgaaaaaacatataatagtaaaactttaaaatttggagttcttttcttctaaaacatatagttattggagtaaacatccaaaatattatgacttttcatattctgttattagtaaattttgttttataattattcttttagaacttggagacataatataaataaacaaacctgacatttcgttgataatttttttttttttttaaaccctagttgaagataaacgacgtcagtaatcctctgcgttttactctgtttttgagcttgtctttgttccagttctctgtttcgatgttcttttatctttatttatcatcatcagctaaagaagttctcaagactcatgacctagagacatgcactcgacctaagatggtcacgaccggtttgttttcttacaacttcaaagacattggtttcactcaatatggagaggaatggggagagatgaaaaagcttatagggcttgagctctttagtccaaaaacgcaaaagtcttttaggtatatcagagaggaagagagtgacttgctggtcaagaaaatttcaaaatctgctcaaacacaaaccctagtggatttgggaaaaccccttttctccttcactgccggtattatatttagacttgcgtttggacagaacttccgtaagtgcgattttatcgatagggagagagtcgaagagctggtggtagagtcagagaccaacgtaggcaccttggcattttctgacttcttccccacgggtctcggatggcttatagaccggctctctggtcaaagttcgaggatgaacaaagtcttttccaaactcaccaatttatttgaacatgtgattgatgatcatttaaagactgaacaacatcaagatcactcaaacctcatcagtgccatgttgaatatgatcaataaacccaccaatataggctctttcaagatcacttccgatcatctcaaaggagtcatgtcggttagtgtgtatgatttcttaactggtactctggtaggatactggaggggatttgaatagcaatctttatagcttgcggagcaactaaaaatttagcttctacatttcatttcaaaccacaatcatgaattcttacgtatgttatttattcaggatgtgtttttagcgggagtgaacgcgggagtgatcacaatgatatggacgatgacagagctaaccagacatccaagagtgatgaagaaacttcaaaaaaaagattcgagcaacactcggttccaacaaagagagaatcacagaagaagatctagagaaagttgagtacctaaagatggtgatcgaggaaacattcagactacacccacctgctccactcttgctcccaagattaacaatgtccgacgtcacaattcaaggctacaacattcccaaaaacaccatgattgagatcaacacttataccataggtcgtgatccaaaatgttggactaaccctgaagaattcattcctgagaggttttccaacacctctataaactacaagggtcagcatttcgagctcttgccctttggagctggtcgtaggagctgtcccggaatgtccttgggaatcaccattcttgagctaggccttcttaaccttctttatttctttgattggcgtttgcccaatggaatgaccattgctgacattgacatggaagaagttggagctttaaacatagctaagaaagtacctcttgagctcgtaccaactcttcatcattcgtgaacaaatgcattaatatataagatcaaaatttgtaggtttgccctcatatatatagtttaatcagtttggtttttcattacattttggctttccttttatcctgtctggcttatgtattgtgaatcaagtatattcatgtttttatcttcaatagaaatattaatctatgtatgttttttttccaatgaagtggtctttaaataaactaaaccatgtttcaagttgacataacattaaaagtaaatcgttaagaggcattgaatcaaaaacttcttacaaaattcaatataattcctaagtttaattcaatcactaatcctgtttacgatcaaataaggtttgacgatcgcttcaatctagccttaagccacgtggaaccttacttttttttttttttccaaaacctaagtggccaaattagctcagaatttgtagaccgtagtgagtttatctcattagccctaaactcaatggccaatactagggtaccaccacatgcgggcatagttattttttcttcctatctgcatatttcatatttcccaatatattataactaacattatcaaacctaattagtttgtggtcacaggaatcagttccataaaacatggttagatatgttgattggcaccgtattgttgtcggtttggtttagagggagagagctttatatttaacgtgtctttttttagtggtattctccttctccatcaattaaacacagaaaatgatgtgcctcgacagagttgccttaattaattcaaattctctgatatattacacaaaaactttgatttattacaagaacctaaccacaagcataatgcctatatatatcctctctcgagaacaaaacgctcttcactctcctcatacaaagaaaaagaaagagttagcaacaaaaaaaaaacaataattatgtctatgttcctaggtttgctcttcctcttccctctctttttcatcctatttaaaaaccttttacctccgagaaagaagcttcctccgggaccaacgggtcttccgctaataggaaacttgcaccagcttggaagattgcttcacagttctcttcacaagctctctttagaacatggaccagtgatgcttgtccgttggggggtcgtccctatggccgtgttctcttccaacgaagcagctaaagaagttctcaagactcatgacttagagacttgtaaccgtcctaagctggtcgccaacgggttgtttactcacggctataaagacattggtttcactcagtatggtgaggaatggcgagagatgaaaaagttcgtggggcttgagctctttagtccaaaaaaacataagtctttcaggtatatcagagaggaagaaggtgacttgttggtcaagaaaatatcaaattatgctcaaacacaaaccttggtggatttgagaaaatccttgttctcctacaccgccagtatcatatttagagaagcctttggacagaacttccgcgagtgcgattacatcaatatggacaaacttgaagagctggtgcaagagacagaaaccaacgtatgcagcttggcattcactgacttcttccccagaggtctcgggtggcttgtagaccggatctccggtcagcattcgaggatgaacatagccttttccaaactcaccactttctttgaagatgtgatcgatgagcttttgaagactaaacaacttgatgatcactcagacctcgtcactgccatgttggatgtgatcaatagacccagaaaattcggttctttaaagatcacttacgatcatctcatagcaatgatgtcggtgagtgtgaataatcacttaattagtaccaatatctctaaattttaatgttggatataatgatattatagtgtgggaagcaagttaggtcgcattttgttttgatggtccatttatacaatttttcccctataattaaattttggttattaattttttttttttttttaaaccttaactatatatattttattacatatgtcatttaatcaggatgtggttttggcgggagtaaacgctggaacagtaacaatgatatggacgatgacagagcttacaagacatcctagagtgatgaagaaacttcaagaagaaattcgagcaacactcggaccaaacaaagagagaatcacagaagaagatctagagaaagttgagtacttgaatctggtgatcaaagaatcattcagactacatccaccagctcctctcttgctcccaagagaaacaatgtccgacatcgagattcaaggctaccacattcccaagaacgcccatgtaaagatcaacacttatgcgataggacgtgatcctaaacgttggactaaccctgaagaattcaatcctgagaggtttttgaatacctcaatcaactacaagggtcagcattacgagctcttgccctttggagccggtcgtaggaactgtccaggtatgaccttgggaatcaccattcttgagctaggtcttcttaacattctctactacttcgattggagtttacccagtggaatgaccattaaagacattgacatggaagaagacggcgctttgaacatcgccaagaaagtccctctgcagctcgtaccaactcttccataatcactcgtgaataatagtattaaataagatgatcaagatttgtatgtttgcctctatcatactacatttggtttttctttcctttttttcgtgttgccatattaatatatatccatgttttataatgtttcttatcttcaataaaaaaaaagtcatattattaagatttcaaagttctttcaaattttcattgaagtggtctttatcaaggaaaacggcagcgttttgtatagtcactactatgattgtgacctaggcactatgatccgattgatgaaatctccaagtaagtaagtactagtagtataatcctgacctgtcatcgtctactagagactggatcatacagttcttcatagactctgctttagcactgtttgcatcaaaagcaaaccacttctttttttttccacaagcaaaccacttcacaaggaagaaataaacttaataatttttcactccccccaaactttcattattggtataaaaagattattttgtttgttttttcgtgatgatacacagaagggccagacccaaacaataggtgaatactgaaaaataaagaaacttgaaaaagcccaaactccatgaagggggaaaccaggcccaatacgagcaaaacagaggcaaaacaatccgatgtccaagatcgtcgaatccgggcccatatccggaaatccccacaacagttgaccaaataaccaagtcaccttgaagaagcgccggagttatcaacaagttcgttcatgaattcatacctgagttcacagttttctgatattggaaggtaaaattaaagtcattaaaccaaatgattcatgttttttatttctttttttgttaaatgaatgagttccacaaaaaatgtttagatttttagattaccaaattagttatggttacacgaatcagttccacaaaaatatgtttagatttgtaaacaaccacattatgttgcagcttggttagagagaccactaaatctaatcttatgtttttttggggcttctctccattaaacaccttaactaaatcaatcctctgcaaaagcaaaccatttactacaaaagcctaaccacatgcattgcgcgcctatatatcgtctccggtctctcgagaacaaaacgctcttcactccaaatacaaagaaaaaaacaaaaccaagctaaggcaaaataaaagacaagaataatgtctatcttcctcctatgtatcctcttccttttccctctctttcagatcatttttaaaaagcttttaccttcgaaaagtaagcttcctccgggacctacaggtcttccgatcataggaaacttgcaccagcttggaagatcgcttcacagtgtttttcacaagctctctttataatatggaccagtgatgcttctccgttttggagttgtccctgtggtcgtgttctcttccaaggaagcagctaaagaagttctcaaaactcatgacttagatacttgcacccgacctaagctagtcgcgaatgggttgttttctcgcaacttcaaagacattggtttcactcagtacggtgaagactggcgagagatgaaaaagctggtggggcttgagctctttagtccgaaaaagcataagtctttcaggtatatcagagaggaagaaggtgacttgctggtcaagaaaatatcaaattccgctcaaacacagaccctaatagatttgagaaaagcctctttctccttcaccgccggtacaatcttcagactagcctttggacagaacttccaccagtgcgatttcatggatatggacagacttgaagagctggtgctagaggcggaaaccaacggatgcatcttggcactcacagacttcttacccacgggtcttggttggcttgtagaccggatatctggtcggcattcgaggatgaataaagccttttcaaaactcaccaatttatttcaacatgtgatccatgagcaattaaagattggacaactccaagatcattccaacctcgttagtgccatgttggatatgatcattaggccctctaaattcagttctttcaatatcacttccaaccatctcatagcaatgatgtcggtaagtgctaaatagtaacttaattattaataccaatctttaaaattttatgttacgaagctaatgttatagcttggagagcaagttaactcgtgataggcaaacatttcctttttatggtccattcttctttgttattctgtctgaaaatcaaaatcctaaactattacgtatgttataattattcaatcaggatgtggttttggcgggagtgaatgcgggaacaatcacaatggtatggatagtgacagaactaattagacatcctagggttatgagaaaactccaagaagagattcgagcaacacttggatccaacaaagagagaatcacataagaagatctacaaaaagtcgagtacttgaatatggtgatcaaagaaacattcagattacatccaccatctcccctcttgctaccaagagaaacaatgtccgatatcgagattcaaggctaccacattcccaagaacgcccttatcaggatcaacacttacactataggacgtgatctgaaatgttggtctaaccctgagaggtttttgaatacctcaatcaactacaaaggtcaggattacaagctcttgcccttcggagcaggccgtagaagctgtcctggtatgaacttgggaatcaccattcttgagctaggccttcttaacattctttacttctttgattggagttttcccaatggaatgaccattgaagacattgacatggaggaaaacggagctttaaacaaaacccttgagctcataccaactcttccatcagcactggtcaacaaaagtattagataagctcaagatttgtatgtttgcctcttttgtaatctgtttggtatgttttgtgtttttttcttacgtttatcctggttggtttgtactgtgatatgatttaggccttgtttgtttgatcagtcagatggatcatctggatggagatgagttttgatgttcgtttggtgccaaaaacggttcattcagatgatccatccaaatgaatcatctggatgagtttgaaaatttaggctaaattttcaaactcatttggctgaactaaattggatcatttggatggagatgattcagtcaaaaataacaaatgacaaaaatatcctaattattccaattgattatttagatgtatttttagatacaaaaacaaatagactaaaccttattttacaattatttttttaaaaatagaaaaattaaatttttctctaaaactgtaaaattaaatttttccgcaaaaaccgtaaaattacgttttcccgccaaaaccacaaaaatcatatttcccgcaaaaaccgtaaaatcgtgttttcccgtcaaaaccgcataatcacgttttcccgccaaaaccgcaaaatcacgttttaccgtcaaaaccgcaaaatcacgtttttccgccaaaaccgcaaaaatcacgttttcccgtcaaaaacgtaaaattttgttttccgccaaaaccgcaaaattctgttttcccgccaaaaccgtaaaattatgttttcccgccaaaaccgcaaaataacgttttctcgtcaaaacctcaaaatcacgttttcccgccaaaaccgcaaaaatcacgttttcccgctaaaaacgtaaaattttgttttccgccaaaaccgtaaaatcgagttttcttgtcaaaaccgtaaaatcacgtttttccgctaaacccgtaaaataaatttataaatgtaaagaactattatttgaaattcatttacttttaaatatattttagattaagaattaaaattaatatgtttacaagtaataataaaaatataattagatgaaagcatgagtattttaggtatttgtattattacaaatcatttggatggagattagagataagcaaacgaacaacatctcattcggatgatccagtcaaatgaaccgactaaaaatgaaacaaacaagagtcggatgaatcatctagatagacatgttgaatcgatcagttggatgaatctgtcaaatggagaaatgaacaggccttataatgtttctatcctcaataaaatttatgttaattataatctttttgtctttccaatttttcattgaagtggtctttattatgaaaacggtagatcaaagactctggagggcgagaatcttttgtataagagatcgtggccgttaaaaggcaataagcactaggatccaatggatgaaatctcgaagtataagtactatgtagtatatcgtgtagccctgacctgtaaaaaacatgcctttttcttgttctgtttggtgtttgagtgtttgactctgcaatactatccaatttcaatgggttctcacaattaaaagcatattataaaaagccatagatgcattttataactagcatatcaaatataacaagaaacagcaataagttcataagttttcttggggatgaagaaggtactactaagataaagcctaagaagaaacataagaacactcctaaacaaacaaaagccataataagaagtcatgtcaaagtactgatgataatgataatagtgatcgcgatgatgagaacggcgatagtgatagactgagagtgatggtggtggtggtgaatggtgagaggatcaagcatctctacgcaagacatggactcggatggaatgaaccatcttctggtcatcatgaagaagctcgcattcgacagtatcttggtgctttttgagcctgttccttctgcaaatcctgtcccatcctttgaagcaaaccctcttatcagcccattttcctcttagccctactaaggttccttctccatcgatgtacttgatggatgaaccaaattcaaggttattatccttcaccacattggctgggatcaactacacacaaaacaaaatcaccgcaacatgttaaagccatactgaaagtaaaacagagatagtaactgaatctgaagtcttatattcgtcacttttaccagttcataaatcctgttcttgagcgtagtcggaaagtgtggattagttaaagcttccacgtccaagttcccttcaaaaactgaaacaaaacaatctttagtatattagattgtgtttttggattaacaatgtttatgtacttttgaaaaaagactatcaaacctgcagcatcggttgcagtctcttcgtcaatcggataaagactctggctgatttcttcatcttcatcaaagctaccatcatcatcttcatcttcatcttcatcttcatcatcatcatcttcaacaacatcagttgagtctttttcgtcttccacaacagaatcagaatcagaatcagaaagtggtatggcttgtatttcagctctgacctctttgctaccccaacgatcaaagacactcacttcaaaggtacgatgaccatcatacacaaatgtcatgaactctccgttcttcagctcatgttcctctgcgaattttggccatcctctagtaagatacgcagctccgcttattttcttcaagctcacagtccaaagttttcctccaagaccttggagcttcactgtctttggcaatggatcagcaagaaatgccataaaaggcaacggaatcatctgatgaaccaaacacaaatgtcaaacatcagattacttgttacaacttaaaacaaaactcaactcaactccacaagtaaaatgtcatcaaagtcatagagtctctctgtttcaagctaagcagtcacagttttgacctatgctttattgaacgagatacaaagacacagatccagagtttttcatcacttccaatttcacagctcgttttctcatttccgtttagaagcagaagaaagattgaaaacccgtaaacccaaccccaactgctaaactagctaaagattatatctttctcataaagccataactttcatactaatacttgagattcaaagtctgaaacttttcctactacagaaacaaggaagaagaaagaaagagagagagaggttcttaccaacgattcagaagccgattcaacgaggaacactttgaagaaacgaggatacaattcgctatcgtcagccatggaatgatgttggaaacgagagagagagagagaatcgaaatgggtttcttagctagtgagaggaagataacgttgaaggttcagagtttaaaggagaaagagagagagaaatgagtcaaagaagacctctgctgcgttcttgtacaaaacagagtactgtactatctcaaagctt

SEQ ID NO: 101 - DNA, 144628 bp, Arabidopsis thaliana
gaattcattcctgagaggttttccaacacctctataaactacaagggtcagcatttcgagctcttgccctttggagctggtcgtaggagctgtcccggaatgtccttgggaatcaccattcttgagctaggccttcttaaccttctttatttctttgattggcgtttgcccaatggaatgaccattgctgacattgacatggaagaagttggagctttaaacatagctaagaaagtacctcttgagctcgtaccaactcttcatcattcgtgaacaaatgcattaatatataagatcaaaatttgtaggtttgccctcatatatatagtttaatcagtttggtttttcattacattttggctttccttttatcctgtctggcttatgtattgtgaatcaagtatattcatgtttttatcttcaatagaaatattaatctatgtatgttttttttccaatgaagtggtctttaaataaactaaaccatgtttcaagttgacataacattaaaagtaaatcgttaagaggcattgaatcaaaaacttcttacaaaattcaatataattcctaagtttaattcaatcactaatcctgtttacgatcaaataaggtttgacgatcgcttcaatctagccttaagccacgtggaaccttacttttttttttttttccaaaacctaagtggccaaattagctcagaatttgtagaccgtagtgagtttatctcattagccctaaactcaatggccaatactagggtaccaccacatgcgggcatagttattttttcttcctatctgcatatttcatatttcccaatatattataactaacattatcaaacctaattagtttgtggtcacaggaatcagttccataaaacatggttagatatgttgattggcaccgtattgttgtcggtttggtttagagggagagagctttatatttaacgtgtctttttttagtggtattctccttctccatcaattaaacacagaaaatgatgtgcctcgacagagttgccttaattaattcaaattctctgatatattacacaaaaactttgatttattacaagaacctaaccacaagcataatgcctatatatatcctctctcgagaacaaaacgctcttcactctcctcatacaaagaaaaagaaagagttagcaacaaaaaaaaaacaataattatgtctatgttcctaggtttgctcttcctcttccctctctttttcatcctatttaaaaaccttttacctccgagaaagaagcttcctccgggaccaacgggtcttccgctaataggaaacttgcaccagcttggaagattgcttcacagttctcttcacaagctctctttagaacatggaccagtgatgcttgtccgttggggggtcgtccctatggccgtgttctcttccaacgaagcagctaaagaagttctcaagactcatgacttagagacttgtaaccgtcctaagctggtcgccaacgggttgtttactcacggctataaagacattggtttcactcagtatggtgaggaatggcgagagatgaaaaagttcgtggggcttgagctctttagtccaaaaaaacataagtctttcaggtatatcagagaggaagaaggtgacttgttggtcaagaaaatatcaaattatgctcaaacacaaaccttggtggatttgagaaaatccttgttctcctacaccgccagtatcatatttagagaagcctttggacagaacttccgcgagtgcgattacatcaatatggacaaacttgaagagctggtgcaagagacagaaaccaacgtatgcagcttggcattcactgacttcttccccagaggtctcgggtggcttgtagaccggatctccggtcagcattcgaggatgaacatagccttttccaaactcaccactttctttgaagatgtgatcgatgagcttttgaagactaaacaacttgatgatcactcagacctcgtcactgccatgttggatgtgatcaatagacccagaaaattcggttctttaaagatcacttacgatcatctcatagcaatgatgtcggtgagtgtgaataatcacttaattagtaccaatatctctaaattttaatgttggatataatgatattatagtgtgggaagcaagttaggtcgcattttgttttgatggtccatttatacaatttttcccctataattaaattttggttattaattttttttttttttttaaaccttaactatatatattttattacatatgtcatttaatcaggatgtggttttggcgggagtaaacgctggaacagtaacaatgatatggacgatgacagagcttacaagacatcctagagtgatgaagaaacttcaagaagaaattcgagcaacactcggaccaaacaaagagagaatcacagaagaagatctagagaaagttgagtacttgaatctggtgatcaaagaatcattcagactacatccaccagctcctctcttgctcccaagagaaacaatgtccgacatcgagattcaaggctaccacattcccaagaacgcccatgtaaagatcaacacttatgcgataggacgtgatcctaaacgttggactaaccctgaagaattcaatcctgagaggtttttgaatacctcaatcaactacaagggtcagcattacgagctcttgccctttggagccggtcgtaggaactgtccaggtatgaccttgggaatcaccattcttgagctaggtcttcttaacattctctactacttcgattggagtttacccagtggaatgaccattaaagacattgacatggaagaagacggcgctttgaacatcgccaagaaagtccctctgcagctcgtaccaactcttccataatcactcgtgaataatagtattaaataagatgatcaagatttgtatgtttgcctctatcatactacatttggtttttctttcctttttttcgtgttgccatattaatatatatccatgttttataatgtttcttatcttcaataaaaaaaaagtcatattattaagatttcaaagttctttcaaattttcattgaagtggtctttatcaaggaaaacggcagcgttttgtatagtcactactatgattgtgacctaggcactatgatccgattgatgaaatctccaagtaagtaagtactagtagtataatcctgacctgtcatcgtctactagagactggatcatacagttcttcatagactctgctttagcactgtttgcatcaaaagcaaaccacttctttttttttccacaagcaaaccacttcacaaggaagaaataaacttaataatttttcactccccccaaactttcattattggtataaaaagattattttgtttgttttttcgtgatgatacacagaagggccagacccaaacaataggtgaatactgaaaaataaagaaacttgaaaaagcccaaactccatgaagggggaaaccaggcccaatacgagcaaaacagaggcaaaacaatccgatgtccaagatcgtcgaatccgggcccatatccggaaatccccacaacagttgaccaaataaccaagtcaccttgaagaagcgccggagttatcaacaagttcgttcatgaattcatacctgagttcacagttttctgatattggaaggtaaaattaaagtcattaaaccaaatgattcatgttttttatttctttttttgttaaatgaatgagttccacaaaaaatgtttagatttttagattaccaaattagttatggttacacgaatcagttccacaaaaatatgtttagatttgtaaacaaccacattatgttgcagcttggttagagagaccactaaatctaatcttatgtttttttggggcttctctccattaaacaccttaactaaatcaatcctctgcaaaagcaaaccatttactacaaaagcctaaccacatgcattgcgcgcctatatatcgtctccggtctctcgagaacaaaacgctcttcactccaaatacaaagaaaaaaacaaaaccaagctaaggcaaaataaaagacaagaataatgtctatcttcctcctatgtatcctcttccttttccctctctttcagatcatttttaaaaagcttttaccttcgaaaagtaagcttcctccgggacctacaggtcttccgatcataggaaacttgcaccagcttggaagatcgcttcacagtgtttttcacaagctctctttataatatggaccagtgatgcttctccgttttggagttgtccctgtggtcgtgttctcttccaaggaagcagctaaagaagttctcaaaactcatgacttagatacttgcacccgacctaagctagtcgcgaatgggttgttttctcgcaacttcaaagacattggtttcactcagtacggtgaagactggcgagagatgaaaaagctggtggggcttgagctctttagtccgaaaaagcataagtctttcaggtatatcagagaggaagaaggtgacttgctggtcaagaaaatatcaaattccgctcaaacacagaccctaatagatttgagaaaagcctctttctccttcaccgccggtacaatcttcagactagcctttggacagaacttccaccagtgcgatttcatggatatggacagacttgaagagctggtgctagaggcggaaaccaacggatgcatcttggcactcacagacttcttacccacgggtcttggttggcttgtagaccggatatctggtcggcattcgaggatgaataaagccttttcaaaactcaccaatttatttcaacatgtgatccatgagcaattaaagattggacaactccaagatcattccaacctcgttagtgccatgttggatatgatcattaggccctctaaattcagttctttcaatatcacttccaaccatctcatagcaatgatgtcggtaagtgctaaatagtaacttaattattaataccaatctttaaaattttatgttacgaagctaatgttatagcttggagagcaagttaactcgtgataggcaaacatttcctttttatggtccattcttctttgttattctgtctgaaaatcaaaatcctaaactattacgtatgttataattattcaatcaggatgtggttttggcgggagtgaatgcgggaacaatcacaatggtatggatagtgacagaactaattagacatcctagggttatgagaaaactccaagaagagattcgagcaacacttggatccaacaaagagagaatcacataagaagatctacaaaaagtcgagtacttgaatatggtgatcaaagaaacattcagattacatccaccatctcccctcttgctaccaagagaaacaatgtccgatatcgagattcaaggctaccacattcccaagaacgcccttatcaggatcaacacttacactataggacgtgatctgaaatgttggtctaaccctgagaggtttttgaatacctcaatcaactacaaaggtcaggattacaagctcttgcccttcggagcaggccgtagaagctgtcctggtatgaacttgggaatcaccattcttgagctaggccttcttaacattctttacttctttgattggagttttcccaatggaatgaccattgaagacattgacatggaggaaaacggagctttaaacaaaacccttgagctcataccaactcttccatcagcactggtcaacaaaagtattagataagctcaagatttgtatgtttgcctcttttgtaatctgtttggtatgttttgtgtttttttcttacgtttatcctggttggtttgtactgtgatatgatttaggccttgtttgtttgatcagtcagatggatcatctggatggagatgagttttgatgttcgtttggtgccaaaaacggttcattcagatgatccatccaaatgaatcatctggatgagtttgaaaatttaggctaaattttcaaactcatttggctgaactaaattggatcatttggatggagatgattcagtcaaaaataacaaatgacaaaaatatcctaattattccaattgattatttagatgtatttttagatacaaaaacaaatagactaaaccttattttacaattatttttttaaaaatagaaaaattaaatttttctctaaaactgtaaaattaaatttttccgcaaaaaccgtaaaattacgttttcccgccaaaaccacaaaaatcatatttcccgcaaaaaccgtaaaatcgtgttttcccgtcaaaaccgcataatcacgttttcccgccaaaaccgcaaaatcacgttttaccgtcaaaaccgcaaaatcacgtttttccgccaaaaccgcaaaaatcacgttttcccgtcaaaaacgtaaaattttgttttccgccaaaaccgcaaaattctgttttcccgccaaaaccgtaaaattatgttttcccgccaaaaccgcaaaataacgttttctcgtcaaaacctcaaaatcacgttttcccgccaaaaccgcaaaaatcacgttttcccgctaaaaacgtaaaattttgttttccgccaaaaccgtaaaatcgagttttcttgtcaaaaccgtaaaatcacgtttttccgctaaacccgtaaaataaatttataaatgtaaagaactattatttgaaattcatttacttttaaatatattttagattaagaattaaaattaatatgtttacaagtaataataaaaatataattagatgaaagcatgagtattttaggtatttgtattattacaaatcatttggatggagattagagataagcaaacgaacaacatctcattcggatgatccagtcaaatgaaccgactaaaaatgaaacaaacaagagtcggatgaatcatctagatagacatgttgaatcgatcagttggatgaatctgtcaaatggagaaatgaacaggccttataatgtttctatcctcaataaaatttatgttaattataatctttttgtctttccaatttttcattgaagtggtctttattatgaaaacggtagatcaaagactctggagggcgagaatcttttgtataagagatcgtggccgttaaaaggcaataagcactaggatccaatggatgaaatctcgaagtataagtactatgtagtatatcgtgtagccctgacctgtaaaaaacatgcctttttcttgttctgtttggtgtttgagtgtttgactctgcaatactatccaatttcaatgggttctcacaattaaaagcatattataaaaagccatagatgcattttataactagcatatcaaatataacaagaaacagcaataagttcataagttttcttggggatgaagaaggtactactaagataaagcctaagaagaaacataagaacactcctaaacaaacaaaagccataataagaagtcatgtcaaagtactgatgataatgataatagtgatcgcgatgatgagaacggcgatagtgatagactgagagtgatggtggtggtggtgaatggtgagaggatcaagcatctctacgcaagacatggactcggatggaatgaaccatcttctggtcatcatgaagaagctcgcattcgacagtatcttggtgctttttgagcctgttccttctgcaaatcctgtcccatcctttgaagcaaaccctcttatcagcccattttcctcttagccctactaaggttccttctccatcgatgtacttgatggatgaaccaaattcaaggttattatccttcaccacattggctgggatcaactacacacaaaacaaaatcaccgcaacatgttaaagccatactgaaagtaaaacagagatagtaactgaatctgaagtcttatattcgtcacttttaccagttcataaatcctgttcttgagcgtagtcggaaagtgtggattagttaaagcttccacgtccaagttcccttcaaaaactgaaacaaaacaatctttagtatattagattgtgtttttggattaacaatgtttatgtacttttgaaaaaagactatcaaacctgcagcatcggttgcagtctcttcgtcaatcggataaagactctggctgatttcttcatcttcatcaaagctaccatcatcatcttcatcttcatcttcatcttcatcatcatcatcttcaacaacatcagttgagtctttttcgtcttccacaacagaatcagaatcagaatcagaaagtggtatggcttgtatttcagctctgacctctttgctaccccaacgatcaaagacactcacttcaaaggtacgatgaccatcatacacaaatgtcatgaactctccgttcttcagctcatgttcctctgcgaattttggccatcctctagtaagatacgcagctccgcttattttcttcaagctcacagtccaaagttttcctccaagaccttggagcttcactgtctttggcaatggatcagcaagaaatgccataaaaggcaacggaatcatctgatgaaccaaacacaaatgtcaaacatcagattacttgttacaacttaaaacaaaactcaactcaactccacaagtaaaatgtcatcaaagtcatagagtctctctgtttcaagctaagcagtcacagttttgacctatgctttattgaacgagatacaaagacacagatccagagtttttcatcacttccaatttcacagctcgttttctcatttccgtttagaagcagaagaaagattgaaaacccgtaaacccaaccccaactgctaaactagctaaagattatatctttctcataaagccataactttcatactaatacttgagattcaaagtctgaaacttttcctactacagaaacaaggaagaagaaagaaagagagagagaggttcttaccaacgattcagaagccgattcaacgaggaacactttgaagaaacgaggatacaattcgctatcgtcagccatggaatgatgttggaaacgagagagagagagagaatcgaaatgggtttcttagctagtgagaggaagataacgttgaaggttcagagtttaaaggagaaagagagagagaaatgagtcaaagaagacctctgctgcgttcttgtacaaaacagagtactgtactatctcaaagctttatgatttttgcagtttaacccataaattctagtaaaaaagaaaagagaagctgatttctaattggtgcttgacttctgaaacttgttttcgatcggtacttacgaatcagagactatttccatctctttcctctgttttttgttttttcatttcttttttttcttcctcattttcatcttcgtttaacaaaaataactcttatcgttgttaaattgacaaaaaacaataaaccaaaatgttattcaagacctctttaagtttttaaagtgaagctaatattttcaaacgtttacaaatgctttttagataaataattatttatctaacaaacacacaaatactcttgcatctatacaaatgacacagaaaatgcatgcatgtgaggaattcaatattctaatacagtaaataagagaaataattatcaaaaagaaaaacgaagtttgcgtgttcttctgtttatagatttgaatgaaacatcattctctgcaagccagggattggttctgttttctatggtgagattgtagcccactctatccactgttgcgttcatatatctttcacttcatgttcttattatatacttcattggactgttttgttttcagatttaaaccatttacatttcgattagaaagagtatcttataaaccagattaattcgtaaaatttcataatacaagaactcgttagattaaagattctttacgcacaaatttataatgtgcttcctttttctggaggatgggatacataagaatctaacatgcagagaaattcctatttgtaaaaaagaaagctccattgcatggagaaaactattgataacttcaagcatctcattctcatcatccctcaagttgatcttctgcatcgattttggaatacaatttgttcggcagtttaggagacgagacagagacaacctttgaacttgccttactttttgaattcgtcgactcttgtattggagacctcgcaggttgagtctttcctccagacttcttactggcagatgaagatgatccatgtcttgcctgtttaacaaagagagaaagaaatagagacatcatttacttgatcagattccagacagaaacagatcttgtgccagttggttccaatctcaaggaacaacaattgcatatttggtctctagtttgttcatgaattttggggacttactccatcaaagaagccgatttttggtgatggcacacggagacctgatggttttgcggaagctgaaggaaccaaaccaccgttgatagctgaaactcgttttgtgccttccttagcatcagcttggacaacagatgtatctttggagttcttgagaggtttcacagtttgtactgtattatcatttgcaggaaccttttcacgagagactgttttctggttaccattagccattttactagtttcagaagctcgtgatgactctgatgaatagtcactgatcgaaccagcagttggtacactggaggaaagcttgggcttggatgtcttattggtttgttggggtgggattcttggctggcccataatacctctagatgtagatcgatttgccaatggctgggaagataatctggaacttgaatcattcttcttctttatcgaatctatagaaggtttgtgagaagcgctagatgaagcactggcacagctctctagtgaagaacatgaagaggtcatttcattctttgaggcatctgaagaacgtgaagaagacttaaaaggcacaccaggttttggtaagacgggtttagcacgtcgcgacatggatattcttggacccagaggctctttacctgtactattcaaggtcatacaatatatttcaattttaaaaaaacaagtgtaaacttctttaagaacaagttctgactaacccgcaggtaatttggaattcttttcttgttgcgttttgcttatatctaatgatgacctgttcgtcgatgttgttgacaagggcctgactttgctgagtccgttgggtggcttggaaatggatgtactgagacctcttgtagcaacaggctgcagaaaatattttatttttttacaatatccaatatattcattatgtggttcactatagggtaagctattaaaagtgatgacacgcttctgattcatagattcaacagagccaattcaattttattagtccagctcattaccaatggaaacctaggaaaaaaccattattctagttatgaaagactaagaaacaagcccatttaataaatatgcacctgagaaactgaatgaagatactatacctgtttggttgccttccctggtccttgtactctactcggatttctgggactgcctttagatttagtctgggaaataaaaaaattaaagagaaaattagccaaggagagagtaaaaagagatatccacagggtgcatttgttagtacttatcggatttacctttccctgagtggcagtgacgtccactgtacttgaagctggagttagacaaagaatgcataagatggtcaacttggaaacaaatcacaagaattaactattgctgcaaatgtgtatggtctagtgagaacagcttgaaacagttcttccaatgccacaaaattaaaacacagtggcgggacactcttcatgaaatatgatagaaaactctacgattagctcacattagaatactagctctttcagaagccataaaaagaaaaaggcacaggaacagcttcattatttaacggttaagtaaagcacaacacacaaaactaaaaaaagtaaatccttaatccttattagagagacattcaaagatacacatgccaaggtgtggtaaaggcatataacgatagaaagaataaagaagactcacttgggctaattgctacgtctgttgctctcaacacattacttttcccgggtgttgcaacatcagatgttttagcagacctttgaatagatgctctaacatcctcaaacaaaacaaactcctgactgttctccacagtgcagtcactttgaaatgtagaaatggattctgtagatctattaatatcctctagaatggtcggtaaagctttcttcccactcttatgattgctttccatcatgctggacagttcttccggttccaaaacacctgatgtttaacaatatatctcagcaaaagtaaagtaatacatacaaatcgaggtacttcgttcgaaatgaacttaccagcgctagtgaagaactcattgtcccaagcaagacttttacgcaaattatactttcctttcttcataactttctcaggctcaggcgactcgtgaggttgaagcacctcttccttctcttcaacagaagaagcaagtatctcatcatcacaatactgtgtatccctcatgaagtttagatctttatcctccttcaaacatttatcatccttatctgtctctgaaatgtaatacaaaaggcaaacaaattccaactttaaactcaattacaatggatctaagttcaagtatcaatcaaatgaagcaaaatcaaaatcctctactaatcaagtagattcagagaaattaacaaaaatacccagaacccataaatccaaaattgaaggagaataagcagagatattgtaattcaccggaaaactcggagaagagaaggctatcgtcttcaacagcgacatcaatcaaaccaaggccatcgacctcaacttcgcttttcttgctctctttatcttccattgaacagagagatcgaaatgttgagtttgctcaaagatcccaaagactgaggaagaagataaaattttgaattgaagattagattcgatttgttcccactctttgagaaatcaagggtttttgagttagtgagcgcggttgttcactaatgaatcgtgtaatgtctttgatcgactctcgaccgttggatttgttccatttttatttttgtttcttacttttaaaaactaatctcgttgaagcctaataaagcccataaaaaaaaaagcaaacttgacctcatatgggccttaatgcgtaaaacccaatatccaaacatatagccgtcgaccgaaatacgatgaactaactaatagagaattctaagattttgtaattgtataaaataaaacaagataagatttttcattacattaggaaaaaagttttgaattttatttgtatataaagaaaaagaggataaattaaacgaaatcctaagaagacaaggattatgatttgggatggttaatctctatataaacagagcaaatacgtgacttatttttcacaaacacattcataaactctactccaaatacttttcctgatccaacgagtttagagatctcatcatctttcttttttttcttcttcttatacgatcaaaacatgatcacaaagaagatctttggctttgtgctcgcgatcacgattctcttgagttgctgctcggcgaaaatctacaaagttggaggttctagagggtggagtgggaagacgaactcttgggctgagcgtaaggaattccacgtcggggattctttgatcttccaataccatcagaacgttaacgacgtcactcaactctccgatgctttaaagtacgagtcatgcaactcctcttctcctaaagccgtttacaatacaggacatgatgtcgtaaccctcaaggaaccaggaattcactacttcatcagctcaaatcatattcaatgcgtcaatggactggaactagacgtttttgtcgtccatgaaaagtcacgtccgatccctccaccaccacgaagcaagacccatgaacggtcacgacccattagccattactccttcaccaccaccaccaagcaagacccatgaacggtcacgacccattactccttcaccaccaccaccaagcaagacccatgaaccgtcacgtccgaatactcctccaccaccaccaccaccgagcaagacccatgaaccctcacgtcgcattactccttcaccaccaccaccgagcaagatccttccttttggtaagatctacagagttggtgactacggaggatggagcgtttattacagttactactattacaagtggagtgagggtaaacagtttcatgttgaagatactctctttttccaatacaacaaggaactcaacgacgttagggaaatcaccgatgaacttgagttcagatcttgcgaatcgacttctactgtagctgtgtacaaaacgggacacgatctcattaagctcactaaaccaggagtgcattattttgtaagcttaaagaccggtctttgtcaggctgggattaagcttcgagtcacggtgcaaccatcaaccgaagctgttactttcccgaatgttcccaagaagaagttgtcacctaccgtcaacagatggtagttaccctttcagacctcatcactaagcattgagtttagttcaagagttttaggttttggttttgctcttttaaagagtttttggtctttttattcttactattgtttcatttagattctgttattcagtttttcttaaatttcaaagtttttatttttgtttgatcaagattaggcccataaacatgaacatgttccatatgacattcacatgtcccatgtgttagattctgagcagtaacagaaagccttatcaatatacaccaacagataaacggagtgttatcacaaacttagatcgtgaattttaccacaccacaacgattcaatatcaagtttcgtttctttttatcaatggatgatgtcaaatgaaactcgaatttaggaccaaaaaatcaaagagataattataaatcatgatgttgttttataaaagttacgggctcacttgcatgaaagaatcaacaggccaatgaagtggtgataaatagcttctgcttaagaccaaaacctaagaaacataacagtcaaaagaaaaaaaaggtgcttttcaattcttatcataagcaaaccaaactcttctccctacaacacaatcatatacaaatcttctctctcccaaaaactgagataccacaatccatatctatggaaagtggatcactcagattctcagacacaacaggcatagtcgagtctcggaagattgtgatgaatagtgtcctagtactactctgtgcccggcatttgaaccatcatattcgaaccctacattcacaaacgagtttaatcaattatctgcatattgatagattacaaataccattaacacttcaagatgctcgatgctattgccgaacctcagagactggaacatatgagaacctatgtctagatttcaaaaagtggataatgcatatatgacggttttatcgagtctattaaagtccttaaatcctttaattgttaataatattctctctttataccccggctctgctctatgtagagaatgaattcatttataagtatcaacatttcttttgtcggaaaacacttacttgagagtttccataaggaccctgtgagaatgagccttgttgaggaacctgcgagaactgttcagaaagtaaagacagggaaacaataaattagctggagaagctaatgcttaggtaaacgaccatatcaactggagaagaccgagtcattacctgagacacttggcttggttgaccatctctctttgcactcgattccccgccttttcctgatcctttagtgtcaccctatcagacagataacaatagcaaagggtagcagacaatcctaattagatacaatcatacaccatataccccataaaaggatccacgtacaaaattcgactatcagaaagataaatgaaagaggagaaccacgaacctccatctgcaaaattccaatccaaatagcatagacaaggaaatgagaaggaaaaacagagagtcagtgaatgtatagcagaatgtaaactgactaatctgaagtggaacatacctctctatatcgcatcaggtaaaccttgaggggatcgatgtaatcttcgaatcctaaagtggccatagcccaaagcaaatcatctccattgatggtcttccttttctctctttggcacttatcactagccctaaaaggcaaaacaatattccaaaatcgacatagtgactttgcttaacaacccaatgaatataacatcaatctaacttaacaaagaagagggctttacacgctataaccaccaaagcaacaaaaaggtaacatttttgagaaagtagagaaagaaattactcgctggtgacgaagctgatgaattcagagacacattcctgcatagtctctttagcatctttagcgattttgccatttagaggtaaacctctcttcatgatacggcttatgttagcaatcggaagaaacctgtcctgctcacgaacattcaaagacctcgggctctgatcaccgccactctcatggcttccaccaccaccaccaccggtttgcgattcggccatctcagaaaccctagataatcaggtagagattgggaaatcgggagaatcgaggaaccaaacccagaaagcgcgaagaagtgattagaatacctgaagaagaaggagaattcgaaaaagagcgggagacggagagagaaatgatgattggaggaggagacggagatggagagagagatttgatctgatctgatccgacgctggagaagataggagcttgtatgcgattcaacgatttagggcttttttatttttttatcgacaccgttcattttttttttgttaatttgacaaaaccaaacaaacaaaaaaaactcttttgttttttcctcaacaatgtttctttgttctgctttttttagtaattaggtgaaataaaatatataagatttatttcaatgtagtgaatttttttcttctatcatgtaaactatagtaaaaaaacatgatttcttttttatatacattgtatttatgtaagtggatttaatttatctaaatagttgttatgataagtggtttttctcagtgacatgtaatttctacttatttaattgtctaatttaattatttaagtggtttactgtttttcttgttatctttattgttttattcagtttttattctgtcatttaagcaaatatatatttgtttggaatcaaaatagtattagttttgtaataaaacctagtatcttatataataaagtaaggtttcctcaaacttgtgctctaaaaatcttacaagtggcgctttattcattcgacatgtgtcattcttcttaaatttaaatatactattttccatattctttgagtttaattaatattctatttaatgacacatgtgatatcacgttttcttttatttattatgtctaactattgctgttttttttttagtcaactaaactgttctatttcataaatcaaagcagttacgttacactaacataattatcatttatgtaattatgaccatgatttcaatatttagtatcatatttaatatcatttttagtgtaacccttcaccttataaaatgcaagacgctgcatgtcagttttttttaagttggtttctctgcatttgttaacgcttgaggttgaagcttcattctttctatacgaagataataaaaacgtgcatggtaagtttcgggaattacttcgagaggttgcctgtgaagcttcctaataaccgccatgtggagaaggagaagaagaaggaggtgaaagaagaggaggtggagaattgggggcttagagagttgatcgatggtggtgacgttgctcctggtaggattcttcataggaacaacattaacatcggttcctcaaggtttgtttcttacaactccttttaaacttctatcattctgtgttgctttcgggattgtttaaacatcgaaataatattttgtggtctgctaagtctttccacataattaaattgaaagtaaagagaaaaaaagacaaagcacgaaccatatgagtatgacggattggagaaaccaaagaatggtaatctcaaaggtttgcttcgtcctctgtattacgttgttttttatttttctcattttcactaaagaaatgaactaaaatcaagtttctctctctcatttttataattttaatatttgttttgtgtagcttttgtatcgtccaaatgtggtgatactgattcacactttgttacttctcttctttataacatgtttcatgtgtttttgctaatacatccttttataggtgcaatggtagatacaaagtggcttaaaaattattacactaagaatttcttagcaatcattacactgagaatttctgttcatgatgaaggtaataggtaagcaaatcatatatgtcttgctcgatgctcatctgtgatgtatattttatttaattattaatgtcatggttctaattttttctccagctatttgtgttttaactattcgagtcacaaccatagtcaaagtttcaaagtttagtaaatggtgtcaaaggcctttagcttcactttagtggttcgacatgggaacccggtgtcttcaacctgctattttatgaacatgtccgatattttaatagaggatataaacatagtattaatggatatacatatatatatatatatatatatatatatatatttaactaaatatctttaaaaacaaaattttatgtgactttcgtaggttttgaaataaagaggttgagtcaaattttagagtatatgcataagtgaatatgtgaaaggtggatttcctttagaaatgacttgatgaaaaatgtctaaggtaccttctcacttttacatgagaaacaaggtatcttttaccttcattttctacttattcttcatgttttgaagttgaccaatgttgtttataaaatatttaagtcaagttgctaaaattcatattaatctttaaaattattttagtttttcaatgaaaaataccaacagtgagtactcaaccaaatgataaacatatatagccaaatgtttattggatccatatgatatttcttggttggtcctgcttaatatattcactttttattttaatgtgtggctacttctttaattttcgtctctttcatttagtttatagtttaatatacaaacattattcctatttgtacacatttgatttattattaatcttatgtactaaacagtaacttataactcattttactaatcatagtaattgaaagaatgtttatcttttacttatcatgctaaatttacactatatttcgtttcttaagttttatagtgaccataataattcgtcttttgatgcatttgttggcaaatgaggtaatatagaaataaattacatggataaagataatatataacctacgagatttgatgaatgatgaaactatacaaaatatataatcttcattgatatcattggtgggaagttctgttaatttaaattattttgtatgttgttacttgttacattgcactttaaattttaaatttatttagttttcaaccgaattatggtatattttcttcaatatttgattatgtgcatcgaaataactttaaacttctttattgaaaatcatgtgtaaatagtaaatcattagtaaataaattcaatactttcttaccatattgttcaaagatggaagaaatagtaaataatttgaatattaattgtataaagtatttagagttcttttgatatcaattagtattaatatatcaatattcatatatgttaatcttactcattaatcaagactttatcaatctcacaacttcaaatctattaactactttacaatttacacacatactataatcaatatgatatatacttatgaaatcttttactcagagaaatattgcatatcattttcatatatttaaataaaacacaaggcttatcttgtatatcaatattataatttttcttttttgatcaattcgataatttttaatttataaatacccaaaataattttagattataattcataaactaaatgtttagtttaaaactaaaatatcataatcacaatatttatgatattttttattgaatgtattataaaataattaatattatattaatatatattagttatagacatatatttcactacattcatttcacccacgcatcgcgtgggacattttctagtagttaattaattattgtcactgatatctaaaaactaggtagaatgggttagtctctgccaaaaaaaaaaaagtcaaatgttttcatgaagtggatttggttgtcattaccaaagacaatctagtgggccgtctcagcgtttagtgcgcaacaaaaaggaaaatagacagaagaaaatgtcaaaaggaagatccaagacttgagaggtattcatgtggcttcttaattagagtttcacattctattacaaacttttactttacactcttgactcttctatacatgtaaagtgtaaaccaatgtacaggaccaaactaaatttgctactagcagctcacactcagacaagtaaggtataatttttcaagtattgaattcaaacaacatttcacaatacaaatttcatcaacaaatgtggcaacgtttcaacaaaaaaattaaacttagacaaatcgaaattttataaatttacatacaacaataatgccatttttattaaatcaagtaaaaagaatcagtattattattacttatggtttttcttgagtaacacaccaaacttcttcaacattttgctagtctcaatagaatctgttctttcctcatcattgttcagtatagaagctgccgtctcagcagctttcctccattgctcacattgaatcttcactcttttaagctcagcttccatggcttccgtgtttgcggtttccactttcttctccattgcactccttagaatctgcaactccatctctttatccattaaactccctctcacttccatcaaatccgattctagcttcttcaaatcgcccgtagattcgtcttctttcaccttctccattaactctttgcgcaaaccttcgatttcatctttggttctgttcaattcttccgttaactctgcttctctctgtgaatatcttgatttaaccgcctctgtttgttcgtatgcgcttcttatctgcaatgtgctctgtatatactcttcttgataccttgtctctgctgcttcaactgcagatttcaattgtgttatctcttgccttgaaagattcattgcttctttcagctcttccacttccattgatgatgaagagtctctactgtttactctttcttcctcgagctgtctgacgagtttctctaaagaccttacctcatacttagactgctctaactcagactcggactcaaagagcttcgatttcagtttctgaacttcgttaatggcagaagacagagcggtagaatccattccgtgttgtctctgcatagcttcaagttcagactgccatgtcttgtctcgctcctgcgagagtttacgcagctcctcaattcttgaatcttccgaggcattgatatccattaactgatgcttggcatcttcagcttcttcttgagcttctcttttcaatgcttctgatctgtttagctcttcttttgccttcttaagctcttcttgaagctgagatatcgtagattccagttccggtatccttcccgtccgcttcttctgaatcttgaaaagaacataatcaagaatcaccatatataaaacttgcatacaccaaaccaaaccaacaatttttaactgcaaaagtacctcattgagagggattcttgcagagcgacgatcagctactactttcgggatttgagttttcgatattgtcttggtttttggatcggattctgctccgcttggtttgagtctcctaacaactttgggagctggtaaaggagacttcttttgtggcagctccaatgatcctggcctatcacacacaatcacaatcactttgaaacagatcaataactccaacaacattcacaacaagaacacaaagttagagttgtgatcatcaccttgattttggagtctgcatttttggagtttaaaaaccttttcttttggggatataatcaattgcgttatgattgcttctttgaagaatctgacaaatagtacatgaagaccaatggaaagtgtgagaaagaagcaacagagggaaaaaaaaaacttatcataagcatatagacaaccaaactcagggaagaaagaaagcttaagcaagtgtacgaaaaaaacataagaataatatttacacatttagcttcaaagagactcctattaccaccaaacgaaagcaaagagacaacaaatgaatattgtaatgatttggaacaattccaaatatataaaatatttagaagtgtaattagaaaagaagttgccgtcaatgtgattcatcaaatcaccaaagataaaccctattacaagcaaagaaagcaccaatatcttacacataatctttctggttgttaagtcacccagttattttattttattttttactaaatcaaagttttggaattattgggaagaagagacaatttcttgtcattttgtaatgtgagatttggtttcattgggtggatcttcccaaaaaagaaacacagatccaaaaacagaacacccagcaaaaaaatcgtttttacataaagcctaaaactagagaatcttttaacattctctgcaaaaaggtgttttattacagaaacacttttgctttttgcaggaaaacaaagattaaagttttttttgactgaatctttaagctaccaaaccaaaataaaagttagctgatttgagtagatgtaagcaaatttataccttaaaccaaccaaagattaacactttcttcagcaaattagtagaaaaaacaaactagtagtaaatatctacctaacaagattgataaacttctgagaaaaaaaaggaaaaaatcgcactaaaattaggaataaatcaatgtgaaaggaagagaagtttctgagtgtttgaaaaagtcgtgaagaagtattcacctataccgtcgattcagcttctttttttgttggattaaaatggagaactgcagaatcaaggcaccagcacttagatgatttgatctttcctctttctcgtcggattgttattctttttttctcactggactcgcgagtcgttttttcccactgaagaaacatttattttcaactaaactgcaatatttatcaaaagtaacccctgaagtaatgattgtgctgtttccacctcaattttcagtacttagttatttttataatccttttacgttggattccttttggttattccgaaaaattaaaattaaaattttggataatcaaaaaaacttgtggggttggtaatgaaatagatcaataaatatcaggggctattttgaaattaattgatagaatggaccgaaagtagaagaacgtggagggggcgtttttttaactacgcgccttgtagacgcgcccgagtcacgtgctattgtttggcctcatattgctacttatgaacaacgaacggtcacgcaaccataagtcactcacacacaaaggacactaacctagcatatctatatactttataaatggaaaattttcataaaattgtcacaatttttcacaaaaacacattaaccttccgtgttcaatctacatacatttgaaagtgctatatattgaagcatgtaacgtttcactttcacaccacctcatagaaaaccgatgcatgataaatacgacatacacatctcctaaaagaaacaatgcaaaatcaatcatcactatcttcatttatcatacacgcttgctaatttacttaacatattatttccacacaactttaactatatatttgggcggaaaacaaaaattgggagaaaatatcgttgaaatttatgctaacgatcgattagcttgattacattaatggtttgtaaaaacattatattcactagtactagattattagagtattaactagtgacttctgaactactaatcaaatttttcttttgacgaataaaaagaaagtatttcaacaataaattcactacactgtctggctagtaattaaataattaaacaccaccatgcgatgatgattatgcaaaaatgttagaaattattataaaccattgatcataaaacattttgaaattagctagtgttgtttctttttttaattttcagtgaccgagagtgagtgatcgactgatgatgggttggttatgtacaaaaagtcaaaaactaatttcatccgcctcccaatttccggttttatccggttctggcggacaacgatttcatttttcgatcaaattttcggttcgatctaattcgcgtcggttgaaccatacttgaaaccgtaactcgtatccatatgtatcgttcaaaactcgacgtaaatttcaccacaccactaaaaagtctaaaaccataacgcggttctttcttcgtccttgtccctcaatttgaatcattgaaattggagccagattccaccattctcatttactcagacattgtcggaaaaataatcaaaatcttacgtcaaaggtttctgtttttctttgttttacattgtgcacaccacctgctcgataaaatgtctgtgaaactaaccactttgttgctaaagcatttatgctgtgaaattaactggcttgatcctgagttttaatataatttgaatgatgtatatatatacaaggtatttgattacttttttttgtctccccttgaaacaggcccgtcctgatatccaacttgttcatctacatatgagtttgcacaagaatattcagttgtatctgttttgaagaagtttgatataatggattatattgccttcattctcgacgaagataaagaattctttgtttggttagttggatgcttcgtttagtgacatgtctttctcgctgaaccttcttttgctaggaagaactcgtttggattaaaaaaggttaactgaaatggcgacaatgttacggttgggagctagagtttccgtcagcaacagtcagatactggcaacatcaagtgttgtatcaaccatcaagaccgaagaattaatgaatgatcacattaattccctatgtaaaagtaatttctaccgggaagcattggaagcgtttgattttgcgcagaagaactcaagcttcaagataaggttaagaacctacatctctttaatttgtgcttgctcttcatcgagatctctagcacaaggcagaaagatacatgatcacattttgaattccaactgcaagtatgatactattcttaataatcacattctaagtatgtatggaaaatgtggctcgctgagggatgccagagaggtttttgattttatgcctgaaaggaatttggtctcttacacatctgtcattactggctattcacagaacggtcagggagccgaggctatcagattatacttgaaaatgcttcaggaagatttagttcctgaccagtttgcatttggaagcattatcaaagcatgtgccagtagtagtgatgttgggttagggaagcaactgcatgctcaagtcattaagttggaatccagttctcatcttattgctcaaaatgctctgattgctatgtatgttcgcttcaatcaaatgtcagatgctagcagagtgttttatggtatcccaatgaaggatctaatttcgtggagttcaatcattgcagggttctcgcaacttgggtttgagtttgaagccctgagccacctaaaagaaatgttgtcttttggtgttttccatccaaatgaatatatatttggtagttctttaaaagcttgtagcagtctccttagaccagattatggaagccaaatacatgggttatgcattaagtcggagttagctggaaacgcaattgcaggctgttcgctctgtgacatgtatgctagatgcggtttcctgaattctgcaaggagagtgtttgatcagatagaaagacccgatacagcatcatggaatgtgatcattgctggacttgcaaataatggttacgctgatgaggctgtatcagttttctctcagatgaggagttctggttttattcctgatgccatctccttgcgttctttgctttgtgctcagacaaaaccaatggctttgtctcaaggaatgcaaattcactcttacattatcaagtggggtttcctggcagatcttacggtttgcaactctctgcttaccatgtacaccttctgctcagacttgtattgttgttttaatttatttgaagatttcagaaacaacgcagattctgtttcttggaatactattctgacggcttgtttgcaacacgaacagccagtagagatgttgagattgtttaagctgatgcttgtgtctgaatgtgagccagatcacataactatgggtaatctgttgcggggttgtgtggaaatctcatctctaaagttgggaagccaagtccattgctatagtttgaaaaccgggttggcgcctgagcaatttataaaaaatggactgattgatatgtatgccaagtgtggatcactggggcaagcgagaaggatttttgattcaatggataacagagatgtagtttcgtggagcaccttgatagttggatatgcacagtctggatttggagaggaagctctcatattgttcaaggaaatgaaaagtgcgggcatagagccaaatcatgtaacttttgtcggtgttcttactgcctgtagtcatgttgggctggtggaagaaggcttgaaactgtatgcgaccatgcaaactgaacacgggatttcaccaacaaaagagcactgctcttgcgtggtggacttactggctcgtgctggccgtttaaatgaagctgagagattcatcgatgaaatgaagttggaacctgatgttgtcgtgtggaagactctactgtctgcatgtaaaacccaaggaaatgttcatctcgcccaaaaagctgctgaaaatattctgaaaatcgatcctttcaactctacagctcatgtattgctctgcagcatgcatgcttcttctggaaattgggaaaatgctgcattgttgaggagctcaatgaaaaagcatgatgttaaaaaaattccaggacagagctggatcgaaattgaggacaaaattcatatattctttgctgaggatatttttcatccagagagggacgatatatatacagtcctgcacaacatctggtcgcagatgctagatgagtgtaatccgcaacacaagaaaagactccagtttatccatgaaaccggataaacaagcatttaagttccatctgagagaagcacagaaaaatgccattgtggctactctgtaagttgcatcttcttccttcttgatcttgatatcgtgtttcatcttgtttgcttgcttagataaatgctgtcaatagatatcttgccttttccttttctgcagtctgttgtcatgagattgacgcagcgtacatagttgccagcgtgtctattaaataaggcatttgatgaggtattatttcacttgattgtaacaaaatcttgttctgtttaatatttttggttacctattgagtaatactgaaggacggtttacttattgctgcagaaatgatgacaaatttcaagaatctcaatgtttttttctctcttgctattttcaaattggaactgtaggatgaactggttaccacattgggttgctacagacaagcgggatgggcaacaaatgcagtgctatacaaactacgaaaagaggatacatctcaacttatctgatgagtacaacaaatttgagttaagatgatttgaagaaggccatgaagcaaaactatctgctgggtatgtcttgaatcgcttcccctaaactgtaatcttatcaaaccgctgaaattgtgatgttttaggttgctaaacagtattgtagggatgagttgattcaatttccttgagattggctgttttgagatgttggattccttgttgattttccaggtatgaacatgtaaaagctccagactccttgagtctcgtagaagtgacgacgcaacttctttcttcttatatgtctagaaatggatcaaacactggactaagaatccggaaatcgtatcgcaaaacgaatcaaaacgatgaaagttttagtctcttatacatctgtgattattgagctaataaaacaacttgatacgaaacaatcatgggacgtcaatgatagtttagttgatggatctgtttgtaaaaatcaaatattgactctctttgcgtcttgattctgtgaatatacacatcttgtctctatagctattcggtttagcaaaagcaggattggtagcgccgtaacaatggaaccaagtaacatctaaatagtaaataagttaaatgatattgaagatgagaatttgtagcaaagatgatgtgagagactctacagtagcaaccaaatgtgtgtatgaaggaaaaacaagtcagaccaaaacaatagtctacactctccatgtgaaatcatacaggactcaagataatcctcatgacagaagtaaaggaagaaaaaacccgcaagggtgaaatttggtaaccgaacaaaaaccgctttgaaggaggcacaagtgaaggaagcttaagctggcttttattctccagggacagggactccttgctttagcttctcccgcttgagcttctttttggaaacgggcttcttcttccttggaggtaggttcttctgagcataaacgtaaagcacgtagttggcgattaggaacacaagaagcggacctccaacaacaagcagcacgattaatcccgggttcaatcccttggcttcagcagccgcctatgaaattcagaccaatgtatgcataaatgataccaaacatagaaaacaacaatctaggaccaagcaaacatgtatactgaatgagattattgcaaagcgtgcaatgttgtccagcaatgcatgcaaatgattatttttttctattcctctaaaaagctaagacatcacataatttccttagatcattaacaaaatagcccacaaatcacgaatccaacccttaagaaatcgattgcacattccgggatcgcagaagaggagctattatggtaaaatcatctcgatttcaacggagataccgttaaattctacaaaaggtgaaagtatagagaagattgacggtacctttccggcaaaatcttcgccgtccatgattacgatccaaaatatacgtgagatcagctccagtaacgtactaatggtaggaagagaggaggaaaggaaacgaggatctgttttcgacacagagattaataagacgcaaacaaactcacacagagataatatacacacgtgttttatccactacatcgccactttcactaatccataaatattattttggaccccttactttttaggtatttcgatttcaatccgtatcttttgttttgctaggttaggcccgtattatatctaccaaaactaaggttgtttgatctggttttagttcagcttgggtatggattggtttgtcccgatgttttaatggctttctaagaaaccaattttgtgttcttatcttacatacattgaaataacaaaaatgaattgaatattacaaaaatcaaataatcaaacacacaaaacacatctgtttggttcaactccaatatatctataccaaatggtcatcgtcgcttcgaatgataacgttatgttcgggcaccgaccacgaagacgatcgactagagttcaaagccacggtattacaatcagagagagtatcttgcaaactcagcaacaaatgcgaagtgctaaaactcatggtgggtctagacttaggcacaaccggtacatcagcctcaccaatcagcatttgcaccactgacctcatagtgggcctaaatgctggatccggatgcgaacaagccaagcccacaaccaagacccgccacatctcaccttcatcaaacttaccttcaagcctagaatcagcagctgcagaaactttcccttctttatacaaaccccacacccattctactaaattcggattcaccccaacattatgtctttgcacatttaagtccttctcaatcggtcttcttccactaaccacttccaaaaccaccgctccgtaactaaacacatccgtcttctccgaagcacgacccgtcagaagatactccggcgctaaatatcccatcgtcccggcggcaacagttgcttccggcgacttatcatgctcaatctgtctcgccaatccgaaatctccaagcttggcattaaaactctcatctaacattatattactactcttaacatctctatgaatcacctgattctcacactctctatgtaaataagctaaagcagatgcaacaccaagcaagatctttttccgatgatcccacggtaacgtgaatcgtgactcaaacaaagctttatcaagcgaaccattaggcattagatcgtagactaacaaaatctcacctttctcgtgacaccatccttgtaatctcacgaggtttctgtgtcttaagcttccgattattgatagttcagataaaaactcgttctttttgtcttgtgagctatggctgcatcgtttgacggcgacgatgtctccggtctccggtaatattcctctgtatacgactccgaaggctccatgtccgatgatacgactctcgttgaagttctttgtgccggctttgagttctttatagctgaactctttcggagctttgatgatttcagatgcgaatgaatcagatctctcgacacgtttgaactttttggagtaaacccagaataaagctccggcgaatagtgctaagaagaaagctccggcggttactactccggcgattgttccgggattctctttgcagaaacggctgtggcaagacgacgacgacgaagtttttaattgagtgttgcttgagatcggaatcgctgaagacgacggttgtgacgccaacggcggcggagatttcaccgaattagctttcggattcatcaaattagcccgaggaggaggtgacccggatccggatccgagactcgacccgaatgatgaactgaagctccaccattcgatactgtgaatctctgtacttccctgagttgacccggagaatccaacgaacatgaaatcgttcacgtatcgatctaaatcgagagggaaagacaaaattggaactttcggtttcagatttgagtaagagactgatacgttgaagacccgagtcaatccgtcgtattcgatccatgaattgatggtgttgccgctcttgagatcgatgtttacggtgccaagatcaccggaaacagaggaaactacgccatttacgtcgaatccaacatggttactgttaatgtccttgaaatctacatccattaaagtatcgaattcgacggcgacaaattttgaaccggaaccgtttggaccggttagaccaagagagccaccagcgatgccgattgagtttgcgtcgggagagatgacgaaagcgagaccaccgccgatggaagaagggttgacattggttatagagaaggagaaaaaagaagagaagcttgtcggaaagtgagttccaggttgtcggaatctgattgggttagagtataagacttttccggcgccggaattaggtacagagaggtcacgtgtgaggccaacgattccattgcttaaacgtgcatcaccgaggagtttgaggttgcttatggctagcgtggagaaatcaaactgtgtcgtcgtagctccattgaagaaacagagcaagattgaaatgaagaaggagagaaagagagacattaatgatcagttgaagaaatgttttttcagagaagggccattggagaagaagaagaaagaatcttaatttgagagattgagaaagagagatttgatgaaagtcacgggtagtgtattggggcaatactttgcttggagtaaagtaaagcagaggaagagacaaagaataatatggagagagcaaaagagaatccaaagcgacaacgaatgaagtcagacaagtggatagagagatgtgtaacgccacgtgggtttttccaacggctatatgtctttttgtctgaaagttttttttttctatggagaaaatgttatgatgtatcgaagtgacttttgttgttctgattttctcacgtctaacaaataactacatgcatgtaacggtcgtagcacttatcatctttctttatttattcttgtcgtggtcgtggtcgttggttgaaaggtaaaagacgcaccagaaaaaagtatccaaaactttttggctaattgtcgtaccaagaacattaacacaaatcatcgtcactggattctctagagtttccaagacatcaattaggggtgagaataaaacctcatcaaatcaaattatggatgggatggggttcgaattaaaactgatgttaaccaaacaaaactgaatttcttctaagtgaactataccaagttttattttaactaaaacggtaataactcgtctgttttttttctttttcttttcgaccggtaataactcgtcttctagaatcaaatcacattaaagaaaatacatttatgtcatgtacactgaaccaaaaccaattccatatttggataatttgatttaaggcctgctttcacaaaaataatccaaaaaaaaacttgaatgctaggcctattatgaagaaaactactttagtttctaagctgaaaggccgttacttcattggtcatcaattgatacataatgggcttgaaagtgggcctgaattggtctatgacgtcaacccacgtgatctatgcgtgtatcttgattattaaaaaacccgaaaccgaaataaccaacccgacccatctgatcaccatccgttaaaatctttcttacgagaatcttcaccgttgattgcaatgactttttaaaagcttccgagtcaaagctttgataatcataatatgttgcgagaaacaagtagttgcatcataataaccccttttgattcggtaagccattagagacctcagaagaagagaagtttttgattcttcgtcgagactttactcgattttgcatcgaagaagagaggaagaagaagaagaaaaagtgaaaaatttctgggtttcgattttgggtgagagataacaaaccctaggtgttgtgtaaatcgtgatcacatatatgctttttgagtcgacgattagagaagacgaagaagagtagcaagcaaacactatgatgaacacttctaatggaatgatatcagcgccatcttcgtcgtcttcaccggcggcgaatcctcagtcgccgggaattaagacttatttcaagacgcctgaagggaagtataagcttcactacgagaaaacgcattcctctggtctccttcattacgcacatggcaaaactgttactcaggtaaagatcaaatttttatatttgggtttaatagtttgattcgtcattaggatttctaatcattcaaatcggcaatttcagagaattagtatcgatggttaaatttttgttagtgaaattttgcattttgatgcactagttggttagctgatcaatcgatttgaatagcattgctttccaatgatggaatttggaaattttcgttttcaggtaactatagctcagcttaaggaaagagctgctccttcgactccaactggtacttcgtcgggttatagtgctagtagcgggtttcgttcagcaacagcgaggttgctaggaactggaaatgggagccgtgcgcttagttttgttggaggtaatggtggcggtaaaagtgtgagtacaagttcaagaattagtggctccttcgctgcttctaattctaatacttcgatgacaaatacgaattttgatgggaaaggaacttacttggtcttcaatgtgagtgatgctatttttatctgtgacttgaactcacaagaaaaggtaatttcttcttttctttgttttccttttagtgatttggctgtaatgttctgttttttgttttgttttggaagtaatggtttaggaaacttctttgatgtaggatccagtaaagtctatccatttcagtaattcaaaccctatgtgtcatgcttttgatccggatgctaaggatgggcatgacttacttattgggctgaattctggggatggtaatgtagaaatttgagcttaccgttttcaccgctgatctagatgccttgtctcatggatttattttgttatgatgtgttattgtagtgtacacagtatcactgagacagcagttacaggacgtctctaagaagctagttggtgctctgcattataacaaggacggttctgtgaataacaggcaagagtttatctttttccgtgtatctttaattttccttccatctttttcctttactattatttgttagtgaaacttgaagaattgattccactggttcaagtgattccgctttcatgtcttggattgagctagtgaaacttgaagaattgattccactggttcacaatacttcacatttactttgtctaaggatctctatgtgttcttcgtttgtgcttgtgctagtatttatgtcagcgtaacaaatttatataagtttctgtcattgtaatagattgtgttctaggaaactctcagtgacagtagattagttaaattataacagaacagtatgtttccttagaggagttcgtttttaagtaggttaagttgaaacatgaatcaattttggcgtcatgactcttgccttctctaagtttaaaataaagtttgttgctttgtaacagtcgttgcactagtatttcttgggtgcctggaggtgatggagcatttgtcgttgctcatgccgatggcaatttgtatgtgtatgagaaggcaagctcagatatcagaatttgttttcttgcatatgacttttaagttgcctgattttgtctaatccctgatcctgattaatttaacttaatagaacaaagatggtgccactgaatcaacatttcctgctataagagatcctacacaattttcagttgacaaggcaaaatatagcaaggtatgtgagtatgcaaccatttcaattgatccttatataggtgcgggaagcacatggtacatgcatatcctctactagtatcatcatttgctagtggttataagaaattattgtattacatactttcttttctatctttgagcatattttgatgtactattgtttattcatatgagtattcatgcagagtaatcctgttgcgagatggcatatatgtcaaggttcaattaacagcattgcattctcaaatgatggggcacacttggcaactgttggaagagatggtaagatgcgtctattatgtcgtgtgttctttttctttctctatgtatttctttactaagcagtaaacttttttaccattcacaggctatcttcgcatttttgacttcttaacccagaagctagtatgtggtggaaaaagttattatggtgctctgctgtgctgttcttggaggtgatgggttataattcctttggcaacttttcttataattgaatttacaaaagttgtcttaaatagataccagtgttgtgagcatatcacccccgtatgatactgtttattgacattgtgattgtattgacactgacagtatggatggaaagtacattttgactggaggtgaagatgatttagttcaagtgtggagtatggaggatcggaaagttgtggcgtggggtgagggacataattcgtgggtaaggttcttgatgtcaataagatttcttttatttaacttacacagcacttgactcatgtcggaatggttgctctcaggtaagtggagtagcgtttgattccaattggtcgtcaccaaactcggatgggtcaggagagcatgtcatgtaccgttttggatcagttggtcaggtatttcttcataccttgacccattttgctggtagtcctttgcattaccaaagaactgaaatgtgtttaaactacgggagttgtgcgtagcgtatctatattgcttgattggctttatcattcaaccagtgatctcattttcttatcattttaatgatgaggaaaaggaaaaagacaatattttataggagataggttcttaggatgatcagaaaataaggggaaatcgtagtagtgtagtttcatatggtctgataaagattcgttagcatatcaaattgtagataacgattttgttggtctgctagttagaaactttgttagaaagtgaagtgtttcgtagtatgaagcagccttaattaggatgctaatgagatcatttccacaaacatgttttctgaaagtcttctttttgagaacttaatttgctattaaaaaccatagactcctacgatttcagtctcttgattctcctatatatgatctgcaagtgtcttgcctcatacacactgctgctttcttctgctgaatccccaggacacacagttacttctctgggaccttgagatggacgagatcgtagttccacttaggcgagctccaggaggatctccaacttacagcacaggaagctcagctcactgggacaatgtcataccaatgggaactcttcaaccggctccttgcaaacgcgatgttccaaagctgtcaccgatcatagcacaccgagttcacacagagcccctctctggcttgatgttcacacaagaatcagtcgttacggcttgtcgagaaggccatataaagatctggacacggcccagtgaatcagaaacccaaactaacagctcagaagcaaatcctacaactgccctcttgagcacaagcttcacgaaagacaacaaagcttcactgagcagcaagatcatcagtggctctactttcaagcaatgacagagagatgctacttgtctgaaaatcaatcaggtgctattatttagtcatgtttctccttctaaagtgaaagaaaatctttaaagaaaagccctgtgaataaaattcgactgggttttgtttttgtttttaatattttaaaagaaggatcaaaatctgaattctgactgtaaattggaggctgacaaattaagtttgtgagagggggggggggcatagaagagaaaatatgggagaattttcggatgtaattataagaaagaaaacaaaatctgtttacataataagagtctcatcatccaataatgcaacttttgtgcttcagaataagaatgacactctttattttcccaaataaacgattcctgctctatttattttatttggtttctcaaacttaatattcttttcatcaaggatatgttatgtatactacacaacaccaaaagaaacaaagagtttagttgttgatcgatcttccaaaagatagtctttaacaaatgtcacagtaaaaatcagcgaacccatattccaaagtcacattgcaatatgattttgtctgagaggcatattttcttatttgtttagttacaaactagtaattttatgtttaccttgtactctgcgtagctttacacgagattgttttaacaattatagacattctagtcaatgatattcgagtccactgttaacccggtcagtgtatgtagaaagaagaaccgtgacacgaccgacaagagataaaatcaagggaattatttggcatattcataattcattgctttgtccattcctctctcttaaatcttaatcataccttttttttttcttataacgtggcgacattaatgatactattacttttacttacttagatacttgacaattaccgtaaaaacatcatctagtatatactttgtcgctgtctcacgtgtatatgcgtcagaaaaaaccttattatgtgtggttaaaatgggaggatttgcttattgagagaaaaaatgattctaaaaggaccattcgagaatctctagtttcttactacatccttaagtgaaatttgtatgagtttacttctctccaatttaaacatttgatgtggtgtaggcaccactcgagattcaagacagctggaacaaagccgataaatgttagaaatattctttccaataattttattttacacacacgaaaatggaatcggatggcgttgatatcttgaagcgtcggtggattggattcactctccgaaccctaaactatactctttaatgagcatgtacattctaataaatcgcttgatattattattaggacataaatgtgaatatacaattattggtccatttctcgactggttattaaatcctttacatgcaggttgaaaatctctacttttaagtttttttgtttgtgtatacaaaattgtaaaacagacatcaattatttcttaggattagtcttaattagtaatttttacggtcttaaaatatataattaggaaaactaattcgattataaaattattggtccattgggatttgtaaaaaaacactttaccgtatcttatcatatcaaacttgttgattactcaacgcaggcttcggaactaaccacgtgtcatgatgacgtcatcacttctctaactctcttcctccgttcctcgtcccttcgcagttgtcactttattattacttcacttgagcttctctcaagatcacagatctctcgttccttctgctcccaactctctacccagattccacctttaccttacgaaaccctaatccccaaaatcagcttaaagtttcaatctttgttgagaagaagagagttcgtcgtcttagtatgtagctagatctcaaggaaaatacgaatggttcgatcaattgggtagacaacaaaaaaatggatcttttgatgatacagagacgtgaatcgagaagggtctggttaggtgtacaaaattcaatagttctcctcgtgggtggcaaccatacctcctccaggttttgcactcgctaaatctctcttcttcttctgcctagaaatcttctcttgaaatcaaactcttcagttcttgttttaactactatgggctttgaggtgttgaagctgaaattgatgcctagttcattccgtcggcgcgtcatcttacgcgccctcgtgatcgtctgcgctttctctgttgtatctgttttgcgaaacctcgccggagcttacgaaggagagactattaataatactcagccgtgtaaggttgatgaatgcgccgtgaatttcgcgtttctaggtccgtttcttttctcaggtaacggattgttgttctccaatagattcttgaaacctgtttggaactatttggaatctgacaaatgtaaggacaacatttatttgactactcaagttgtcagagagcttactggtatgaatctgctgagtaatgattcaaaagctctctgtattggtcggagatcggtttcagctgttcttgcgatgaatcgacaagggatctctgatgttagtgtggcttatatgccacctgttttcgctttcaagcataggaagttcacaagtgagctacattatgaggatgcttcttttggttttgtgttttctatggatcttgagtcagttgctgtccctgcttcacttgtttatgagatcgagcgtatacttaagcccggtggaactggggctatgcttgtcggtactactagtgggtctgactctaacgagttggttagatccgtttcgcctgtttcttcattgctgaagaactcaagtgttgttcatgttgcttcattgggtaaacaggttttggttgtattcaaaagagatggagaagatagtttccgcttggatcaaactcatcatgactttcctgctgattgctcgtctgttctcaacaaccggccatacattggattattggagcctcttctggatgaaaaacgttcggatttcgagagacggattcattacttgcctgagttcattgatctctcttctaggaagaggctggtttatattgatatcggggcagtggatcatgtgaaagcaagatcgaactggttcttcccatcgtacccgattgataggaaagcttttaatagctactttgtgcatcacaacacatctatcttgacttcttatgtcaaaagccctggtgtaaccttcatctatcatccaggactcgcagcaactaaaactacaatagccaataccggagatcacgaagaaccttttgtggaagatgatagctttgattttctagcatggttcaaggaaactgctagcttcgctgattttgtggttctgaagatgaacacaagcgatactgagctgaagtttctctcagagctgataaagacaggagctatctgctcagttgatgaactgtttcttcactgcacaggctacagcgactgcaccggtatcattaaaagcctcagaaacagtggcgtctttgtccatcaatggtgggaagactaataagcttaacaaatgaagctttataaactaaaactatgttgtttggtaagttggtgttgttttgttttccaatctttgctcatgtatagagcaaagccacagaagtttgctccagcgacccagcacttctgtggttctacctaaataagctgtcgtcgttatgaactttgttttgtgtgtttgttcaatgaagtttgctatgttgtgtgtttctactggttttcatgctctgtttcacaaacgcttatagtaccaaagtagcctgacgatttaccaaaatactggaccacaaccatgcaggcatgccaacaaaatattagatgatgttttatggtaatttatcaaatagtatcatttatgttgtcacgtcttaaaaaaaagtatgattaagagaggagtggacaaagcaatgaatttgccaaaaatctcttgaagtacctattcccattcacccacaggacctacttcacgactcgccttgtatgtattcacccttatgatctttctctaaaaagtatgagttatctgatggtttggtgttcagactgtggatggatcatcttctgatctgatgatgcatctgttttcactgccacaggatacacatgtgtctcacttacctcgaccaaatctgcctctgatagagaggagaaatcaaattcagttccacaagcctgcttgaatctctctgcccaaccttttggaaaactaagttgagtggatggggaaacagatcctcctttgtcacaataaagtcacagccttggcctttgatcagatcatattgtaacacatatcctgccactggcaagattagccttcccagttttctttgcggaccagtagtaaatgctttatctagacggttttggttgttaataaaaatgaagaactttttgagactttaaccaatcaaatagcataaacgagggatgatttgatacgaggagtgtgtgacatttgtcacttcatccctcgtgtctactatccgattggctatactctctaaaagtgctgctgctggtactgcaaaagttgttcacttcattaacaacgaagaccgctagacaaagtagcatgatgatttacaaaacacttggaagtaaaacccggaatttaagtgtcatttggcatatgtaagttagtaacttgagttctaatgcctgcatatataccgataccacaaacaagaacattgggaagcagtctttatataaaaacaggagaagagtaacgtagcaaggctcactagttcctgtcgttgttgttcactgttatctccaaaagcctatccaccggttgtctacagatggggcagaggtttgtctgaaacctcaaaagctttgcacaaccgctacacatacactacgaatcacaaaaacaaatatcaaagttagctatcaatcaagaaaaaagccgtcttctttctcaaactctctcttaaggatatttatctgcttaccatgtgcctgcaagggagaacagtggtatcccgtggctcagataagcagatgacgcattcttttcctctttcattcgcatcttctccattatcatcaactgtattaccaatcccataaatctcttgaagaacatacctattcccattcacccacaggatctgcttcaccactctcgccttgtactcacccttatgatctttctctaaaaccacatgagttatctgtctgtttggtgtcccagactcaggatgatcatcttctgatactacctctgctttcactgccacatgatacacatctgtctcgtttgcctcaaccaaatctgcctctgacatatctgagaaatcaatccctgtcccacaagcctgcttgaatctctgttccagaccttttgcaaaactaacttgagtggatggaaaaagatcctcctttgtcgcaataaggttacagtctttgccttctttagcaaagaacattacagtgatgctgttgaatcaaaaaccataagaactgagcatcgatcaaaccttcaacatctagcaatcacacagtgaaaagatgtcgagctgtataaaacattgatcattaccttccaggaacagaggcgtcaaaagtgaaggagagcaaaaacttgccagggttctgttcatcaggctcaagtctcaaagtttctttcttcagattgatgtcgttccttatagtcactgcttcctgatgctctacgtattgcactggagacgccatctctccatacggatacctagcacaatcttggtacggcgacggataattgccttggtactgagcattagggtttggatacggcggcgaagtacggtcccgatgattttccgggcggcttccaccgcttatgacattgcccatgatccaactttgcgaaattgaaattgcaaatcgattacaaaaagatgaaagagagtgggaggaagatgatcagaaaagcaggtcaactaactttgtgggctaagatacagggccacacgtatcggcccatataaaataccagttttaccctatatttatttcaactcaaaacgattacttgcgctcgaagattctgttgatctcctctctccgctgatagctccatctttctctaaagcttctctcttgtgttacaggttcgataataaacaaggtcggatttacctgatcaaacgtttgtaatgtgggacaaacgtcggaggggagacacaacttttcaggcatgtccatttcctccaaaatttccagcacggtggctctggccagaagacttacgagaaggtgtgttttgtcctctcactcacaggtgaaataatttaccagcacaacaagtttttctccttcttctttttgtttcccacacagatgcaacgggttcaggaaggtctcgtctacggttaatgaacagaggaagcttcgggagacgtgtattagatggggtgaatatgccttttcttgtacattatgcgatgttgtttgccaaatctttgaattgtccgccaagcatctccagagtaaacaacataaatcgttcgtaagcatcccagcctattgtatcactacattcgtcattttcttactactgtatgaggtccctttagaaactttctcgatatcaaatctgatctactgggtttgtgacactcagctcttcccgagaggttcaaaactccatcaattctttgaatggtgcagtagtatcatcatttctcttcttcgcataacaatttattcgattagtacttcttacagtaaatgatcaaacatctaacacatgttttactttcgtaattaaaggatttggatggtaggcagtctcagaggctgaggctaggccaccaagaggccaattttgagcggccacacctcttcacgttctcataaaaaatgcagattctgaagggtaagactctcaatcctcagccaagttcgagcatttcctatatgattcataattgtcaagtaacaaacgactaagtatgttgaatcttgaatgtaacagtttctgtgagcctttgaggcatatggggttaatggacaatggcggtttcagagagtaactaaaacttactgctggtgcacgctaggctttatccgcctgagatgtatgaagacataaaggaatggtcttttctagaaagataatgattgcgttaaagcagagacatgtgtttctccaaaatcctgcttattcactgagcatcttgaggaggacgtaaacaagaccaagaacatggccccatggtgttgttattctctaaggaaactaactttagtactagtattaatgtaaacacaacgcataagaacctctttgatttcattgattataattccaatcactcgtttaaaagcgaaagaaaaaacaattacaccgaaggaaaattcacaaaagagcaagtggaaaacacaaatataagaaagggaaatgaaaactgcaagtgactgatttagatttgtacagagagatcacaacttcatttattcttgagaaatctggtttgatgtgtttagacgttggcagcacttctgaatgatccaagagacttagaacctgaagctctcagaacgaattggtggtagaatgcagctatcgcagctccaatgaatggtccaacccaaaatatccactgtttgtaatcaccaaaatttcaaaacattattcccttgtaaaaatgaaaaatatagttgaatgtaatggagaaacgttgaggtcttacgtggtcatcccatggcttgctcttgttgtagattacggcagctccgaaactccttgccgggttaattccggttccggtaatgggaatggtagccaaatgtaccatgaacacggcaaatccgattggaagtggcgccaacaccttttatttcatcaaaattcaaatttattagtatgattgaaatcaaatgttggtttggtttgctttggttccggttttgagtcggttaaccatattgaagattaatagcactacatatgtgactcaccggaacgtgggagtctctggcactacgtttggggtcagtggcagagaagacggtgtagacaagaacgaaagtaccaatgatctctgcggctagaccggtccctgtgctgtagccatcggctagagagttggctccacctccgtaacgggtgtagtaagagctttggaaggctttgacaaaaccaactccacaaatcgcacccaaacactgagcgattatgtacaatagggccctaggtaacgacactttacgtgccaagaatagcccaaatgtcaccgctgggttaatgtgaccacctaaggaaacaaaaagagttgacaatgttaccagtacttgagaattaaggtacaacaagcaattaattaaccggtttcaattctggttaagacagggttagtcagttgcttaaaataattactaggcttagattagatatatatcattcggataagaaccgatttgatcatgacccttattaaatgttttataaacaaatcattttcgtcttttaaacctaagattttaaaccgattaaatagtaatgtcaaccaagcaatatttttccttgcaaaataattaatttcgaataaacaaaccaaaaccataccatataatttttacttgtctaaattttgagtttgcaagttgtacttacataagtaaaacttattcagcttattcggtttaattgtaattctaatactcaaaaagtgtataatcttaatctaaaccaaaccaaaatcaagattaaagaaggatcataccagagataccggcggtgcagtagacgaggatgaagatcataccaccaaaggcccaagcgataccgaggattccaactccgccgcaatctacgccaccggcatcagtatcggactgaatcttgtaaccgatgactgtcaaaacggtgatgtataagaagaggagagtggctacgaactctgcgataactgctctgtagaaagaccacttctttagctccgctccatcaataaacggagctggtggcggatcttgatagtctcttgtctgaaatccttctccgggaacggcttccacatcctttgccatagttaacttcttcttctttcaaacaatagcttttttttcttttgcttctctgttggagtggttagtgagaagaacatgtgctctgttttatagtgagagctctccttcttgttaatttgtttgtatacttttttattgctttatcttttaaaaaatatttttagtatttttgccaacgttatatgtttttttggttttttgtgtattgaggtttttttttggaatgaaagtttgtattttcaatgaaaaaattggatataaaagtatacgagtgagttatgattattattattatgagggaagtagctttgacaaaatgattatgaactagctgtcctgaaataaattttgaaccaattctatttaatgattgcttgatatatcaatatcatacatagttactaatacgtaaagacaagaaccctagtttaatttcagacttagagtttttcaatcgttgaaatttgaaaaattcaaataagttagccagtaaatttctttaaaatttgattcgagtttattttagatcctaaattagaatagtttattctatttaacgttatagtttgcaccaagtccatgacaaaaagattgatccaaatctattgaacatgcgtctataaatacatgataatgatatgggattagctagcttatgatatcataaaacaagactttatatccactcatataaacttgcatagttttatctctcgtagcaataggaagtatcaatcagtggtgatggtggagagctatcagaaccacaactttgaaataatttattagtttttatgtcaatcaaatttttatatgtttttctggtaaataatggaggttttttttgtttactttaacttagcctcgccgcccccatcacctaaatgtcattttctttaggaccgacccaatatactatatcatcaatatggtgctctcttctttttgtcgtataatatcatagcctgtcgatttttcagatttaaaaagccacagtttttgtatgccaaatcattttaaaataacttacgtccactttttttttttatcgaatcagcatttacattcttgaaaacacataacaaaactccaaaaccttattttgctccaacgaagcatggctaagtttcttcactccaaatccaactaatcatgcatggttatattcgagtgtctcattgtatatatagagaacatttttcttgttcaccaaagtcaaaacactttgttttcaaaatagatagatatatggtcattctcttacattataaacatttttgtagtctagaaggtctagttttctatcaccaacatatgttattaagtatgtttgaggtgtcataaaacaaaaccctacttgaagatgttagagccggaactcaaaattatgacacaatattaaagaagcataaactatttcgttcacaaactttcatttcaaacttaattgacgataagtaaattgattcgtcgtatatcttatcacacataactcaaattagcatttaagttgatattactaacataaagtaaccaaagcctaaacgaaccctttttcataattgttgtgttggtatatcactctctaaaaccagggtgtaaagttatggtgccgttttgtggggtgggtcgagattccactgaggttaaaatcatatggtctgtgttggcaaaaggtgacacgtgaatgggtggcgcgcgtgactaaccgacccgatccctccgacaaacgtatcgtcaccgtccaatccatctcagcatatagccgtttgttcgctcaaccactcacataatgccacgtttgttgtccccaccaatcatttgcattttctcttcatatccaaaatttcatatcttttgcgaaaattgctgacaattagactgaaaacgaaaatataacaaaacaataaatcccaataaaaatgacaaattgtgacaaccaaacaaaagacaggagatgcagttccatggttatcgttttgccatgtggcaaaccttatcgttttggctacgttggtcggctactattagacgaatattccacgtcagccaactcttttttctcatgtttttcgaagtgaattttagataataaaagcacagaaatgtgaattttctggttctggttctgttgttaattgttattagtatgtttatttatatattttacactttcttctattcatagaaaactagtcttaaccttatctaaatattctagacaaatcgagttacatatagtatgacgtcgttatgcataaattttgtcctttttagtcactccaattgaaagaattagtccagaatgtactacagcaagatcaacaaacatatattgatttatctgtcttcataattaataatttaatatgcattcaaatgataatcaattggatatatactttacatgatatttacagatcaaaaatttctatattgtaatttccgattacttaaatgagtaaaatataaaagtcatatgaagtccaaattttattgtaccggaaaggacaaataaattcatataaagtcatgttctattgaatctcttctagtcctccatatttcaaatctcttctagtcctccatacgtatttgaactgcggatataaagtatgttagttttttatttcactatggtagatttttaaaacgtaattaaaacaggtttaactatgagaacatcgtagatccgaccaaaatttatcgcatagtttgaaaaaaaagataagatactactattaagtatatatattttatgttttgttttgtttaaataaggaggtagacattattaatagttgtttagcacacgaacaagaagttactagtataatttctcaacgtttattttgttgatggggtgctcgttggtcaaatttagcggcctgacaagctcagtcgacagtaatgtgcctttttgggtgtacactgatgtctcacctacaatgtttttggtcgagttacgtataaaagctcttgtcctaatcaatttgtcttgcatacgttttttacaggaatgcattcacttagttaattagcctttccttttagcccatcacccatatgatctatttagtgcattttctttttgtttgatcatcgctggcatggcaacaataacaaataaaatcatcgggataactaaacgctaaaattctatgcaacttgaaaatctgattaaaaaaattaaagcaagagttatttttcatcaccatcgttttgtcgttaaatatgacagaaaatttcgttcttgacgtatcattttcattttattttcacaatgtccattctatttttgtgttggaccatttttccatgtgaacgagtggtttccaaaacagtatataaaatttctatgattgatcttatacaattcgattggattttttttatttttttttaccaaacactagccagcaagagagcccacaaggcccaagaaccatgaaccgttgccaaacttagcaagtgctccaaattactttgagcacttggcagaagttacttgatatcaggcaaaaacctttcttttagtattttagcacaaagaatcttcaagaaatgaagagagacgagtaattatgatgaaacaatcataaatcttccttgccgttcaatatgaatgaaatcgttttgagtgtcaagttcgatgtttacatgaatttgaagatacacatctttcagtatatttttatttgagcatatattaatcaatcaacatactggaggaaaaaataatcaagaactccaagaccttatgttcatatactttaaaacaaacatgagacagttatttcagcaaaagaaaataatttctactaagcaaagaaatttgtgaagaatgataatcttttttcaaaataaatagtgttcaagtaaccttcagaacaagtgccaaagactatgtatgaaatcaaatggccactatccattacatgagatgcaaaatccttaccatttaccattaacagtcatgaaatttgtatctaaagaacttcacaaaaagaatggaatagatagtctcggttgtttgtgcagtgatcaaaattgaatcaaagatcatgaaattctcatcttttaaccctcaaaatgcaataccatttacacctatcaccactaatcaagtaaacaagcacattccatacataccaagttcccaaacatttagcaaacatacaacaacaccaatgcagtttcagattctcatcaccataatcaaacaaagagctcaccaaaagcagaaattaaacagtgatgatagagaaccattggggttttgaaacagagaataataagaatccaaaacttgagagtcattctaagtgaaacatcatagcagctaagttcccaaacaaaaacaaaatatggtaaaacgagaaagataacaacagaagcatttcaaattcccataagaagaaaaaaaaactccattgttccttaattctcaggaatctcaatctcaccttcttgaatctcctgctgaagatccttagggtctttcccatcaacagtgcatcccacagagacacacgttccaagaatctccctcacagtcccactcagctccttagcaatagatctaggcctcataatcctagcaatctcagtcacatcatcgaaagagatgttaccgttatgcttaatgttcttcaccttcttacggtctctctctggctccttcaacgccttgatgacgagagctgcagcagatggaaccacggttaccttagcttgacgattctgaaccgtcagcttcacggtgacacgaagtcctttccattctttggccgtctctttcgcgatgtcttctccgatcttctttggtgcgagaccgagaggaccgatctttggagctagagaactggcggctcccacttctcctccggttacacggacgtacacatcgacgatctggctcgggtccaacttcggcggcatggctctgtgttttggagtttcgcttgatcaaaaagtggcaaacgaaaaggaggcagctgcgaaatgagcttttagggttttttggaagatgaggaacgtattaagtggtcgagattagggtttcttttgttccgatgctaaattactaacttatcctttcatttcgaacggcccaacccaatattatatgggcttagtaactttactaatgtagaccattgaagcccgtgtataatcttcggtacaatcaagtctcggttctattactggtttgatcgcaaatatttggtttagttaaaccgtttctacttctcatcaaccaaagttactgttaggaggaggagagacaaaggagttgaatctcgaggcaaaatcaaaatccaagctttttctagggttttacggatctgcgattatcattgttctgggtatttcttttttttagtgattctcagatctaccatttttcttaatttcgtaagaatgtgttgttaagagatttaacaagttagagactttgtttttccccagttcgttgaaatgacgagaagaaaatccaccgtcgtcctgccgcagcctattcgtcgatcagcgaggcttatctctctgcagaatcgagatagtcaagtgaaacccaggaaagatctgggctttggctcggaacccacgaagaaaactcgtcgggaagtcttaagaggtctatcgaagagattagtatactcatcggatagtccaatcgaagattcgaggtcgaagaaattgaacatttcgaaagatgggtttccgtcgctaaggagatctcttaggctttcgagtagggaatgtcctgaagtcaacaaagagaagcctaagactgcatctacttcatcttctcgcacgaaatcgtcgaccactgtttcgtcttcttgtgctctgagacgttctcctaggttttcaagtggaggaggagaatctgtggatcaatcttcttcttccattgggaagaaatcaggtaatagtgttttgagtagctgtagtacgaaatcaatttcatcggagaaagtgaaaggtggagatggtttgaaatctaaggatagaagtagaagtcgtgttcgtcctaagactaagaagatgtttagtggttgtgatgataatgaagaagaagaagaagaagttagtgtctgccttactgagaggaaaaggatgagaattgcaaagccgaatgaggaagaaaatgctgaagcaaaagctgatgaagtgaagagaaaaggaaaggaggaagaagaagaagaagatgaagaagaaggattgaaggcaaagaataagcttgagaaaggaggatggacagaggagttggagttagctttacaaggagcttatttgacggtgaagccaagtcctaatttctggaaaaaagttgctaagatggttcctggaaaatctgcgcaggaatgttttgatagagtgaactcagctctgattactcctcgtcaagctcagcctcgaagagccacaaaaacaatcttatcaacgattccgcagttttcactttctgcaagcaaactactgaaacccaattcaccaaagacaaagatacgacagcgcagaaacaatctctcaaagaaagtggtcaggcatttactggagaagcaaaatcatatggatcaaggtcttggatttgatctcttctcagttcttgagcctaacaccacaagcaattttctctcaactccaatggaaaaagggcgaagtcttccaaaaatccttgaaagtccggtgccttgttcaagtaaagatccaacaactctcgttagccctccagtactgaaacaggtaaaaaacaaggcattgcatgagaagtacattgatcatctgcatatcagggatgctaaaagaaaagccgagtcaactcgactggctgggaaagagaacataagacctattgaaattcagaagaaggattcggtgagagcagctaaggatgcacttttctttgatgtacaagatgcaatccaaaagctaaaaggtctggaagctgagaactcatctagttcttcagagttttgctatgatcatgtcgaaacggacgaagaagattaaatctagttgtttctagccagatagatttgattgtactagggcacagagcgtagagattagagtaaggcattactgtaaatcttagttttgtaaccatgagactgaaactacacattgtgtgagtttagtttagtcagatgtttgtatacacaacaaaattgattctctgtttactataatgatcaaattttggttccatactttttgcatataaagcttaacataaatcataagagagaaaactaaaagccaaaggtgttaaacttccttagttgagttacagaagaaagtgattcttaaacacaagaacacttgagaattaaaacaagtagtaatttacacaaaagaatttcctccttcagtggaaatttttagtttaccgttcctaatcaaaaggttagagatcctcaaaatctgtttccttccttaagtaagacccatcttaaatcctcctgacataaagtattaatagttatatgtttagataaaatcctgattaatatcagtcttcagaagagtagtcaatccgctctatctcccaacaaagcttagtcgcaacactttcatggcaaggcgaatattcctgcaaacaacaacaacaacacaaattatatggtttgaacatgaatatttttggatccattaaaatgtcaaattgtcaattgtcacgaacctccagcttctttacaagctccttggcagtaggtgcagaaattatgatctggcgtgcgtttgtactgatgaagccttcttcaacggctttatcaatgaaagagagcaaagagttgtagtatccatcaacattgagcaaacccacctgcagtaagaacaatgataattagttttctaatgactttgggtttagagttatctaccaaagtctgaatcttcagaaggataatagtgatgggtctttaccggtttatcatgtattccaagctgagcccatgttatgacctccaaaagctcttcaagtgttccatatccacctgcaatttttttaaagcagaagacattataatccattaacattattattattaagagaaatggtcaatttacagaactatgcttcatatgcagaaactgtcctctgactctatatacatatggacatgattacaaaaaaagcaggtcctattgaagaacaagacttccttagatgggcaaaacacgcatttttctgagactgtttcaggtttttgtcttttaacatgaaacaggtaagaaaagtaaaaccttggtcacagttacactacacacaagctaaatagagaagtagctcccaagtaaaaggcaaagagaaaaagaaacagagactggtctaattttcagtgcgagatgtcgatgggtcaaggcatctatagttattatattcaacattttgtccatataaaaaccccagaaatcattacaaagcaaaccaatatacttttaaagtttttaacttgaaacagttgctttcacactgcagcttgagtttgaccaagaaacaaaaaaaacatgtttttaccaacatgttcttcttccatcttctttggcaaaaacagtcaaagagttaaacacttttcgatgctatattttaatgagcattcttcttctttattactttgatattccacaatttaagaatttaaaaagcctaaaaaattatgctcattagattcttaaacaatgctgtcactagacttgaccaggttatatcttacataatcattacttgtttagaaaactgaacttgtaagagagaaaacaaaattaacattaaaaactgatgggaccttgaacaatttcaagattttaattaagaaatcaatactactaacctggtaaagcaataaaagcatcagagtgtctagccatctctgcttttctttgatgcatatctgcaactgctcttacttctcctactgtttcaccggtcaactgccaaaaagaaagagcatccaaaatttaagatattaactaacaatcttgaaactttaaacttaattaaaaggggaaaacaaaaagcagctttagactgttctatgaccagaggcaatgatggcattgtaagcaaattggcttattttaaattcattgcaagactttagttaagaagctcttcatcttatttttttctcaaaataaaactttctcttttggtttcaataaaagagatgaaagttaaggcaaagagagaaattaaagcaagaatacctctctaggcatgagtgtcttgggaataactctgtggtcaaataacaacaaagataagaaaaaagacttattaagacaaataactctgtgctcaaatcgtcattgtttccttaaatctatggtcaagtgattagatgaagagttacccaataacatggcgaccaccatcatgaacagcttgcgaaaccaaacccatcaaacctatgcttccacctccatagactagatcaatgttccttaaaacctgtgatagtaaacgaaacagagtaaataaaccatctttatcactacagatagtttgagaaattagctatgaaaagaaatcaaaaccaaagatactctatttgtactatcaaattagatacaaacattcccatgcggaatttgtgggctccaaatcataaaagatgaatatgataaaagggaaaaaaagaaagaatctttttgagtgatcaaaattacatatttaagagcgtttttcaaagtagaaaacagaggaaatgctctgcatttgcaaaaaaaaaaactcagaaacatattcacaaacatctggtgaacataaaactgtaagaactcaagaaacagagtaataactacacatagaaaaatccagaggtgtatgtaataataccaattcgttgcctagatccacagcagcatcttggtaactactcttcttgccttggctgcttccacaaaacacacagattcttccaaactttgacttttgcatggtttcattgttgacctccattggttacgatgagagctcaagctatgaaaaaatctaaactttttacccgaaaaaaaacaaaacaaaacaagaagctttggtcctttgtatttttggtaatgaaatctctcaattgggttttgcttccttaaagaacataaacgacaggtacaaaacgtacaagtgtcaaagaagaagaagaagttaaaccaaaagaaaaagctcgaaacttttctttgcctactaaaatgctttcgagagttggggattgttgtattaatatatagttagagagtgcgttttctcgtcatgctcttggaaaaaaatttcatttttgggatttttcacacgtgagagattgaagcatgcgcgtcgcagccacccgcacatacacttcatgttggcacgcgtggaccacttctttgtgttttcctctatttgtcttctttgtgcttccacattttcgtttatttttctatattgaactatacacttatgaatgtatttctataactttctattttctacttactaactccaaagactttggaacctaaaaataaaattcaaaatggtatggatgtttaattgagagtttatgggaaattagtgtaagcaatctcagaacaagaaagattcaagctttcttgacatagataaataacctaaataatcataatattgacgaaatttctatattatgaatttcaagatttttacaactccaacttgacgaaaattagagattgatgatattgaatcaaactccttttctttttactaaatttattggatataaccatatacattaataatcataatattttaaagaagattacatattgaaaatgaaatatccctaaaaaatgtttcataatgattttaatatatgtcgtgcgaaagataatgggaagtgacaaagaaaacatctttagattaaagaaattgatttagatataaagctacctcgctttttgattccctttttgaagaacagaacaaaaatttcattttcgacaatgcaaataaaaacatttcattgtcaacatatatctgaacatataagatgggtccaaacataatttacttttacctctctctattctgtaatatttaaatgaaagtgtgatcaaattagtgatgagatacacagacatgtaccatattcatataaaaatttatacttataaatgatgatgtctgggttatggagcaatgtgccattgatgattgaaataaggaacacaagatgagtagttatggcttttattatcaatgtactagtatcatttacactccctatgaagacaaccctcctcctatcttgttctaagcatataccaaaatcatttattttgaatatttactccacttactttactttttgtttggtgcttttataataatgtttttgtagagatattaaaagctctcgctttacccatatccctgtgcatttggataatggatatcttactcatggccgtttgttttagtaaaaatttattcatacatagttgttgttaacgtaaaagaatatgattacatctattacgaataatccaacacaatgatagactataaggatccaatgtgacaacaaatgagggtacttcaatgtagtcaatgtatgtaaaaggttgattttgcttggcttggaagcaatgaatttgaattatctttagctagtagcaagttcgttcaaatgatgagatagaaacatgaagccatattgacatcgttttccatgagcacgtgaaaacaagtacacaagtcatgttcaatatataaaaggaaaagaataagcaaatttagggtttcatgatttatttttttcatcgttagtacatgtaaattggcgaggaaggaggccatttttttccctttggactttgatgaataatttgatatatttgcatactgatgcacctcgttatgagacgaattcactccacaagacacaagcattctattacataggaaaatttgattatgaaattgtagactccacatgctattaagttattaaattatcttatggtactgtattagtatggaactgcagctagctgtttttactccgtataccgtatgctacgaaattactttcttccatatggacattagacagtcaccccatactctcatacttaattggacaaatatataataagtgtgtgtgaaattaaactagaaaattgcaatcccaagaactcagtgcaagctgccctatcagatttaagtatatattttgggttaatttagagattataaacaaataattacttcttgaaaccaatgtgtatttgtatctgcatgcttgcatgcgcatttaactcttttgttttgtttttttactccactccacattcctcttgggtttctaactttcaaacctattttataatattattatattcgactatgatgctaataaaaccacatactaattagttcattcttgatatattcaacattcatttttcaaagatctcaaatggttatgacttgtggttatatatataccaacaatggataaccaaaagtaaacctcgtttgcttttgatcttataacaataattctctttagatgcaagagaattatattattcggttaaaagttatttatattcacgatactgttaaacggacctaaattcaggtttgttaacaaatttaacatgtgtatgttatttttaagagtaaattaaaattgaaacaataaaaggtaaaaaactcctaatataattcaattttatgtatattatatgtgattaaataagttatatatccatttgatagatgcatttatggatgtgtgtgcgccgaatacagatgaagcagaagagcagtgatgaaaaggctcctcgctttctaattctatcagacagataactttattttaattgttttttggttagaaatttttgattcccaacaaatcatatttaatttgatgttaatgaacgagccaaatgacgaccatatcaactgcagctgtagtactaacaagggccccaacttgcaattacgaccggccaaaatctgccttgagagtaccatattcattatggtatttacatattaatttagacaaattttagattaaaccattttcagaatctatcttaaaatctataaagatagtgtgtgactttgtttaatactcgtaacattactcacctctataacattactcaaccttaataatatacgtcatatctataacatacgtgtatagggtcatggtggttgattgatatacgaagacaaaacgaaaaaagagttagtaaaaggcctaacttgtaggcaggaagagtggtggaagtatgatggtgaaagagcaaagtgacatttatgttcttgtgttctttatttttgagacataatcttccatttcttcacttcaatgtttctcttctctgctttcggtcattgctatgccccatttgttcttaccttttcgttctaccaataatataaatattctcttttttcacctaatgacgtcgaagataccatcgtcacgtgacatccgcacaccatatgtattgacattggtattagtgttgaaaattagaaggggtgtcaatgggccgtgcttgaagaatatagtccgaatcaatctcagagtttaggcccatttcaatctcttagcggtataatccatcattgtactagcgtttaggcccatttaataaaattgggatatataatacggattacaccaaactataaagttttgaatcccagagcatatgcactgggttcatatgagaactgacaatacaacctcacacaatcaaacccttccagaaaatttcttgttccatatcgaaatttgttaagttttaggaaaactggttttcagaacataagaagatcacgaacatcaaataaaacagactgctacagtcactctcatatgccaaaaagccaaattgtgtcaaaataccaacaaaaaagacaagaagaaaatgcaacttcaactacaaccaatctcgcaggattcgaacagacaagaaacatgggttctctgctttaatctaattgttatctttctcaaaaaaagaccattccttaacgaccttcatgcatcaaaggcggataaagcctagcgtgcaccagcagtgagttttagttactgtctgaaaccgccattttccactaaccctatatgcttcaaagaacctgttacattcgagattcaactgtcttaagcaaggcaatatatgattcagaatggaaatagcagaacatggctgagaattgcgattcttaccctccagaatttgcattttttgagaatatgaaagaggtgtgaccgctcaaaattggcctcttggtggcctagcctcagcctctgagactcttatttgtcttccatccaaatcctttaggaaagtaacacatgagttagatatttgatatttacagtaagaagtaccaatcgaataaattattatgcaaagaagagaagtgatgatacttactgctccattcaaggaattgatcgccttctgaacctcttgggaagagctaagtgtcacaaatccaaaacccttggatctaccgctgtccctgtcgtagataaccctagcttcaactacctttccttgctcgttaaacaagttctcaagtgccatgtcatcaacaccccaagaaaggttgcccacgtagagacggtttcctgaacctgagcccgaaccggaccctgaccccgaaccataactggaacgttgagaccctccgtaaccaccaccactacgttgagaaccgtatccaccaccacgctcggaaccataaccaccaccacgctcggaaccataaccaccaccacgctcggaaccgtaacctccaccacgctcagaaccgtaacctccacttcttggtcctctggagaaggattcctctcttttaggtggaggagggccagcattgactctcaaaggtctgccttcaaattcctgaaatgttaaaaatcaacaggattaatgaaaacagccagtgtagtaatgtaagaaatccaaaagacaagcttgaaggtatgaacaacaagacaatgtgacaaaaacaaatgtacaaatctaaatcggctacttatatcccaaatgagaaacacgaacaacctagaagaagatgcatcttatcagcagaatataaaacaacatcaaccacgaagtctccacaaaccaaacagaagataaacaacactatttctctatctcaaacgttcatacaatccaattcatggaattccacattacacacaagccaagaacaagaaacaatacaagcaactcaataaacaaacaagtccacacaaaactcttatcaacaagtaaagacacagtagcgaacacaagtatctgcttacatagccattgaactgttgagctgctgcttcaacttccgctgcggttgacattgtcacaaatccgaaacccctgctccggccagtcactttgtcatagataacctacaatatcaaactcatttcatcacaaatgaaaacaatctcaaacctttagctatgttctcactttaactctactcaaaacgattcaaacccaattaagaaagataattaatccaaatctgaaaacagaaacctaaatttatcttacctcaaccatctcaacatttccagcgctctcaaagagctgagcaagctgagcgctatcaacgttaaaagaaaggttaccaacaaagagcttaaggtcaggagagaaggagttacgctccacaggcgctgaatcgtcaccgtcagcgaacatatcatcttcctccacctcaaaatccgaagatacagcaacgtttctaacgaaacgcgacgggtactcggcgggggatgagcatttgagggcggaggaagcgaagatagagacgaggtggtcggagtgaagtttgaaggagagggaaggaggtaagacggagacggaagcgggtctggagacgcagagaggaagggatttaggattgaaagcagagagggaagaagcagaggcagacatggctaaagcttgagagaattttgctctcgaggctaaagctttgagaagctggtggtgaagagataaggtttaagggttctgcgagataacaagtccagtttttgatatttattggcaaaaaaaatggaacttttcgttttttctttgcaaaaaataaaaatctttatccacttgaaatatctcccacttggattttttttttacctactaaaatctgtgtcagtcaaaagagttggtaaaaataaaagttactttgttacataaaatataaaaatagcattgatcttattgtttgattcattaagtacgaaaatatgacaacacaaatataaatgttgtgtttactgtttactaatgaaatgaaaacagattaataaataattatattgaaaatttagaaatttcaaatatacttttttttttacagtaagcttgaggagcttaaaagaagagttactcaaaccaattgagttttttttttctgttatatagtaatttttcaatgaagtgaatggtatgtgtgataagatctggtgcgtccaaattggatggacggtgtagattaaagagaaggaataagagagtgggtctagtgagaagataaggccattactaaaagccaaaggaaaaaatgcaactagagagactgtacactgaggctccagtatggatcttcaactcgttcttaactattaagtaaccactgataccataattttgaggtttatgtaatattgatacagtttcacttgttttccagattttttttgtttgtttgtttttttcctttttgttggaaatgaaaatcaaaggtaaaaataataggcaacaaaaatgaatttatagtcatgagtaagccttgcacaaattttcaattaagattccaaatatagtgtgttccggcttaagttaaggaagagtatgtaactgactaactgttgtagcattaggctcaatagtcaatactaccagaagatgccatcttctcgaaccaaatcatcaattctgtcccaaagcctcctctccggttcacgtctgtattcaggagacaatggatccgagagataaaccctagctctccattgctgaggtttaggtttggataatgaataaaattagcaaagagttacttattagagccggttaagctggagatgtctagtctgggatcgggtatttcccaaacccgaatttaaccgtttaataaccatcccggttcagattcataataagaatgggtcccattgatagccacgtgtcgctagcgaagacgtaagaagagattgaaaatggctaaggaacattgtccggcggagaatcgaagaagagaagaagaacacaacagtcagatactttttcttcttattttgtccgtaccgaaatcggaaaatggacattactgttcgaatctccggcttaaaatcctccaatctaatccggataacccctagattctcatcttcctctagattccgttgctccaacaacgaacctcctcgaaagggaaacgagtccaacggtgagagtctgatctcgaagcttatgttcgttggtagattataatcggttaaattcggttttatttggtttatagcaggtggtggtggtgataaagcgtcgacggactgggacaaggcgtggaagaatttcaagaagcagagcaagaagtcattgttctcgcaattcaacgtggacaagtacgtgacttggaatcctcccagatcggagtttgatttgtcggaagaagtcgatcctataaaaagaacagagagatccaatctcatgctctggacaagtccaaggttcacacttgttggagccatcgtcattgtctcattcctccttctctacaccattcttgctcctgtcaagtgataataatctcattcatctttcatttagatcagattctgaatctgttgtttctactgtttatatgcattactacttttgccaaataataagatcgcagtttctacagtcaagcaaataaaaacgcagtataatagagccctttttgtttttgtaataaccgagatagatcatgagccgaaatcaagattaatcccctgaagtttatagaaattcgtgtatttttttgccgttgaaaatgtttacagtagttaaaaatgaatgataaacggttttcgtagatggtagaactcaatctctagacttgatcctctacacactcaaacaaaccacttggttacacgttcttggttgagcggatttcaaatgtgaaacattttaactcattttttttggtgaacctgaccaaaagaatattgattgtacaagaaccaaagttaaaacttgttttggtcgttgttgaataagaaaaccgtgctctcagaagtctttatataggcaaacatataaattgtgaattttgttttctttattatcaattacaatttattttaaaatataaataaagatataataaagctatatattcacgaataattctaaaaaagtggtaacaaaaaatgacttgaaaacatttttctagtttcaatttcaagtcattctaagaagttaaaattaaggaatatcacatgcatgaagttacattgaaagtgtcttcttacaaaatagaaaaaaaataaaaaataaaaacatagtaaatgttgtgcattattctttcaataattagggaaaacaataatacagtatcttagatgtttataagaccagtatttattcatccaggcctaacaaaactgcccgccgcgatttctcatgtaagtatgtaaccttagttattaaacaaaattgcatttcttagacgttaaccaacttaattatttgtcttatagtcaacgtgatttttttactttataataatgcttcgatcgtaagttgaatctcaatcaatgtcttgattcccgagagagaagtagagcgttaaaattgccgtacagaacatgatggagacattaatgaattcaataaaatcggcgaagttggaggtttagctgagggaggcctgtgtcatgctgattcgtttagttaccaactcttctttcaaacatctttagtatgttactgctttcatcctctttatttgatctactgattatatatatatatattttttttttactacattcgacattcgttgctaagagaatagaaaacaattttctttttcaaaattatccttagtttgatattggtatgagagatttacatgtaatttcgactcttgaaaatagataaatgtatgttgagtattgttgactataagaaactagatgaatgcatcaaatagaagtgtctttttgctttatgtacttccccacttgaaaacatgacgattctatgaacgatttcattcgtcataacgatagaattagtttgtcctacgaaaacaaatgtaaaactactataattttcttgacgtaatattggtgggtttcatgctgcggctgttggttgggaaacgtccaatataaacatttctaattatgtatatacctgaaaatttgtaaaagctaatctaaattgtgaaacatacataacaaatactttaagaagaaaaagtcatcaagcaaacaagaagacatgacctagaaccatttccgagacattatattaatataaaattgatattcaaatcctccacgatcttacagctttcaactttgagtatttcaacgttttctctgattacacataaactaaaatttgtttttttgtttttttaatagttgatagcatgtgttaattattagtttatatcatacaatgaccttagaatccgcagatcatttcaagaactcagaacaaaagctgatgtattcacttacatcattgaattgtgtcagtttgagtaacccataatataaatatacgcaagtcaaaatgcattgagcttatctctcatttagactttaaatttctgatttcagagaggtcaactctttaagccaagccatggctcatatggttggagcagacgatattgagtcattgagagtagagcttgcagagatcggaagaagcatcagatcatcattccggagacatacttcgagtttcagaagcagctcttcaatatatgaagttgaaaatgatggtgatgttaatgatcatgatgcagagtatgctctgcaatgggctgagattgagagattaccaactgtcaagcgaatgagatcgactctccttgatgatggcgatgagtccatgaccgagaaaggaagaagagtcgttgatgtcacaaagcttggagccgtggaacgtcatctgatgattgagaaactcatcaaacacattgagaatgataatctcaagttgctcaagaaaatcaggagaagaatagacaggtaagtaaaaacaaaatctctaggacaaagcttttcccatttgtgatttctaattctagaaagtttggaactgtgttgtgcagagtcgggatggagttaccgaccatagaagtgaggtacgagagtttaaaagtggtggccgagtgcgaggttgtcgaagggaaggcacttccaacactgtggaacactgctaagcgtgttttatctgtgagtactcagcaatttctgcgaattacaaagttgttattgtcttgatcctaaattgaatgctcttgtgttttctatttctccaggaactggtgaagctcactggtgcaaaaacacatgaagccaagataaacattattaatgatgttaatggcattataaagccaggaaggttagtagttgtctcctaactagttttgatcaaagttttataccttcaagtgtgcttattcttcttgctgttgcaggttaacactgttgcttggtcctcctagctgcggaaaaacaactttgttaaaggccttgtctggaaatttagaaaacaatctaaaggttctaatgatgaaagcagttatatcattttcttgtgaagatttttttgctgcagctgtgtgaagtttgtaccttttctcttgtttttcctttttgtttccacagtgttcaggtgaaatatcttacaatggacacagactggatgagtttgttcctcagaaaacttcagcgtacataagtcaatatgatctgcacattgcagagatgacagtgagggagacagttgacttctcagctcgttgtcagggcgttggtagccgaacaggtagattttataaaccaatcattgtttccctgagtgcattgaaatgtatgtattcatgattcttttttccgcctacgaaaacagatattatgatggaagttagtaaaagagaaaaggaaaaaggaatcattcctgacacagaagtggatgcttacatgaaagtacattcctctgacactctctagtctctgaagattattctaaatctaatctttaaactcaggtggttgattagagactttttgttttcctataggcaatttctgttgaaggactccaaagaagtctgcaaacagattacattttgaaggtaatatagtctctttgatagcctggctaataatctggcccttttttttggctcttatgtcttgtgttgcatttgcagattctcggacttgatatttgtgcagaaatattgattggagatgtgatgaggagaggtatatcaggaggtcaaaagaagcgtcttaccacaggttagttcatatctcggaaccttcaaaattgtcatcttttgttgacatgttcattttctaaagcattacttgaatctctgaatgtttgcagctgagatgatcgttggcccgacaaaggctctgtttatggatgaaataacaaatggcctagacagctccacagcttttcagattgtcaaatctcttcagcagtttgctcacatatcaagcgctactgtacttgtttcgcttcttcaacccgccccagaatcctatgacctctttgatgacattatgctgatggccaaaggaagaatcgtgtatcatggtccacgcggtgaagtccttaacttctttgaggattgtggattccgatgccctgaaaggaagggtgttgcagactttctccaggaggtaaaaaaccaaagctttgttccctaagatgaaacttctgtgcttttgaagtcatcagttgttgaccttctcttgttctgctttgaaggttatatccaaaaaagatcaagcacaatactggtggcacgaggatttaccttacagttttgtctcggtagaaatgttgtcgaagaagttcaaggacttgagtattgggaaaaagatcgaagacactctgtcaaagccatatgatagatccaaaagccataaggatgctttgtccttcagtgtgtattctcttccaaactgggagctgttcatagcatgcatatcaagagagtatcttctcatgaagagaaactatttcgtctatattttcaagactgctcaggtacaataagagtttccattccacagattttctccttgtcttctttagatgtcgatagtattcctgagctttctagctttatgtgcgcagcttgttatggccgcattcatcactatgacagtgtttatccgaacacggatgggtattgatatcattcatggaaattcttacatgagtgccctctttttcgccctcattatacttcttgttgacggattcccagagttgtctatgacggctcaacgtctagccgtgttttataagcagaagcagttgtgtttctatcctgcatgggcgtatgcaatccctgcaacagtgttaaaggtccctctctcgttctttgaatctctcgtttggacctgcctctcatactatgtcattggatacacccctgaagcatccaggtgagctttcccctctgttgcttggttcacattcaagtctggaaatgctcagtcaagagtaaaataatgaagtttaatgtttcaggttcttcaagcagttcattctactctttgctgttcacttcacctcgatatccatgttccggtgtctagctgcaatcttccagacagtagttgcttcaatcacagctggcagttttggtatattattcacatttgtctttgccggtttcgtcattccaccacgtaagatttcaccccattactgtgctaaatcttacctcacaagttgtaccattcaagcatgactctaaggttctgtgtttgctgcagcttctatgccagcatggctcaagtggggtttctgggcaaatcctttgagttacggtgagattgggttatcagtaaacgagtttcttgctccaaggtggaatcaggtgatctctcttagtttcgaaccgtcctcttctctcttaatcacccaaccttcttctttatttggcttctcagaatttttctggttacacatgtagatgcaacccaataattttaccttaggacgaaccatactccaaacccgtggaatggactacaacggttacatgtactgggtatcattatgtgccttgttgggtttcactgtgctcttcaacatcattttcactctggctctaacgttcttgaaatgtaagtacatccatcatcatctactaaaagtaaatgtatattctttcaaaacacagtcgccacatacttagacagcctttaccaaatcacagcacccacatcatctcgagccatgatttcgcaagacaaactctctgagctgcaaggaacagaaaagtcaacagaagattcttctgtcaggaaaaagaccacagactcccctgtaaagaccgaagaagaaggtgaaaactttgttgactctcttctcacatctctattttttttctcccactaacactttctgctgacacagacaaaatggtcttaccattcaagcctctcactgtaacatttcaagacttgaactatttcgttgacatgccagtggtaaagctatcataactcaaactataaaccatatctcaagactatcgccacggctctcacttattctttaatattccaatgatgatgatctcaggagatgagagaccaaggatatgatcagaagaaactacaacttctctcagatatcacaggagctttccgtcccggaatcctaacggcactaatgggagtgagtggagctggaaaaaccactcttctcgacgttctagccggaaggaaaacaagcggatacatcgaaggagacattagaatcagtggcttccctaaagtccaagaaacattcgctagagtctcaggctactgtgaacaaacagatattcactcaccaaacatcactgtagaagaatccgtaatctactcggcttggcttcgtctagctcctgagatcgatgccacaacaaaaaccgtaaacctctgttttctctcttctcttctcttccattactcgaaatcaaaagcttaagtaacgaaacgttgaaaattgtacagaaattcgtgaagcaagtgcttgagacgatcgaattagatgagattaaagattcattggtgggagtcaccggagttagtggattatcgacggagcaaaggaagagattgacgattgcggtggagttggtggcgaatccgtcgattatatttatggatgagccaacgacggggctagacgcaagagcagctgccattgttatgagagctgtgaagaacgtcgctgatactggacgaaccatcgtctgtactattcatcagcctagtatcgacatttttgaagccttcgacgaggtaaattgcataattggctcaataaactgaattgttatattttgaccccaaactgttttatcttataaaccaagtccaaacttgaatttgcagctggtgcttcttaaaagaggtggtcgcatgatctacacaggaccattaggccaacattcacgtcacattatcgagtattttgaggtaaatttgcataaattttacttttagtctatgattgtttttacaaagatatgttaacttcttttatttattggattgaaaaacagagtgttcctgaaattcctaaaataaaagacaaccacaatccagcaacatggatgcttgatgttagttcacagtcggtagaaattgaacttggtgtcgatttcgcaaaaatctaccatgactctgctctttacaagtgagtaaaagcttttaaactatgcattaataactgttattgttctaagaatgtggttgtaatgaaaacatgtgtgattgttataggcgaaactcagagcttgtgaaacagttgagccagccagattcaggatcaagtgatatacagtttaagagaacctttgcacaaagctggtggggacaattcaaatctattctatggaaaatgaacttgtcttattggagaagcccttcttataacctaatgcgtatgatgcacactttagtctcttctttgatcttcggcgcacttttctggaaacaaggccaaaatctgtaagtggagagtgaacatacctcttatatgacactttagatcccagtttgctaacattttgagttgtgttttgtcatttgtagagatactcaacagagtatgttcacagtatttggagcgatctacggtttggtactcttcttagggataaacaattgtgcatcagctcttcaatatttcgaaacagagagaaatgttatgtaccgggaaagattcgcagggatgtactcagcgactgcttatgcattgggtcaagtggtgactgagataccttatatattcatacaagctgccgagtttgtgatcgtaacatatccaatgatcggtttctatccttcagcctacaaagtcttttggtcactctactctatgttttgctcactactcactttcaactaccttgcgatgttcctcgtctccatcacgccaaacttcatggttgccgcgattcttcaatcgctcttttatgttggtttcaaccttttttcggggtttttgatcccccaaacggtaagatcacccatcctttagtttcttgaacaagaatctttaccaagaagaaaatgttttgtaatgtattcttttggtttgtgaaaattgcagcaagtaccagggtggtggatttggttatattatctaacaccaacgtcttggacactcaacgggtttatctcgtcccaatacggcgatattcatgaagagatcaatgtctttggacaatccacgacggttgcaagattcttgaaagactattttggatttcatcatgaccttttggcggttaccgcggttgttcaaatcgcttttcccattgccttagcttctatgtttgcattcttcgtgggcaaactcaacttccaacgaagatgatcatgccaattagtcttcatcaatcatcattttagaataaaataataaaataatggtttttatttttgtttgtgaaaataaacatataacatataacttttctttttggtatgtatatgattttgaggaaagtaaacaaagcattgtctatgcaaaacaaataaccaaatcttgcaagtatcaaaactatattacttattacttgtcttgacaaagacgagtacttgtttttccaagtcgaatacaggataagtaacggatacgggacaaataccatgtatttatgcccacccatatcgacagacagtcagtaatcaaaatttaccttcaaatcaagaaaaatgggcaatagttaacttgagtgacaagtaacaaactaaaatgaataatcatgcataaattataaagataacattaaaccattttccattttatataatttgtacaaataacttttaagttatataaaggaattatttagaaatatgcttgggtaattgtgttctcttctaatttcttattatatatctctagaaactttttttctcaaaagagatttctaaactgatattacatattttttttttagtttttttttgttgttgtaaattttagacatctatttttagacatctatattaaacgattaaatatttcattatcattataaaatcataatgtatttatgtataaaaattcaaaatatactactttttgtttaaaattttaatattacttctgtttggcaaattaaataaaatctttcgaatagttgacatagtataaattagagaatataaataagaaaaccaaagcggtcaacacaagaggatcggtttgttcctttcttcctcctcgtatacgaatcaatacgcatttctccaactccatagccaaaagctcgacgagatccaacagcacctcctgatctgcatcgttttcaacttagcttctcctgtcaatcgaaatccctaattatacattgatcggattcaatcgagcgattcgagagagaatcgcgatgtcaatccaaattccgtcagcttcttgggattttcgcggtttcctactctgtttcatcttcttcagctcgttaccaggtaaatatcacagaattctgaggatgagtgattttagtttcattttcgaattgggaaagtgttttgttgctcgtgcaataatagatgatcattgacgaggattcattgttttgatccctaacaggaacaatactaacacaagaagttacattagattcggttcagattttcacgactcacgattggttctcgactaagcctacagtctttttccaatgcaaaggagagaacaagacggtgttgcctgatgtgaagagaaccaatgtttcttactctttcaatggcgaagaatcttggcaggtttgtcttttgtttcccgaaatgtagctcagatgatttggttttgattatgttgttgaatttcaaagctctagcatgaatttagaaatttggtttggtttggttttgatctgaaaccaggaaaaaaagagctgcctttactctggttcttagcgattgacttatttttttgggaatgtgttagggatatggttttggttgctgaatctgctccagaatttagatcttagtttcgaaatggtagaggggttcttcatctgtgaaatctacttaacgtgcaaacaaataggttgtcttatgttgaaggtgatcatcaatttattatcactgtctttgacctctatgttctgttctgtttttgattttttttcagccactaaccgaacttcaaggaacaaaatgcaagagatgtggaatctatgaggacgaccctcttaaatatgatacatttgacgaatgggagctttgcccttctgatttcacagcagagggtagttacaagcgcttcaaagagaaagaatttaatgctacttttctctgccatggatgctcacaagttggagctggtgagttttaccaagcaacacatcttgagctttagggtcatttattactgttttgccatgaatactgtttcaactataaacggaatctctttcacatgtatctctgttggctgtagcttcagtttgaatctgttctctgtgattaggactatcatattcatatgcattctttttcttttggcaggttcgaataaagaatcaggcaccgagaaggaagaacaaaagggcggaatgcatcctggaattgtggtactgattgtagtactcttgttaggtgtagttgcggtgggactcttggtaggttacaagtattggagaaagaagaaacggcaacaagagcaggcccggtttctcaagctgttcgaagatggtgacgatattgaggacgaacttggccttgaaaataccctatgaagccaagtttaatgtgccacagtaattcaaagtttatgtacatacatacaaaacgtcttgatcctcctcacaagcatttttgtttttgtcggacatagagaggaaaggggtacaatgatacatacaagcagttgcttcatccaaagaaaagtcaatgttgttatttcttttgtcataactgtttaacaattaaagaggctaaaagaaacccagactgcgatagttaaatcctttttcctttacttaccaaattttttttttgccaaaaaagacattacgaggtgctttattctttactaaacgatccacaagcgagaatttcataaatgcatgattcttactaaacaatgaaaagtaacatcgcagagtttgaaagttgtcggaaaacaaaccaagagtcatcaagagagaaggcaaagtaacatccaggattgtcacgcaacgaaaagaaaagtatcacgcagaaagaaagggaaaggaaacaacatccttcagtacagaatgctacatagagcttttaacctgtgaaccatcaaggtgactcactgcctttaggggaaggacggctaagctcagcctcatcatcaatcgggctcctgtcttgaccattaagtccaacaggactttcaccacctccaacaatgggactcgcagagttcctgccattaccattctcttttgggctaccatcatagtctgatccacgctttgggcttgcatctatcacttttcggtctggactcaggctttggtccctacctttgggagatacagatcgctccattgccttaggactgcgtgatctgtcctccacgcttttctctcttctcactggggatcgcgatcgactgatgaacagagaaataaagagtcaaccaaagggcataagccatggaattagcgttgtcaacatacttaatagctacaaagtacgaatcatttctacaatattaagggaaaatagttgtctacgggacatgcttaaagatcaaactaatatagttccagaaaaagctcagaattgctctaagctttttaccccacatatgaagctcaaaatatgaatttctaggtaagttttttggtggctctcctattgtattccgtatttgcatttataagacaattttcgagaagtccaaattcacaactgacctgtagctgcgacctcgactgtaactacggctacggcttgggctccttcggcgacgaggggagcgggatttgactggtgacctggaatagcttccaccctgcctggagaattataatccaaaagagatatgagaagaagcttaaagaatagaacaaactgtggaaaaacaaagattcaaagatttagtacctggccttctttggactaggactgtttttgcagtttctctcaatgtgtcctctttcaccacagcggtaacatttattcttccagtctcctgctgtgcagtctcgggcccagtggccatcgacaccacaattaaaacagcgaccagaaccaggaggtgggcctctgctaccattgtcccgcgaaccacgaggagcctatcataaattcaaaagtttggcaagatatcagtaatttttcatccaaattatcaagccaatggagaatcggtaatacagacacaaataactaacccctcttgatgcctccacagtgatgcgacttccatcgaaatcccgtccatccaagtaatatcttgcgtcatcagcatcacgaggatcactaaattcctgttctcaaaatgtgagggacaatgatagatgcataacatatatataaagtttgtgcgcatgacaaacttgagaatcaaacgcttgaataaaggaaaagggtaatataagacttacaacaaaggcataatcacgcttcatatccacatctcgtactctgcgtaaattgttgccagaaaatcaaggccatcattacttaaggaacttccaaacaccagtttttgagatttgaggccatttccaataaaaacatgcaataaatcaacaaacaaaatcgccgatgcaccctctatacaccagacgagaatttccaccaattacaccacagtccacccattcatcaaacatctccaggttaggcaaacccccagaaaccttcaacaagatcattcaagttaaagaaaaaaaaatccactaaacctagctccacaattttcccacatgtaccaatgcaacgttataagtaaaaactaccctctttgattctaatgttaaactttaggtatatatcccctgcacaacatcaaagaggaatcattccagattcacaccaaagaacaattaacaaaaaatccaaacacttatctccccaagaatacaaaagtcaaattaggtcagtcaagacaaaggaatatgactctttaccttccgtatctgctaaagagacgctcaaggtctctggtacgagttctagatgataagcgaccaacatagaggcgagtgtttccatagcgatcatcatagcgaggcattgtcaagctgcaaaatatttttaacataagctattaggcacatatgtatatatatatatatatatgccaatcacaagaaaaagaataacagtatcctcttcaaattatataaacaagaaaaagaccagagagttaaaacactacctcagacctaaacatagaacccatgtgaatatctatgatttttcagcagaacacaaatccaaaaacaaagaaaccaaactgaataacacattcagaggcgaaaagaagaaaatttcgtgaggggagaatataaatctctaatcagattagacagaaggaaacctataaaggaaatctacggcgaggaaacgagaaaccaattgaaatccctaatctagagagcgaagaacaataaaatcgtaaccctaaacagatccaattacaaagattcttcctcgtacctggagagacgaagaaggagagtgcaaatacgcagtaaccctaataatttcgaaacgaaggaagtgaaccgcggatgatactgcgattagtcttcaacccctatcttataacttggaaaccgacgagattcaacggtagcgatttgtttcaatcaacggtttagatttcacggcgagataaacgtcgatattaccgatatagaaaatagaaaattgcacactttccaatttagtacttttattgggccttatatcaactctaaagcccattaaagatttagcaaacatatgcaatttcgtattaatcataagtattaagtacatcataatcattggtcaagttactctaataattttctgttttgtaaatcagcgacgcttgttcttgcttccgatcaagagtgtgaagtagaagagaaccctaaagaagaatccccaagctacagtgatccacaagcaattccatttgcttatctccgtgattccttgctgtttcagtatatcgattcccgtcgttacgcaagtctccgccgtcacgttgatccccaaaacgccgctcatgctcttcaggaggctgattttcacggcggttggaacttgtcccagcggcgaattgtcgaacatctggatccctctgacgaagcatttcgtcggatcttcgaattcgttctgtagaacaccttcgtaagggtatttcactagggagaggtaatggaaccagatccagtagagtgggattcgatctctagagatgaagaatccggagaagaggaggaaataagcgaggattgctacaaccaccgtgaatccgatcatcacgtgtgagactacgccggataagaacgtcacgaaggaacttccggcccaaaacgcggtgaggattgtgaagaagaagaagaggaatccctcggagcctccggcgagtcctacggccgagaatgttgaggcggcgaatgcggcggataagattatgagagcagggatggagattattgtgtgagcgaggacgtatgatgatcgccggtaagcgttgtaagctgtttctctcatgaatatgtaacgttcctgtagaaagactggtattgcttctgcacatgtgtagaatgttgtggacattgcgaatgcgaagaaccctaagcgttcttgtatacctcttggtgaattgtctagtttccagaatattgtggctaggatcattccggtgactagtacagctcctaggcggattccgaatagctctggttgtcttcttgagtttagtatagatcgtttaccaattacgagcatttcagtccagaatgggtttgcaaaggtttgaaatgatgatcttaggtttgttgctccggagacaagcttacctctcgagatacttgcgctgattgcatctttgagagatacattggtgtttcttctgctctggcttgaggtttgctttgctcgccattgcttgtggaactcgactaaggatttcgttccttctggcgaatcttccagctcacggataagatcgagtgcaaactccggcttgttctcgttttcaggaattgggtgaccgaattctgagaagaactgagggaggtgtgtcggggagccgctgtaaacggtgtttcccctagataggaagattaacttatcgagtaatcccaagattctgtaactcggctgatggatggacatgataactatgctgccgctttgtgcgattctctgaagcactttgacaaccatgtatgcactggtagagtcaagaccagaagttggctcatcgagaaagagaataatcgggtcatggattatatcggttccaattgagacccttctcctttctcctccagacacacctctgtgtccctcatcaccgatcacggtttttgctgcgttcctcaggccgagctgatcaatcagagcttgaacccgtgccttctttttcttcttagaaagcgagcttggaagcctgaactcagcagaaaacatcaacgtctcttccacggtgagcatcgggaagagaagatcatcttgcatcacataagctgatatgactttatgcaggctagattcaagaacttccccatttaaagtaatatcaccgcgtaggctctcttttgaaatccgattggctaatgcatcgataagcgttgatttccctgacccgctcgctccaagaacagccatcatctctccttcccgggcttcaccagaaataccattcaggagcaccttagtattcatctccatatcattaccatcaaaaggtgaattcccacaacaaggaaagggcttaaacttcttcttgatcttcacgctgtaagtcaagtctttgaaggaaagaacaaacggagaagaagaaggcacacgagaagacggaaccgaggaccagaaattggacgcaaccgcaatatccatagcccgactctggtcatccccctcatcttccacactcatgagaagttctgcaagtgtgacagacacccgcgcagtgtctctgtgacatctctgaagctccactgacttgtggatattgtaaaacagagggaggccatcgccattgacccgtttggccggagataatataccgaacaaaccagacatcacgtgaattattgtctggttaatgttttggcctcaggtaatgtgtctaaaggtcttacccacagaacaattttgatcgactttataggatatttggatgggagaatgagggagaaacttgtcaattagtttggtgatctctaagtatctaactttgagttgttctgggttttgtagcttttcatatttacatgtacatagcttttgtttatattttcgtatgtatataaattgtaagttacgagtaggtgaggagttgggcaaatccatccacatttttccgttattgtatgtattttttcttggggcttaaggtactctgtaaaaaaatcctattttaggtggtttttgtttacaaagtggaaaagtttactccatggaattacgtgtttatttcatctgtatataatgtatccggagtttatggaattgcaataagtatagcttatgtaacatgtcaggaatagaatttctccttgcacatgtatgtatgtcacgaatttcttaatctccttttgtttattatagtcacgacccgcgagttttctataatcacttacaagctctaagacttgttttttggtgcgtgagacaataattgactaggggttaattggatttccaactattttgaatcagtgaatatcttcgtacagtaactaaagcacgctacgaatatactgtttgttgtatcaaaatcaaatcatccaacattttgaacatttatttagcggttactaattaacttttgcaattagttaatatcaaacacataagatattctcataattaggatttggcatggtactatactaagattgtacaaaggcatgccattatgcataatgaagctaatggcgtgttatctttcaattgtttgtttaatcatgcacaccattttcgtcatataaaaaagcgtaagtgaagcctatttcatttcaaaaaaaaaaaaaaaaaattataaggatcattgatttgtacttttgtagttggtgaaacaaaaaggaaatgaatgtgaaaattatggcagaaaaacgtgcagatgttcggctttgatgttgtagagctacacacgaaaacacaacaaaaattgtcattaggaatatgtaatggaaactttatataacgtgatgagttagatttaggcatatggaagtttggtgtagctgttatatctgttttcttgattattttacttttgataacccatttttacaagagttgtcaagaaataatagaaaactatatacttagtatcatcagcttgtctctatcaagttgaactaatgatttatccaatgaaatacataacatttcttatggaatgtacactttcacacagagaatgagtttatattattctggttaagtttagtaagactttctttatgtaaagattgttttgaaattttgtgtttggtagaggatattttgctaagtttcccaacataattttgttaacactttgagatttatcaggtaggactagatcaaggaattgaatccctcaggtttgagatttcgttcaatgctaatatttgttaaatcgtacgagaaatttttactctcgtctgttgagtaacagcatgagagagttttcattcaaaaaaaaaaaaaatagcataagagcatatctctaggcataacattttgtgggctattaaggggccaaacttgggcatccaattgttaaaagcccatattttgtaagcctcgaggagttttttttgtttgtttccacatttgcctaaagttttgtatatgttcattgaataatatacaaatcaaacgcaaatcacattaatgatcccctcaagaatatatatataaaaaattgcatatattattaaacaattagtgaaattacttaattagattatctgataatcacatatagattttagaagcgaaacatatatatttgctctataactaaaacaaaataaaaataaaaaagagagcgaaggattgcatcaagtaatcgccgtgtaactaactacttttgcattcaccatcgctcttacgtttgaatctatccagatccaaagctcttcttcttcccggcaattctgagatctcattttcaccggcgacgagctttaatcggagaacgatgaagcagcttcacaagcaaatgagctcgaagcgtgatgaagaaaccattcccatgagccaatccagtccttactctcccaaaactttaaagcatcccagatctcttcccagatcgcttcactatctctttcgtgaacaacgactcctctttatcctcgtcgggatcttgatcggatccactttcttcatcctccagccttctctctctcgtttaggcgccgctgagtccacctcgttaatcaccagatctgtttcctacgccgtcaccgattccccgccttccaggtcgacttttaattccggaggcggcggaggtagaaccggtcgtgttcccgtcggtatcggacggaagagactgaggattgttgtcaccggtggagctggtttcgtcggtagtcatcttgttgataagcttatcggtaggggagatgaagtgatcgtgattgataacttcttcactggtaggaaggagaatttggttcatctattctcgaatcctaggtttgagctaattcgacacgatgttgttgagccaatcctccttgaggtcgatcagatttaccatttagcttgtccagcttcacctgttcattacaagtataatccagtcaagactatcatatccttttgattacgggtcgtgatttgcaagttctgattctaaatccgttatacaaatttaggcaacattaggttggtgatcattgttattagcatcctgttgataggcatttgacaattgacgtgcagcttagtagaatctcttacaattattgtgatatttcgtgatgaaatgtttccattgggaatgtgtttttctctattgttgatatgatgattctggttgatccttaaccatagttttacaagacaaatgtaatgggcactctcaatatgttgggtcttgcaaagagagttggggcaaggtttctgctcaccagcacaagtgaagtctatggagatccccttgagcatccacagaaagagacttactggggaaacgtgaatccaatcggtgagttggagaattctgtatctgctcctgattttgtgagatatataaacgagaggttgtatcactaattgctgttatctttttataggtgagaggagttgctatgatgaaggaaagcgtactgcagaaaccctggccatggattatcaccgaggtgcaggtgtggaggtaaatattctaatatctactcatggattgtatattgcaagctcttagctcactttatggagaacttgtacaatctggaactcataccctcattcacacatggaactttgtacccattagtttcaaaatcatctctctgctgtttatcaagatgtttacatttgatgatgtttcttcttctttctgtttccaatgttttggaatgtttagaactgatgactatttatgtccaaatcacggatataacttataagagtgatctctaactgcattttcaattttcaggttagaattgctcgtattttcaacacatatgggcccagaatgtgccttgatgatgggcgtgttgttagtaactttgttgcccaggtttagctccttcatcaacataaagacaaccgctttcgtataaagccttttgaaaacactctgacagaactattgtggcttatatctatgcagaccattcgcaaacacccaatgactgtttatggtgatggaaaacagactcgtagctttcaatatgtttctgacttggtacgtaacaacctcattttcagtacaatctgctctatgattgatttcttgaagcagtgaaaaatgatttattgccttgatatataacaaaatttctctttctaggtggagggacttgtagctttaatggaaaacgatcatgtaggacccttcaaccttggtaaccctggagaattcacaatgcttgaacttgcagaggtttgctttacttttaccatcttcgttttacttcctgcaaaagagatatgaaacccaaatggtaaagttaaggcctggtcattcagttctcggtttggtttagcttttgtgaagagtctgtccaaacttcgaattgtttttatcttttcatctaaagaaagtttgggtcggttttagtttgaagaaattcagtttgatatggttgttatatacatccttagaaatctgcatcaacgtttaagatgtctcataaagaaacgccaattccgtgtatgaaatgggaactttgtgtgcaggtggttaaggaggtgatcgacccaagcgcgaccatagagttcaaaccaaacacagcagacgatcctcacaagaggaaaccagacataagcaaagcaaaggaacagttgaactgggaaccaaagatatctctgagggagggactgcctcgcatggttagtgacttccgtaaccgaatcttaaacgaagacgaaggtaaaggtctctaagtcagtcacacagagatatagagtataatccttcttctgctttgatttgatatatgtatagtctctttttcaagagctctgctaagtctttttgttctctctgttttttctttttggttctatctccaagacacagattactacttatattagctaatgtttttgacttgggattttgtcattgggccattcaccactaggctcaatattagtggaaaggtattgatataaaatttcgctcggttcatacaaaaggttaccctttgtactcttcacatttacatatttttttggttttaatgttaacacattatatttgtttaaaactttaaatatgcattagtatactccctcggtttatacacaaaatagctttttgaataattttgaaacgacatccgatggaccattcttgtgtttaatatgtctaggttgtttgttttcgtttgtatttatcagtataattgattcaatgtttccaaaataggttagtatcttaaacgaaaagaaagctctctatgtttgttgtttgcatttacaatttacaaaaactttcaaaaataaaaatttgcattgaatactttttgaataaatcgaggcatttatgcaaatggcagctgaaaaattagttgtgggatctctgtttcggtgtttccgcttcgggttccgttggatagagcaattcagtctgttagaacttgagatataaggaatcattcactttataataaatttctatattcattccatttcttctacctacagtttaaaacaaaaacgtgtaattaaagtcttttcctttacccattttccattaattcgactttctgaaacagaaactgatcggtcgaattcaatacacaacatttgaatatatccaagagaataatgtaatgtagtacataaatatcccaatagtgacatctcaacttctaatacgttttatgtggacaatacaagagcgtttctactcaactctctgttactctctgaccttacacacactaacacactcatgtgacacactgacgcatatttatcaatttacacgtatatatattggtatatatgtaacgtaaatatatatgtgacttgctttttgtttgtatatattaataagctcttgttttgccaaaaatacatgaaagccggtatgttttattgtgcatcgcaagcatcgaccgctacggctaacggcgaacgtaccgtcaccgctcgagccatcgaccgtcataacccgattatcaaagatggtcgtagatctttcacggcaccgtgttcctccggagacgactacgttgctccctaccgtcagctttcgaaaattacgagagtaccctcctcctccggcgatggaaagagtgttcaggtagataaaggacggagaagcaattcagggtcgttgatgaagctgattagctatgacgtcagcttagcgaggaagagttttggctgtgttgttgcaacacccaaaactcctcctggttcaactaggtatcttctgggatccgaccctgtttctttagccgggtctacgggtcaggatacggttgcaacggaggaaagtgaagcttctgcgccaaaaagaggctcttctggtcccgtagaagagaagaagaagtcttctggttcaggttcagaccaggcaagtaaagtaaagttgtcgttttacttttactgtgtacggatggcatgaatgttaataaagagagcttggagggtgatttgtgttgtattttttggactgcaggtagttgttcttagagtgtctctccactgtcactgcagaggctgtcaaggcaaagtgaagaaacatctatccaaaatgcaaggtgaatcctctgttctcactgttcttaccctctattgttacagtatttacttttcttttacttgcttttcttatcaaaaacagcaatacatattttacttaggttagtataagagatcaaattatctaactatgagcaagttttagtgcaaacacattttttggttttaagttgggtacgggacctatagccttaatgggtaataatgcattgtcactatacgtgcaagtgtgtaaccgatctgatcatgtttctacaattatctctttcatattcaaaaaaggtgaaaaatgatatttctgatataatacttttgttaaagtttctataaaatatcaaaaatataatattatttacaatatcttgaagatattatatatgataatttaaggtaaagtaaaaaagatattttgggtttggtgatacccaaatgacttgggccaaatccatagattttatctatgaaatagtttgtaaatggatttagttaaagttcatgctaatggttttttttttttttttttggcaataagtaggtgtgacatccttcaacatagattttgcatcaaagaaggtaactgtgactggagacatcactcctttggaagtattgggttgcctctcaaaggtcaaaaatgcccaattctggacaccacctccaccatcaatcccaagggcaaatccggaaacctaaaagaaccactcacttttgtgtatttgtgttgtcttcctagctcttatttgcttgaatcagatcaatcgtaaaatgtggactttcctacttttatgattaaactgtcattacagggacacatgcttctttatgataaaattgtcattacatactgcattatcctggtgttttttttttgtttccttcccttaaactatgtaacaaagagattatttaactttctagaagattgcacctaccacaagctctgttatgagttcatctgtcagcattacctcaatctctctacctatgatttcaatgtcatcttctaaactcagccactgcaactccttctcctccacatcatatttgcttggtttctcgtcttttcttgtgaccaaatctcgcagagtctcttgtatcttgtttgcatcccatttcgggcatacctttgtggatttaacccaagggtgtggatccgacaactgctttaacatatgtagtacttctctgctgatctggtcaaaaagaagctttctttctaaccgggttgaggttttcacgctggagtacttcttctcgagatcctcaaacaaggatggctctacaggtgttgttgccatgacaatgttgtggtctgagtcactgaaactggagttggctaggagatcaactaagtatgatgacttccagtcttcttctctgagctccttggtaatcatagcctcatcagttattgtggatgactcctcttgatcagtgtcttcatcactcgaaacgagcatgccaccttctttgtaagtagctgactctagtttgaggagctgaagttgcattctgagtcctggaacgtagagataacagttaacacctcaaaacatttatagttaccccgtggatctacccgaatcaatttttgtgatacaaaaatattttaatgcatgaaagaattactgaactagcaagcactgattgactacctcggagatccgcgctaacactctcaaagcattccgaacctgatgatacatcatcgtcgaacgaagcttctagaactgaaaccggacttggttgatctccttcctttgagctttcacgaggctgtggtggatcaggaaccgaagaatgattcacatcctcagttgtcctccttgagatatcctagaacatcagtaaacaataagatatatgtgattataacaacctgtatattcaaaactcatgctcacttacagggtcagttaccgaggtgacagttgacaaatctagagcctcagaagacattgctgtcttgatatcatcagaagctgaactatcttcagtgtctgaatttgcatctcctgagaaactgctacgtgctttaaaaggagatgctgacttgcttggaatcccgtcgttcatataaacaaacttgcttaaacttggggtgatgctgacctctggcgaactattgtatgatgaatgagatttgttactgccaggtctagatttgcttgacaagaaagactctccgtgatgagaagaatccccctgcactaatgcatctcgattgatcaaccccttaggcaacactatggtgtaaccaccagcgctctcctggttcatgatggttctggattttgaaaaacttcttgagcaggatcctttccaaccatccctactgctgattccaactggttctggcagttcaggccactgaatgttgttctcaaatcttttactaatcccatcttcgaaactgagtccgttaaaacttgctggccttgcctccctatctgaagtggcaagcatttcagctaatgtcccacttctactaatttctatctcgtgctcaaacttgtgtgtcagcttccatctctctgacagtctcctcttagcttccctactcacagatgatgttgttgacttggaaggcaaagatcgatggtagttcctacggttgaaggcggttcttgttcctgaagttactggcactagctctgattcacttgcggagtcactccctgatgagctttcatcccctgcatatcctctaaatcctgaagtctcaaaactcatggcacgaccattgccacagctcaccttcctttgcctagacattattttggccatttctccacaatctcttgaattctgtcttgacaggcggacatcttcattacttttctgcctgccatgagtggtggtgcatggaagcctacgatctgctctgaactcatcggaagaagagcttggcgatgcaaaagttctagcagcataacgtggctccccgaggttaggtttcagaacaacaatcttggttggctgcaactcactcctctttctcagctcctcatttggtaagtcaatcgtgtcataagaagcatgcctagtatgagaacggctaggacaaccactaccaccaccaccattccgatgaggcgaccgatgactcttcctcaacaagtccctatcaactttctgagttttcagactatccacatgcctctgactgtttggcgacttcaaggatggtgcttgactgtactgtggcttgtgaggtgtgctttgaagatcatgcagatgttttgtaaataatgaatctgggtgctgaagaaacttcagtaagaggtctttgttagagtctagagcctcaagagcatcattaaactctttagaatgacgaagtttatcatccgttgatagccgcttagcctccatgaacttctgccgtatgaatgccatctccgcctgtgttagattagcattcaccctcccctgatgatataagtttctgttactctctgccatctttgcatccaaaacttcgaaaacatctttaaacttctgctcaccctttgagcgctttccaagagatttataagaagtgcctccaccactcctgccttgctgattctccatagacttttgttgcttatgagaagaactctgagaaggcaaaacatcgagacccatcaatctcgctataatgcttggcgatctctttttagattctttctgctttgacatttcttgtgctaacaaacttttcatcggtactccagtaggaaaatcttgctgcaacagcaatatgagcaacaagtcactttcaaacaacaacaacaggaaccaaacatttccagtcagatatcttaaaagagtaaataatacataccttgttttcactcaaagcttcacaatgacaagagttaaattcaggagaagaagaccttggagatttgagtttctgactcttctgtttctttcctgaaaaaatgaatgactttttaggattctcaattgataataaagcaatcaactttacgacaacggaagaaactttaataaaaaaaatggaaacttgggagacaaaaagagtaaattgtagcacaataagtggaggaagaagaagataaaaaacacaataaagcattgaggttaagcaaaaacactcattacatgtaaatctaaatcattaaatctgttgaaaaaaaagaaatttttaacaaacaaccaaatcatgacagtactactaccccaacaaacactgccctgataattttttctaaaaaagcttttctttactttattattataagaaaagaaaaaaaaaagagagtagcaatctgtaatcttcttcttctctctacccactgctttaaaactatagttttttttccacaagaaacaaataaacatttctttgttttgtagctcaagattttataaaaatacatttctctatagtttaagaagtaaccaattgtggtattgatgacctccctcactacgagagactctcgaacaacccgaacaaggaaacaaaaagacatcagtaattgcttttgttttggtttgctcagaaaatctcagaaccttttaactaaaatatttataaaattgattgaccaacaaaaaatacacaatttgctctaaattgacaaattcgagttctatgttagaacaaacgaaaacgcatcaaatcggcggtttctcttcaaccaatcagaaacggttgtgtaagaaaaaagcgtgagagagaaaagctgtgaccttggtgagaagtgggcagtgttgaagctaatcgatctcgagaactgaggtcgctgagtcgaaatctgttcatctttcactcactgttcatctccggtgaaaacatttcattcggaggaaaaagcacggagaggtgaatctaggtctggaaattcactgggtaagagaaaatcagaggaagatttagagaaatctaactcgtgagaagaaatgcagacgattctctgggattacggggagatctaagagaagagaaggaacccaagaagaaattaaacgattagagaagaaattgagtgaaagagagagagagagaagagcgaaccagacgagacgacggagaaaagaggaaatgggaaatggcttctgagtttatttgaaagttcaaatttttttaatctttttttttttttttgaagtttagtaaaggggggcgtgtttggtactattttaaaaacttactgagttctgtgtatccgtgaattgctgccacttgtctctccccttccattttccttcttcttcttttgtcgtaccgtcggatttcttttctaaaaaataaagaaatagtactacagtatacaatcaataaccaacaaattggtaccgtaaaaacaaacttcaacaaagttggaattatttatcaagatttataaccaagtttagaataaataaccaagttttctgtattatgttcttcttctatctatatagcaaacgatattttctttcgggacaatttttaggttcaatctaggagtgaacatttgtattcaccttttttagtttaaattaattattatgtcatgttatacaacacttaaatagaaactaaatattaaaaacaaaaaacaaaataaattaagaacacattaacaaaaaaattaataaccttaagtttttcttttaattagccaattaaattttactatctaatctaactaaaataattaatattatctaaataaataaaaataattcattgaaacctcttaaattgaattaattataaaatctaacactaaccattcttttataaatacaaaccgacatataatcttaacttaatagaattatggcttaagttttctattcctgttttttgtttcctctaaaaagtgagttaaaataaaattttaaaaatattttacccttatctcagatttaagaatgtttctaagtcatctatattttatattaacctctgactgaagtctcttgtctacaagtctcttcctagagaagattaggttaagcaagacttgaaatctattcaactatatggtcctttatcctcttaaatctatgctaattactcgaaaaaacagaaaaacaaaaatttatgctcataaaaaattcgaaatgtatactaacagtgacaaatagtagaacctttcaagtccctaataaagggttagttcgtgagctcaccaaatatgactataagtagaaaatgacagaaattcttacagccttcgctttcaagataattaatctgacacattgctcaaaaaaaacaggtttaatgacgactatgaaacatttttccaaacacaaaccgctaacttacttgaagttacttcgtattaaatttacggttagattataattttaatgcataatgttttgctaattaatcacatactatatgcacgcattaattgcatttactaactatcatgaattgactatatagtctctttatttatctcctagagaagaacataagataaagatcatatatgcacaaatgtgtgtagagtgtagtttcaaaatttattcgccgcaagacaaacaaaaaaaaaaaatcaaaaggaaaaaaaaaatcgaatagaaaagaacaaaatataaaagcaaataaatctttaactttcaatttttcatgtcttccttgatttatggaggttttttagacgttgatgcatccatagatgatagatcacctagacgcctacacacatatcattacttttatgattgttgttctttttacaatcagtgaaacaaaactgaatatgatggttcgaaataaattcaatttcttggtttttttttgtaatagctagaccaccgaggtcacaaaacctaaacgtttttccaacttttgtattataaagtaccactggactaaatttggaacgtttccaaaactacatctacaggaaaggattatatattgaagaattggtattatttcggtttattaaacgaaagaaaaagtattattcggacatgcgtgtatagcacaaatactattttcttcgattagcagctttagctaacatttgattattatatgaatgaacaatttgtaaaaccgaaaaacgttgttgacaaaaaccaatgtttagagttaagtacagctgcatggacaagctaagattcgtcttcgtgactactcgtaagtcaataaagtaccaattaataaccatattaaagctaaataaataaacatgcaagttgtagtatttaattgggaaaagttatcaggcgtagaaaaaatacgaaaaaaacagtaacaaaagacaaataaaaaaaaggtaaagcagattccttgacctatgtagtcgatgctcatgaaacggttatgcgtttgattcattatggcctatgtagatgtaagaaaatagatctataaccctaaaactcttaccgtaattgttttaagaaaaataataaaaagagaaacaatgagattgacctaaaattccatagtatttacgtaaatatttataccaccgtaaattaatttaatatatgtatataaagaatattattattttttgttttgtccatgttcacagattttgtctttggcttgttgtcttgttgatatgtcaaacgtctccttctccatgaaataactggtcgaacataatctactatttacaaacactcacaatcttgttagattttgttgtgtgtatcttatgcaaaaatcttcacacaggacttcaaggcatgaggctaaattagcaatatatgtgaaattgtgatatatcaattcacaaaaatgatcttttatttatattggacactacttaagtgttgttactcgtatatgaacaaatttaaaatcttattgatcatatactctagctcttttaagtgtggttagtatatgacaaaaaaaacttattcataacatccaaatatcagtggttaaaatcatagagagatatatgaaagttctacccaaaagtagtaaaaatattatatctgaaaaaaaatttgtaagcaaaaaataatttcctgaactgtggttaaaaaaaaattagatagaatttataaaatttatattttatcaatatgctataagtttcagtcatttgctgtagtatcatattctatataattacataatatagtatatctatctaccgtaaagagtcgtaatataatttgtaagatgttataataaaatattgagtaactgacaaaaaataatcaaatgcgatttatttcatcttgttatgataatagttcaaggattaggatgcatgcatcccataatctaatattaaaagagtatgtcggtttagtgaaaattaagctattaatttagttttgacagtggaacggaaccaaacctttgtgaaaaagttgaagaaaaaagtggagaagaagaagacgacaatgtggttaattacttgttcaatttgaacactaatttaacacccaacctaatctctaatcttagtttctaacaattcaattatattcacttttacttaaaatattttatcttgctattcgtttacttaactggaaagcactttttaaatggctttttaaaaaaaacgaaagtctctcttttcgtttgttaaaaccttcccttttacaatttttgttgtcacaaactttttgtcacgtaattgtacgtttatcgcttgttgttggtagcaattttcacttggaaatcttaatctttttgtccataattatatatagcataattaaaatcatcgaagaaatgtcgtagttcttaccatttatattctgctgtttaattatgtttgttaatcattccatgataattcatcaataatcagggcctttaattgtaactaacaaattagtctgttgaacaataaggaatcaacgaggagaggactcggagtctacgacacaacgaagagtaggtcaagtacacatttataagctatgatcaaaatttacgcattttgtttgccttctaggtgacaacgactctattgaccttaacatacaaaattgcaaacttcttttttcccctgtcaacacttgaaacgtttaaatatgttccaattgcgacataactatttaatatttaacctatgattagctgccaacaacgtcttactttactcataagcattgataattagacatcttagaccaacattcactaaatctaaacttataattattattatctttgacagatacagtaccatgtaataaaattttgaaagtaaacaatcatctatactattttccattttaggtaccccagtttatcaacaagattttttttaatatctgaatatctgctctgataaatttgtatggtttagttttggtttgaccactcttatgtcaatctaactgaaaaaacttcaaaataaatgagataccaaaacctaaatctaatttttctcatattgatttcatacatcttctcggaacttgagaagcacacatgcagtacaataatgcgaagattgagtgttaggtgcgttgattgataaaagttgtagatatgagaccaggtgacagagatatatagattctactttcatctgtccgacacgtaagcaaagctaagctagtttcaagaaacactgaatcaaaaccaaataatgtgttagattaaatcgagagagagagagagagataaggatattgcaatcagcttccaaagctactgcggttgggggaccatgaagacaaccataccgcaaggaatctactatctgtttggtttttccttaaccggacattatagtcttatggtttagagaaccggaatgaaccagtcatttccctatcgatttgatggaacgtggggaccaaaccttaccaaatgtcaaaatcaagcaagaaaatgggtaatcgaaacacagcatttataaacttcacctacagaagaagaagaagaagatcatcgtttgtgattgtcaaaattgtggtccagttaaaaacggcatgacaacttcatggaagaaggagatctctatcaaacttatgactcctcacaacttggctaatggacgtccatttccggattatccacaactgatagatgcacactcaacattaaaacatgtgtatgtgctttgtgcattgagttacttgaataagcagatattataattgattttaactagtgattagtcttcactccccaattacctgcaaaacctgatgcatttattgcaacatgcgcatgaaattaaatgcatatgcaagttgattgcatcacaagacaaaatctcgaaaattcgttgtaattattctaattattctctgttttgcttttcaacattgcttcctcaattctactctattgcgcttccatatccaaacctgaatcggataaggttaagatgatcgatcacttatatcgccgcttctagaagctttcgagatttgatcctaagaaaaactggccttatgagtttggacatatctttgaatttatttaataataaaaaaatgagagatcaagaattaataaagataatcttcttacttcaagatttgcgtgtatatcaacttgtcataatatatcctaaattgagaccttgaatcgttgttggtgtagtttgcagaatcgttgttggcgatccagtttcaagaagcaaatattttgcaacatcttttgtttaagtttttggcgatatatacaacaatgtaagtctgattttaattctttatttttgccctttctcaattaaaaaaagtttttattttatataaaaattaagatacataattctaaattaaggaccctaaacctttgttggtgtagtttggagaatcattgttggtgatgcagtttcatggagcaaatatgttgcgacatcttttgttaaattttagcacaattcacattttttctgcgttagggatactgtttgaccaaacagcccgacattttgagaagaaaaaacccaaaagctatcggagtatcgggacaagatcagtgagttgtccgacgatttgctcgtgcagatattgttgctagtcccaacaaaagatgcagtggctaccatgattttatcaaaaagatggcggtatgtttggacaaaggtgccaaaacttacataccctgcagagagcaatgttactctagttattgggggtatacttggtcgtttgcttgaccgtttatttgggaaacgtgataagcaagaaaggtttattgacaagtcattacaagtccacaaagcacctatattagaattattacatatagaacttgatccacgatgtgatgttgatgtgggaaagtgaattgcaaatgcggttgatcatcgtaaggtgcgagagctatgtttcatgctcacgtgggctggagagccgaccagcttacctaagagtctttacacatgtgaaactctagtctctctatgtctttccggcaagattctcattgatgttccttctttggcttgtcttccatccctcaaaggtcttagactttcctttgtggtatataaagataaagattctgttgttagacttttatcgagttgtccaattctcaaatctttggtcgtggatcgacaacatcaagacaacgtgaatttttttaatataaaagttccatctttggaatacttatcatataattatgtgaaattgggagcagaaaacgaaggtattgtggggactttggttatagattcaccgattttaaagaaaatctgcattacagattattcgggagactcttactcgtttgggaataagcctcgccttgataaggcaaagatcaaccttttctattaccctgataacaagtttatgagatctctttcctcaatcatgtgtctcgaactaattttgagcgttgcaacggtctgttgttctcttttcaatttcctttttttatatattggtatgatcacatttctaatgtgttaaattacttatgtattgttgtggtcattgcagcttgcgtggttgaacgctaataacttctctcggcttatagagtgtaagctgattattctaaacgagttagactggttggaatcactaatggtgttgcttcaaaattctcctaatctaagttcttttcatcgaccaggtttgttgttaccttcatttttcattgatgcagttttgatagattgatacaagcattagtaaatgtacgtttatcatatcacttgttgttgctttgcagtcgttcaaacaacttgaaaaggagttgccactttcatggaaccaaccgagttctgttcccgaatgtttgtccaaccatctcaagatattcgagtggaaaggatataggggaagaaaggaggagaaagaaatcgtgcgatacatccttgccaactctaagtgtttaaggagaattggagtctccttgaaatcaaccaacaaccataagacgatcaaagagttagaatctatgtctagggtttcgacatcatcccatcttctattctccactcaatttgaatatatgagcgttgacaatgaaataaggagtgactaatcttttactatcatatatatggatcctgcattatatgcatgccattagtcaagatattgtttttattaacttttttttttggtatcaagtttttttatgaacttttttttttttttttttgaaagaatgtaaaatttttattccatcaaaaagcttttgtacaatgaatgcaactgtttgtttagaatatagcagaggaaactgaaattacaaaactgagacaaaaattcagagtagttgtggggaagaatgaggctgcctcatggaaaaccatagctgcatacagtcgttgtagttatgatctcccgtgtctttttttatgaactttataatgtattagaattacaatgttcaaaattgttgttccatatattgctgcatgattcaagttttattcaatcaaactcaaagatccccaacgtaaaacatcatgagctaatataagaagcctacaagagaaagagaaactaaagttataagaaaaaatattcgtcttgtaagttcttttcttcagactcctcttggaggaagagatgtctatcaaactaatgactcaattatgaatagtgatagtgaatgtgctttgtttatttggcaacttgaataagcagagtcagagagattagagattgagcacaactagtgaatctctatatcatagacgtttaagacaatcaataaggtaaaaaaaaagaagaaacccttttggaaatttttgtcttgtcgatttgttttgtcatgtacagaaggaaagtgaaatagaaacaaacagaggaagactttaacacacactaagggttggtgaaacacattgacagaatgctgcctgtaatgggttccacgagaccaatgcttactgagtttatagaagccaaatatttaagtgaatttgttgaaagaggccccttaacttccgcttttttccatatttaaaacctttaagaatgctgttcttacatttaaacccatcaactttagtccgcctgctacacaacacctgataaacggaaaatgatgccttttgggttgatgatatttcttctgatttcttctttttagattgatgatatgcatgcaagtttatacagaggaaatgaccatatcgctttatttccaaaacgatattacactccatgtctccatgtcaaacctcagagactagaatatcaaactcaacatgaaatgctttactttttcagtattttaggtaagaaaatcaaagaaccaacaaagagtttgatatagctttcctctacaatctttagttcaccaaacagatgatatgaaatatcggtttctcataagagatggcaagaatatcaaaaagaattatggccagaacatcatccaactcaacaagcaagtaatgtattaagttgcctgaatgatatagctaaagtatgagacctcactgttcttttggatctaaagagcaagatgtacataagcatctagaccatgtgcacagggattctgattcaaatccattattaaattaaaccaagtattcgacttatgaactttatgtaaaccaactaaagatacatcttgagacgatcaagaaaaacctgcaacagaaaatcctcaaaaccacattttccaagtcttctaagcatgatttttcacctcattacacatattctcatcaactagttgatccagccatctcctcagccatctcacgctgcgccttctcggaaaaaagctttgttgctatcatattatccataaaatactctctataaggatgattctttggaacaagtttccgaaagttatcaaactgttcttctgccttgtctttcttcttcagcaatgtgtatataattccctgacaaagatacggcctaaaatctcttggttcctcctttacaagctcttgataaagcttcaatgcttcactatgttttccttcaatgacccgaatctgcgccacgagtagcttaaaatcccgaaaatcgttttgattattctcctttttgcacttcaacattgcttcctcaattctactctccacctctttcaaatcaagacctgcatctgaataagccataagcaagccgtgataagcttcaacacgaagcggatctttagccagaatctcttcaaatccagttttagccaagtctagatctccactgtaggtaaagatgttagctttcaaaactggccattctttttcttcaggttccaattttatcaaacgatcgatcacttctactgcttctgtaagctttcgagatttgatctttacctccatcaatgaacgaagagcgtcgacatcagaagggtgagtaatcaaatgctcatcaagcgctctctcttcttcttccaaggtaacgttttctttgctttcaactgacggcggaggcgcgatgggagctgcaatcgccggcgatttgagatggagattcgccaaaagcagagccgcggcggttgttagagtgatgcatgtggatttgaagagacggaaaggtgtggactttgggagaggggtgatagagttttgaaatttggaggacgaagctttaattgaagcggatttgagagatgaaattggttgaattgaggatttgaagaggtttttggggaatgttgaagaagaggtgtgagtgaaggaaaggtgaaatggctggtgatgtagctgtagcttccccagagactccatgattgcggaatgagatagataaaccctagaaaagtaaaaaccctgagctagtagtaaagagataggtgaagaagaagaagatgaagcctttcgattccgaatattctctcctcgctgcagatacgacgacagcgttttggtcattgatgggcctcacctcacgctgcgttttgacctatccaaaaaacccaataaatggtttaacatttcactttgtggtgtaaagtaacttttaataactcttacaatagccatggagggagcaacagtggttgtggtcggaaagtgaacacaaaaaaccaaaacaacagataagaaaaaattaggcacaaacctttctctctttctttcatttctatacatgataatcatatatataataaaatgctacaaaaacacaggaaactgaaggatacacagaaactgcagatgtatccaaacattatctgctgtttcttttttcttttcttttttagttcttttggttgtataaaaatggatgagggtttgggttgaagggtggtatactctgttcccggcttcttgtgaagaagggatggttcagtgcttctcttgccttgaacctctctgttggatcatatcgaagcagaccttgtaataggtctatcagatcaccggctgagtgatccacatgctgcattatcaggttctgcaaaatgcaaaaaaactggtctccttaatttcaatatttcagataagcggatgtcaagtccaatgtaaggttatttaccggtagccggggaagtttccatactgcttttaagctgtctcttgatgtcgcaccttcaggccagtctaacttcgcacctcgtctgaagtatttctcagagcgccggctgcaagaaccgttttggttttgatataagaaatgacagttcaagttattttctgctggtatctgatgctgcaaataggatgatattattgttcttactcggctctgagcaccatatgaggtggtaaaggtcctaggaccctttccatcatggccaaatgttccaagttttcatgcgtttggaaaagcgcctctccctgcaaggtttaatccagagaaaacgttgatggagacatggtgagatgaatagggtggtgtaccggaagatatgcaaacataaagttactcaccgaacaaagttcaacaagtatgcaaccaatactccacagatcacatggatagttccatccaacccctgcaataaacgttccaaactcttaaataccatgactacacaaaaaaataatcatctacgtagatgtgtcagagtcataaacgtttacctaggataacttctggtgcgcggtaatgtcttgtggatacaatgtagttatggtcttgatgttcaaatgttgtacttccgaaatcaatgagcttgatggcacttgacttgggcagattcttgaagtatgacccatcttttgtgggtcgggatagaaactagattttcatgaccacacataggaaaagggtcaagagttatacaagttccttcatggatggatatcatattagccatgaaaataaatgagtccagcttggagatgattgattgctcaccttataatcaggtattttgatatattcagacgataccaaaagaatgttctccggcttcaaatccgtgtggatcagccgtaaatcatgcatatctgtcagaatggaatgagcaaagtctgagtacactagtcaacaaaagtctccagaaataactgtctgagcaatatggattccatggaaattgcattatcgaaagaacattaagtaataactattaacgcctaagtcttgtatcaaaaagttaagaaaaatgatttgtggcactaatggactactatatagaagaatgggtcaagaatattccacacacatgcaacagactccaaaagttgtctgccaagctcccgaacaagatcaatgggaaatgaacggtagctgtttttgcggagaaaatcatataagcttggtccaagcttctcaaatacctgttgaaaccatttaaacccatgcgcaagttcttttaactcacataacatttgggcgtgaagaaattgcattttcccctcaaacttgtcaaataaaggtaacagcacttacaatacaaatatgattacgatagtcaaaccaattccgtatttgcacacaactgcaaggaattgaaaagcttataccaaatgtaataaaattaaaactagcgaagaaatagtaagaggaaagaaatattcttaccgagaaccaccgacatcatgccttgtaagcctctgcagcacgtcaatttcgatcatggcagcttcacgatacttgtttatggaccgtataactttgattgccacgacttctttgtttttattatcaaagcattccaatacttgtccaaatgtacctgccaaaatacaatccaattgattaagataactggcgaccaaataaacatatttctcctacactttgaaaaacagaataatctaatcataatgattatataaacattttcgcaagagatgactaaccttcacccattttgctgagaatttgatctgcacgcacaatagaagaggcatgtcaatgtaaacctccatgataaagtctgtgaaacgtaacagataagatgtcgaaagactctgtaacataagactcacatcgtggagtcaaagtatccccaacaacaaagacataatggccgtctttatcatctggtctccagggaggagagccctgacgaggaaggccattatagaacatgtttgggtaaacaaaattgggaactaaaccactcgcaaactccggaccatagtacaacggaggttgaaatacctgaaagaaaaaaacacatcagctgaaacttagctcaagcacacaaataaaaatcttaatttcttactagttaacacaattcgcagtatcttatgaaaacaacaaaagaacagtccattgataccaatacaatatgtggacaattcgttaccgtgggtggaggaggaggaggaagaagaggcggagcagcatcccaagtcaatcggggacgtttcctgggacgcttatcaacgatccgatgagggaattcaacattcctctgagtttctaagatcatcgcgatcgagctagctttatcacgatacacactgctttgcataaaggattagaaaaatgcaaatccagagctgaaattcagaaacccagattatgaacagcgagagaattgcgattgaatttcgaatctaattagagggataataagattccgaaattcgaaaccctagttatcttcaatttgggggggatctatctccagaagataactaaaaaaggtgggaaaagtaacagaaaaatatattaaaaaaagtggaagtaatgtagctaataaactaaccgcaaatttctctcacacagagtaatttaaaacgttgaattagtcgctgtcgtaatttgatcgccggaattcagatcggagaaacaataaaaatgctcactgaattggaattgaagaaaaaaatctcaggagaaaatatttaacagcgaaagagactgaaatgagagagagagagagaacctgaggaagagaacagcgaaggagcgacagaggctctggaagttcttaatgggcttttttagtcaggcctttattaaatatatgttgactaaagaaacgacatgatgttattactgttgaggataaaaacgacgtggagttcagttatttaatatcagaacaatggggtgttttctccaaagtcttttaatatggaggagacgggagagtcgttgaacaagaaaaataatctgaagcagccatggagatagccgccgttagcactgtctccgtcgcgccacaatcgcgcagagtgtcgaatgcgttctccaggaatctaggatccgtatcttctctttcgtttggtttctttgagaaagaatattgctttaagagccctagccttcgtgtgtctgcagcagcttccatggacgccgtcacagctgagaaattttctccggcgagttttctagacaaaaaagaaaccggagttcttcactttgtgaaataccatggcctcggcaatgacttcattttggtacttttgttcaccgttgaattctcaatttggtaatttaacccgaaatgtatcgaattcttacaaatgttttcaaatttttcgtctttggaattggattttgtaggtcgataacagagactcatcggaacctaagattactcaagaacaggcggcgaagctgtgtgatcgaaacttcggtgttggtgccgatggagtgatttttgcaatgccaggagtcaatggtactgattacgcaatgcggattttcaattcagatggtagtgaaccagaggtggggcttttcgatgataatgtctggtgatatgttgttgcgctcgaagtcattggcttttgattttgttcttgtagatgtgtggcaatggagttcgatgctttgctaggttcattgctgagcttgagaatttgcagggaaaacataggtatctctatctgtattgagaaatatctgtttagacttgagagttccgagtttagtcaagcttgatgtaaccttaagtgtctatttatttgtttttgtagttttacaatacataccggtgccgggttgattgttccagaaattcaagatgacggacaggtagatcatttggattgatgtctcatattaggtttagtcgtattcatgatgatgggtaaggtaaagtttggatttttattttttgtgattgatattggtacaggttaaggttgacatggggacaccgattcttaaagcacaagatgtgcccacgaaattgtcagggaacaaaggtgaagctgttgttgaggcagagctagttgttgatggagtaagctggaatgtgacgtgtgttagtatgggcaatcctcactgtatcacatttggtaaaaagggtggaccggtgcgtgtttcgttactagacttctaatcatattatttgtctacacgtgaatttcttatcatttgtaattttggtttgtgtcaaccagaatctgaaagttgatgatttgaacttaccagagattggtccaaagttcgagcatcatgaaatgttcccagctcgaactaacacaggttagtggagattcatcggcagatgtatccagatttccattgactgatacagcaagacttctcgcttatatttggatttatatccctttagttgtcttacagttctttctgtgtatccgcagaatttgttgaggtcttatcacgttctcatttgaaaatgcgtgtgtgggagcgcggagcaggtccgcaaattccccccaatcttcgaatataattctcagttgattataaacagtctctgtatccttatatgcttaatgcttacgcatacttaaaactgcaggagcaactttggcctgtggaactggagcttgtgctctggttgttgcagcagtccttgaaggtcgagccgacagggtaagtttggaatttcagaacttaaaaaactagataacagtttgcaaaatggtacactggattagcagtttttaagcattttttatgaaacctgaatgttgcattgaatggttggatgatttgattggtagacgattgatgagattatgattttactaagtacttttcgttcgcttcgtctcttgtgggagaatcttgtattcgttttttttggttcttcactctcacacaaatgtttcttggatattcattggagcttaaagattgtcatgagctgagattagctgcatgtggtgaccttgagttcctcatatatgtattggtttatggtggaacagaaatgcacggtggatctaccgggcggaccattggagatagagtggaaacaggaagacaaccatatctacatgacgggtcctgcagaagctgttttctatggatcagcgctgctctaatgggccttcacagtcgatgacttctcctctctctgttgttgttcttttggggtctgtgtgttctaattcaaacgtgtgaagctcttacctgtcctgctagattgtgtttcatggattttgtttatgtacttttattgttttcagagtatccaaaccttttgatttgttgctgcatctatgttcataatttaaatcttcttttcctcggaatatagctctcttctacactgattctccaccagaccagacattgtcaatggccgtggttgcacataatgacaagagaaatgaaacttgagagaatacaaaaccgcatatgtacatgataagattggttagcttccatatctgcatagatattagcttatatggttaggaatcaggacaacataactggtatcataatatctcctaagtataataacacaactctcattagtctgatgttagcctatctcacacaaatatttgtcaacgaggttttacagcgtggaaaaagccactgtccaagttacttccaggaagtaaagacaatggcgagggtacagaagaagatgacggcgatgttttggagcagagtaatttcgttgtttctgagaacatttcgggttctcgcacagattggcaaataccttcaagttctttcaccacttttgacattggtggtctcgtctctggtctatcttcacaacaccataaagctaattccgccaacttcttcactttatcgggcgaacattgtcccatccgactatccgccactgacaaaaccgttccacattcattcgcggtcctcacctgtatcacattgtacagaaaaaactcttaggaaatttgtagatatattcaaaaaaacataaacctcacagatttagctactccattatcagatctacgtgggagctcagtcaagaaaagtacctcgcggataatatgtgtaccctcaaagaatgggtgcattccagtcaaaagctcaagcaacactactccaaagctgtacacatcacttctcaccgtcaattgctgagtcatgaaatactctggatccagatatccctgtgcatgtataattatcaaaatgtcatagctgagagggaaaccatgtttggttttgtcaaaagccacaggttacatagtatcacatatcgacttgtgtcctagtttagaactcaccggtgttcctcttactactgttgatacatgggcgggctcaccatctccctccccaaaagcaggagccaaccgtgacaatccaaaatcagcaaccttagcatgaagctgacagtccaagagtatgttgctggttttgatatcgcggtgaataactggcggatttgcttcagtgtgaaggtaaagaatccctttagctgaacctaacgccacatgtgacctcatgctaaagctcaatgtgtctgcagcattagctgcgtgacaatgtaaaaccactgatacattagcatccatgtggaagcagattggcgcctcaaaaattttaagctagtttctgatcttacatgtatagaaaagaacttgggaggaatatttcttacctgaaagccaatcacgcacatttccattaggcatatactcatataccagcatctgtgcatgaaccaaacagaacacctatgtggattagtcgaagagcatagatataaagctaactgacaactgcacatgcaaaaggacatacctgttccccgatgtcactactgtagccaataagcgacacaagattccggtgatgtaacctcgaaagtagatcgatctcattcagaaactctttttcgctctgcagagaagtttcttctcctcgtttgatggcaacttcggttttatttgacaaaatgcctttgtagacctttccatagctacctctaccaatcagtgtggagctgtcaaaaccattagttgcatccgacagttctacaaaactgaacttcttcacccctttgatttcccgagatattgttctgactggaagacataagaaagagtcctcaatttcatggttataggacacaacaagatgaaatactgacaaaaagagccattgctgagttgcttacaaacacgttttttggtgagcgtatgtgagttttcacgacgtttcctaacatatagaagtgttgcagtcactgataaaacagtggcagcgacgacagagcctgctactatcatcatccatacaatcgttctaattccactcgtttgagctaacaaatcagctgcatccaaagaattaaatgcatattactatatatatacacatatccttatttgttaaagattagatccaaaaactgtaccatacggtccttgaagagggaagtccagcagctcatatggtccaaaaaagtcagttttattaaaactccatgacataaacctgtcccgtatacgtatgacttcactcttgttaaatgttattctgcctttggggactagctttaagtacattcttggacgcagcctgttctcatcgacaagtctatcaatcgctagttgatgagtctccagttggagggacgaggtaatatactccctgaattggcgttcaatatatggagtaaagaaaaagaagctagggctctttagcctataatcaatcgaaagaggtgctgtgcacaagcagattcctggggatactttcacattctcaaagggacatgacacattactgcagggtgtgtttgagtttgtagatgtctgctttttttcgccgcagatgtattcgaagaattgtgtaaccatgggaatgcttgtactcttgcatattgggttgccacgaagactttcatacagaaggatacgaaaagagctttagtagatagcaaaagaatagtagaaactagagaaacctatgagttgttgacttttggttttaaagcgcgcagaacaagtacaaaaacttaaactgaattagactataatgccaagacaagagaatgcagtttcagtccaaaatgtttgatgtgcattaagttgctaccaaacaggaacaaggaaacttactatagggtaacattgtctggtgttctcaggtttcctgtggcatcagagaagttgttgttcctgagatcactgtgcatgcatccaaaagaagtttcagcctctgagaatgaagtataaaactaggaaactaataagtaaagaaaaacaaatactagaggtcatacacttgcagcttgttattctcgaaagacttgtcctgccaaatttctgttgggacagaaccagataaactgttgttctcaagtgacctgttatagatgacacaaaaaaagttataaagtacttatgaatgggaaagttcatttcactgatcaatgaatgtttacatacagtaattgaagagagttcaaatctgagaaactttgtggtatagatccagttaggtggttataagatagttcactgcagaaaaaaattgacaaataagtattgtatcgccggatacactgcatgaaagtgaaattagatagatatttcctttgagtaaactgttaaaaggaaaaaggtttggaaatctgcgtacattgttgtcatattgtcagaaagcttggattctggtatagtgcctgtgaggtggttccaacttaggtctctgtacaagagatgaaaatatgcatttgtattgttccttaaaaaggtccaagaagtccaggaccagtcaaaagaatcagacaatgttacaaataccagacatagatacttacagatagctaagattttctatcctgcttaaatcaggaatagatccttgcagtccacagttccttaaacttctgccaagttggaaagatgaagcacaagagcatgttcaaactagtggagtaatacaaaccaatctgaatcttattgcagaaacctcttgtaaagtcttacaattttactaatctagaaaagtgtccgtaagcctctggaatagttgaaccttcgaagttgttgttatccagctgactgcttaagcggaatcttagcttagcaactttgcaaaatattgtaaacgcaaacataaagacagtcaatgggaacaatatatggcgcatacagtatggtcaaggatggcaattgagctaactctagcggcaatgtcccagtcaagttattgttgtccagtatcctacaagatttagtccacaatataaagactaaagatagtatccaaatgtgaaaataaaacaaacaaaactcacatgtgaacaagcttgggcaatttggatagctcaacaggaatttctccacttatcgtgttattgtttaagtggctgaataccaaaaggccactgatgagtaaaggatgaaccacaaaattactgctggttttgctatgaagaagtaataacttcacggtaaacttacagatgttttatgcttctcaagtttccaaatgaaaatggaactgaacctgttatgttattctcatctacttgaagcctgtttaggttttgaaggttaccaagttcagggggtaaactacccgtgaacttgttcccattcaacagtctgtccaaataatgtagcaaagagtcaattgaagaaactcaaaacaaaattgggattgtggctccaaaaaaaacaaaagagaaaacaagccttttttaagactatcccataagtgaaactaaccaagtaacaaaaaggcaaaagaaagtacatcatgtgatccaacttacaggagtttcaaggaagaaattcttcctatctccaacggaatacgcccagtcaggttgttccacatcacatcacttcaacaaggtaacccaagagaaaatacgtttttcagtatgcattaggcacccggaagccaatcagacaaaccaaatgaaacaattcattagactacgcatcttacagaatttcgagatacaataactggccaacttcaggagccagttctccagataaattcaacctcatcaattggctatatcacaatacgtaaatgacagaaggtgtaagtacggcaacgcataatattttcagtatgtccatgcaagaatcagaacactgcattagtgatgcatggactatctacctttgcatgagaaaaaatccctgaattccaaatataaagacaggggaaaggaccaaaaagaagaaaagaaatgtgactaatggtaatacaagagacatacagctcccggacgtgaaagtggccatcattatgtgatctcccgaagcatattatgccagtccagtttgaattgcacgggtcaccctttgcccagttacttaaatttctcataggatcaattagactccttttgatctcccgcaaagcatttactgcaaaatggataaaaatataagcaaacttctggaaagcagtctccacgttgtagaatgatttgggtagagggtggagcctgaaacgctaccaatcaaacattgagaggaagactagtgaccaagtttatgcaaattgaccgtatcagtacgtttatgttaggtggtatcataatttaagataattacaagagatgtgaagttatgataaaaaatgattaccttctgaaggatctgttctgtaaccagctacatgaagcagaaggcaacaaaatgtgaccagtaataatgaaccgcgtgttcttgaactcatcaagatacctagaaaaggaagacaaatcatactttatcctgttgtaggacacagaaacatgggggtcagagctagatgatttcaaacttcacaagaaaaatctgggtcaaggccaatcttagaagttatgataagaaaatacgagctcacatgaacaagtcactagaagaagcaccaagaaacgcgttaggcagaagatcaaagattcataaaagaattcccggaaatttcttcaacaccaaggaaaagcagaagtctattggtcatcagacatagttatgtctataaaaatactgctggaaatagatatttcatgatgacagtgatctaatgagttaacaaaacataccagaaagggactatatataagaaattgtcaacaaagttctattgaatatctatatctaatgaatggggtttgaaaatttcttattaagactgactttccttgatgaacctatctctgcagtttcccagtatatattgaacagcaataaaaaggttcgatggtaacattaagtgtataatccatgcctgaaacatcctacgaggcataatagtgcagacttttcgacacatatatagagagaaagataatagtttttacagaaaaatccaacaatcttccaacttgtcaattttatagtttcagttgcagagtggttgtccacttaggctgacctggtcaccaaagttggtgatttcagctgcaaagttatgaccctttcccaatctagactaggttattatgaaacggatccggtctaagaaattccaggagcaacccaacgcaagagtaaataggttagcaaaacttcagattacatggtgacaggaaacattaggactgaatgaaagacagagaacggaaagtaaaatcctgtctaggtataataaagcacctcatttttagccaaattctatgcagaaaaaaagtcaacacttgctagtttccactcatgtaagcctagacttccccaagtagtgattattactctggtaccaaaacatgtgtttgatgttgtattgatcaggcctcaacacctaaaactctcactgggctcttttatataacaaagtgcccggctcaactacaaacgacaaaccaattaaaattctcatcttttagtaatgggataatatctgtggaccaaacagctaaacaaacaaagaaacacataattctcccatcttacagattagataacagcaggtgacaaatttccagatatatttgctgcatcaaaatattggtaatgtgattaatgatgaacgaaaaataacataacatacactaacacatagctgttcagaacaccactgagttgataagttttagaactgatttttcttatatttctctttaagtttgatttacaacagatagaaacaattcatgaacaaaccaaatacagaacaaaaagtagccctgggaatgagttatagagcatcccttaccctcccaaggccaagaccatccaaaaatacctgataatccctatctgtttctttccaaactatatagaccacttgagcagccattctacacaagacacaaactataaaactttcttcatgtctttatcatccaatctttcttttttgggttatcatcattcaccactgcccaattacttaagctcctcataagatcaataaagtcctttctgattcatacaaatgcagttgctgcaaatttggttggaaatgtcagaaaaccactcagctccaataagatgatcatcaaaaaagttttggatgaaactaaagatgactgctttagccttaaggtgaaatgcaatgcattgtagctaccatgcagctaattttcaaagctggaactagttttaacaattctctagatgaaagtagcagaccaactgatattgttatagatggaacaaaatcgagtagagaggtcatatacattctgaaatcaatagcatccaaggcgagatgatttctgcagtattggctgattaaactatccctgacccaagtctggtaagaagaagaaaagacggcgtcgcgcctcctttgtcggagaagaagagtcgaagaagacaagcaaaggcaacaaagcaaagagaagttgggccgtgtggcttattaaaaaggttattgggctatagttaagcccatgtactatttgggttttagttggttaagtttcagggttttttttttttaaaaagtagatttctacgataaatgtgtgtgtgaagatgttgaaagttgaaacttcataaataaggttcctgaagaattcaacattcttggttgatcatataatactctctcacgattgacagtccaaatgactttcaactctttaatctaaagtctaaaccacaatctaaatccggtttaaacgcagtcacgattccatcattgatgatgtcttatatcacacacatagattaggccttagggtatcaaatagtgttttaggtgagaaaagcagttgtcagattttgatttttaagaatgcaatcatttgacttttagtttgacttccttttggttcttcttagccactctttctcatattctacacgtgctcattaacgttccaaagtcaataaaaaatcacgaagccaacaataaaatgtgcaacaaataatattaaacatgttagacagacgaaagagaattattctttatacgtatttaacataatgtgccttgtcggttaccaaacaaaataaaatatggcttgttagtggtcggtaatatgtaacacgttgtgtgtttgttgtccttgtcaaaccagcaatgctgcttaatttatttagataggaacccaagtttaaagaagactttttttttggtcaagtaagaaaatgtcaaaacctctgaaactttctttattttgtttataaatacattactccatgaatacgttacaaagatcttaatctcacaagtctcacattttctaggtggaccaaccaaaacccaaaatctttaattccctctatagtgctcttttctcttttcgaaatacaaccgtaaaaacatgaagagagaccggtccgattacgaagaatccatgaagcatatagacatagtagaaagtctaatgatgttatctcgaagtttcgtggtcaaacaaatcgatgtaaagcaatctaccggaagcaaaacgaaccataataaccacttcgaatgcaaaacgtgtaaccggaaatttgattccttccaagctcttggaggtcatagagctagccacaagaaacctaagctgatcgttgaccaagaacaggtgaagcatcgtaacaaagagaatgatatgcataagtgtacaatttgcgatcaaatgtttgggaccggtcaagctctaggcggtcacatgagaaagcataggacgagcatgataaccgagcaatcgattgtcccttctgtggtttattccagaccggtttttaatcgttgcagtagcagcaaggagatcttggacttaaatctaactccattggaaaatgatcttgtgttaatctttgggaagaatttggttccacaaattgatttgaagtttgtgaattagtagggttttaaacctttctctgtacttttgttgttgtttttttctctcttgctacacattatttcattctttccgtcatgtatgcatacacaatttgtttgaataaaaggtttcaattcttgcaatgagtgataaaacattaatagttgaaagtttgaaacagaaccattctcgaatgtatacatagaatccaatatcattggtgtgtgagtgagataaactgatattatcataagtcataatctgatgtcagagaatccattccagaaatatggaatacgaattgtgtccttcacagtcacactataccattagggaaagagagaatcttaaaagaatacgtagaaacaccatctcatatagaagaaaagcaaaagaagattgatttcctttttcattttttctttccaaataccatttctctttcactagccagattctctcctttgacaggcgtcgtggacccaatttttatgtgccgcaacatgctgatttctgagtagcttgagatgttcccgcaccttggtcggattggttgattttgattgtttgcggctacaaaaatgataagaaattcgatgacgttagtaaggttgatacacatactgaaatgtgatttttaccacaattgcaatgtatgaatgatgacagtggaaattaattctatagctcaaacgaacctcagctcgtgcatcggtatctgcaagtctttgcttaatgtctttagcaatagagaagaaaacttcctcaacgtttaagttagtcttggcactctgcaattagcaaactcatcaaagttaaccatttaaaaagaattagacctttccctatatctattgaaatgtaacaaaacatagacaacaacttacagtctcgaaaaacttcattccatattcatctgcaagagcttggcccttagattttggcacagcctggaaaaacaaagcaaatcggtgtattagccaaatagaaacatataatatttaaacaggacgaagataggagggagggtaaaagaagagactcttttgctttcatccatatctgctttgttcccaactagaatcttgttgacactatcagaagcatgctgctcaatgttacggatccaattcctgatgtctggaattgaagaaaacaaaggatgaaaaagaacaaattagttgagtagaaaataataaagctagcaaatggaaaaatataaagtttagaaccgttgcaagagcttgttgggtggcataaggactgcaagtaaaaagtaaagagagtacttactgttgaaagatgattcatcagtcacatcatacacaagcaaaatccccatggctccacggtagtacgctgcaataagaacaaactactcaggtgtattccagcgaggaaggcaaagatgcataaataacagcaaaaagagaaaacgaaaagcaagatcgaaaacacaccagttgtgattgtgcggaaccgctcctgtccggcagtatcccagatttgcagcttaattctcttcccatcgagctcaatagtccgtatcttaaaatcaatcctgtcaaaaacaaaaagcaacttgagtaagaacagtgaactacatagaggacgtgataacacagtgtcattgcatgaagacatcatacccaatagttgtaatgaaactggtggtaaacgagccatctgagaaacgtaagagaaggcaactcttaccaacacctggtacatgaaagaaagcaaaagtcagataaaacagagacattagaataatccactggaacatagtgaaacacttacttacaacaatcaacaaaggaatattcaaatcaatttggctaaagcatttgcggcattaacatctagagaatataattaaatagctacagcattcatttgtgattctcctccatcctaataccaaactaagaagactatgaacatcatatgctcacaattgttgaaatgagatccaaatctgagtaagatgtgttactcaaatcactgttgtctcaagatccttcaaacaaaacttaaattgtaatcaacaacaacaaaaatcgagagaatcaatcaacaaaaagatagagattgaataaaatgcagggaacaaaaggtagtattacgatctgaatgatatagaaacctaccgctgtctccgatcagcagaagtttaatgaggtaatcgtaatcagcacgagctctagcaggaggagcagccatttcttaacaaaatcaagtaatttccgagaaacggatcactggtaagcaaagagagcaaaaactggagacaaaatttaaatcgagaatcaattgtgtagaacctaaaaatcgaaagaaggaagtaccaaatctactcggggaagatagatcgtcggaagcaagcaagacagtaaccagacggccgttgaatttttttcttcccccgattggcttttttcggagattcagaagttttttttttttttttggttagagagaagagggagaaggagagggaatggatctggaccgttggatcttgttcgtggagatctgtgttggtccggcgcgtggtcttcggttacggtttgataaatttcgaaccatgggccttgggctagttttatttttgtgtgctaaatttatgatttggtgtccactaaatgtttagtttattcttactgatccaacccaacaggttacagaattgatgaagtatattcatacagtatatgtatttttctatatttcgttctgagttgcgttgcgattaagctctgggaaaaaaaaagttgtttcaatcccttcacttgtaaataaactcaattatttaactccaaggggacgcaaaggttaggcaaaataataataataataataagagttaggcaaaaagagagcgattgacaaattgaggaaatttgaatatattgtcgtcggtgttaagcaaataatcatccaaagaataaagcgtggataggaatctacaatgatcctacgtagcatctaatgtactgcatgagcattcgtttactcaaccccatccaccgatcatccgctgcggacaagtccacatcttcacttcttcacgaccaatgaggtaatgccacgacgaaagcctttcctaaaattacacgatccatttccttttctaaatggatacgaagagtgtttccattgacattaaaggaaagctaactttacttaaaatatcgtccttgaggtaacaaaaaagtttaagcccctatactgtcttatttaatgttttttttttactcttacactatttagttctatgttaatccaaatttatccaattatttccgatatctaactattatccaaaaaaattagggaatgacacgacacgacgtaagcctttcctaaattatacgatctagtttccttttctaaatggatacgaagagtgattccattgacattaaaggaaaaagttaaagcatacattctcagatttgttttgaatgtagactgcaattattacgttaatgtgatcgtcttattaatgcttttaactccaatttacaatgagattcatgtttatccaattttatcccaatctcattaaactcttaccatacaaaaagtcagaaagattatccaaaaccttccgatatgaaaatggtaattatttgaaatgcacgtgtatatttatcataaaaattaatcataaaacggtgcttacggtgatggtaattggtgacttgtatcaatcaatgccagtaaccgattataatacgagttcaaataccaaaaaaaaaaagagctgtaaacaacaaaaatccatataatatctaatacttttaaaagtataaatctaataatttaaaataataataagttagtaatttattttaaactcctaatatcaaaatagtatagaaatcctatactatcataggaatcctaaaagtataaattattttaaattctactaatttaatagttaccagctgaaaaaaaaaataaaaaaaataaaaaaataatagttaccaaaattactatcatagacaatccatgcatttttgcatgaatcctaatactatataaaatacgataaacacccatatttatcattttacacatctttttgtttgaattatccatatacattatgtatagaaagaaaataaaaacgaatattcacttgacagattaacatatgcttttcttttgattgcagtttgtaatccaccgacagagaaattgcgatgtcataaatctgaacacgaattttcggtgcactcgccaacacctgatctcaactctctccagcatattccccaaattaacagtagctaacggagacttaacgtggactcctcgcaatccgagtcactttaacgtgtatcagacagccaaaccttacgttgaccccaccgccgttaggaattccgtctatgtctctttttccatcatccaataaaatcttgccacattgacactttcgggtccggacatattccaaaattaaagagaatttaatttattgttttccttccagaaaaatattaatattctttctaaactaaaaaatggagtcttcaaatagcacagaagcagagacatagagcgggaacgcgtttagtcacagctttcttctcctttagcttttctctctacacttgcttctctctctctctcctttgggttatccttcttgagatctgtgcttgcgtttcttcttcattcgacgacactttatctcgggagatttcagatttgtcgatttgttcaggtacggatttcgaaatgttctttcaatcggatttgttcttcctcggaaggtttctagggttttgggattgggtgtctttaatctgtttgcataagccatgaacgagtttttttgttcccccgagagatctttgtgacttgtagatctgagttgggttccaaaatattcaatctttgtgatgtatatctacatttttagattatcaaactccattaaagagaaaatctttgctcgtttctcttaaggcccattgctttttatctgaagatgatttcaagagagtgccctgtttttttgtataaataaaattttgatcttttgctcgctttatacacatgtgggaacggttttgtcggtggagacatttatggattcgtgaactgctgcaaaaattatgcgtttcttggacgtttctgtaactttctctttattagattttgtatcttgtgtctctgtgtccaccattgcgttgtgtgtattcaattgatttccccaggtgttgaagattgttatttatatatttaacttattttatgcacagagatctttagtataattcatgaaaatatggttttatcttccatgatctaggggaactaaaacatttgtaaagtttgagcccatattttgtgtttgttgcttttcagagatgcatatattatggttgttgttctgtttatgaattgttatgtgcattgttttgcagcaatggcgccaccgattgaggtttctaccaaaagctacgttgagaaacatgtttcacttcctactcttaatgagaggatactttcgtccatgagtcacagatcagtagctgcacacccatggcatgatctcgagataggtaagctatacgtaaaggtttctttttcttttttttggctctaagatcatttcattgttttttagtaataactcttataccttttttgcttcgcattcctttgtttacaggacctgaagccccaattatcttcaattgtgtaagtgttttgctaaagctctaaggattgaaaatatttaattatattgtcacaaaactgccattatgcgtattcggagatgctgcagttgtttactatttctacagaatttacatatttgtagcattcactcaaagaaaattaaaacattcattggctatatatcttgaaacctgaattgagtctgctgtagcatatgaaatgatgttcatcgcctgattaggaaaccattttatgggtttaatctttgagatattgttgtgggaatcattaaccaagcatacggaggcattattacaggtggttgagataggaaaagggagcaaggtgaaatatgaactcgacaaaactacgggtctcattaaggtataaatttgattgcattaactttcttcgctgtccctttcattattagaggtacgattgtctaaactttacacatattctcaggtcgaccgtattctttactcatctgtcgtatacccacacaactatgggttcattccgcgtaccctttgtgaggacagtgaccctattgatgttcttgtcattatgcaggtaacatattttttcatacaattttgagaacctgcataattcattacataatgtttcttgttctattttgatttgtgcatctgataagctttgaagaagttcaagcgctcaactcttagctatagactctactttataactgtgtagcttaggaatgaatgtagcagatgagaaatgttgccagtcagttatcgagcagttagtggctgctaggcttataaaggtgtctcagcatattgtttagagtgtggattttctagtgtttactctggaatttaaaacctcttattaatcaatcaagtctataagcatcatcagcatctcagtctgtcttatttgactggtagaaaacacatctcatgtgaatcttgttgaatattttctacaggaaccggtgatcccaggatgctttcttcgggccaaagctattggtctgatgccaatgattgatcaggttagatattcaacgtacttgtcatattagtacttataaaagtaacagagattgaaactagaagctctttctgcttgaatagggtgagaaagacgacaagatcattgctgtctgcgctgacgatccagagtatcgccattacaacgacatcagtgagcttccgcctcatcgtatggctgagatccgccgtttctttgaagactgtgagtgttcttttcttacaaacttttggttggttaaggatgatatgaggctcatactcttgtaatcttgttgcagataagaaaaacgagaacaaggaagtagccgttaacgacttccttccggcaactgcagcctacgacgcagttcagcattccatgtaagtagccttcatgaaacttactgttatttacttcatatattatgaccttgtaaatagccgcaatttgtttatatcaaagaataactaactaatcaaattgggacaactcttttgtgtcatgtagggatctctatgcagactacgtcgtggagaacctaagacgttgaatcaccacctcaagcaatggaatgaaagctcacaactgcattattcacaaatataaatatacatataaatgtcaggcttctcaaaggatatatttgttgtgtatgtcctctgatgaatccggtagatgatgccgataattcttttttttttttgtcgtatgaaaccgataatcaaagactaaaacagggatttttctcatttgtggtcatcactttttaaattttggtgtcatttctcatcttaatcaatttgtttttgagttttattcttctattagatcttttatacatcaaagaatagatgaagattcctccctaaaaccttatagtatgtcatttattcacaatatgttatacgtgttaattttctctcttttagtatactctttttttttctttcagattccatcccaagttgcttaaattttgttaaaaccaactaaattccatagttcaatttacaaatctgtgatcagatgctatctaaatgaatattaccattttagcccttaccttttctgaaatttaccacgtttacctcaatgaaccgtcatcgcaaaaccaaaaaccctttcctatccctaaaacccgagagagcatcttcttctcctcttagggtagaagaaggacgaaaatcggaggaggaagaagaagatcgattcgatttgtgatcaacgatgagctccttcaatggaaacagcaacatcgacaacctcctaatccaaaccctacttggacgtctccaaattcgtccccctaactctcatttcctctctcaatccctagacgacctcctcttcaaatccgacgacagcgacggcgatgatgacggagaaggtcagaccagtctcgacagagaagaagctaggcttgagaaagagctaatccgagtcatcgtctctggtcgaagcgattctctcaagccgaattcaggtcaagccgtgacagtcaacgaacaccacatctgcgttgggtttcatgaggatgaggaatcggattatcgtgtttgggagtggcatggtcatatcatgttgtttgatgaagagaatgggtacacgcctgagtatatctacgggaattacttcgagaggttgcctgtgaagcttcctaataaccgccgtgtggagaaggagaagaagaaggagatgaaagaagaggaggtggagaatttggggcttagagagttgatcgatggtggtgacgctgctcctggtaggattcttcataggaacaacatcaacatcggttcctcaaggtttgtttcttacaactccttttaaactttctatcattctgtgttgctttcgggatgatttagttgttcattgatctagggttggctaatcaaagttttaggtcatgtattagagtatgtattcagtgagaaatataacaatggctcatatgttttggatgatttttgctgttagcgaattctgttttgaaatttgattcgctcatggtgaagcctttagtttgcttttacagtttctttttcgttgcaagacaataagttgatgaaaagagtttggaaaatgatagtttttgatcattgccagtagtgaattcagcacttgctgtttcctgaatgaagttacaggttaggccaatgtgtggttgtggattgtggtcattgcatttctgtctcgaaataacacatggtcgttaaatacgatcgattaattctcctcaattcatattagatagttgtttcccatatatgtatgataaaactgcatgttcttacaatgctttttgttaacttttttaccttgctctaggccttcaatgctgttttggacactcgatttagttcacaatgtgactagtgagacttcgtcgatctccaaatcaattgctttcatatacagttcactatattagtcagggattttcatgccaagaatattcatttttacggtgtccacaaatattgatatagaatgttgtttaaatgttcatatgatgaccacatctagatcttccgatatccatttacattacttaatgagagttctaagacgatgaattttaagcttgtggtgtgataatctactcaatagtattagtaatgcttgatcttactcttgccttttcatattctgttcggatatccatcctcttccaagtatctattagattattctcttgtttcactttagattccaactttaacttgattatcttgcggttacatactcaaaatgtttagaatcgatcactgaacttacgtggttcatcgtgaactggcagggtctaagttcctaagagcgtcttggtagggagaggtcacattgttcgggaagatttcagatgtgtgaacaactcgcgacaacaaaacataaggtgctggtgggtctacgggttctattccgttttatttaaaccgggaaatccatgggtgaatctgttttctttaagaaattcatctgaagttgtttctgaaccaaatttacaatacatgttaatgaagagagaaaagattacaatgcatggtcatcgaactcggaagctttcaagtttccccatgtttgtttattttgtgttcttaaatcagaatcatatgttttgctcattttacaattctgctttcgataacgaaatttaattgaatcgttttcaaatctcgagtacttccaatgaagatttcaccttttttttttattggtgaatagtatgtattatatcggatttaaaatcacgttgtgtaatataatgaggaaagtcgtacaaactaccaaactaaatgtacggtaagaactgggaagcacatgtgttgcacacgtacccaatacccatggtagaatgttgttattcattattgttttaaaataatatttaagataataattttttggaatttttagttatattaagactttgtaaaaattaaatctttaattattacaaataaattgatttgatatttgtaacgtagatattattaatcttattaagtttgattttacatatttaaacgtaaaaatgaagaaaaaggtatttttccaaatttactctatttataatctatgtattaaatttatatgcttaattataactttttaataatataatgcttaatgttataaatatatgtgtgtgaacacttctaatacgtaccactttctaaaattctttaaaaatcgttttgatatgcaaaagttctacaaaaattcgcttaaataacaatttcctcttctttaactcttactcttcatttgttgccgtgagttttcaccattcagaatcatagtcattcacgaaatattctcatatatatttttttttgttaaaaagaaatgtcaagtgtagaaataaaatgaaaaaagaaataagatattagagaaatacaaagattgaaaagcgatgtcttcagaaaatagatgttgaaagcaaaacaatgtttgcagacataaagtatattcggttgtgcaatgaaacaatgatgtagacaaaaaaaaacagtcctatcaagcattgattttcttaaccactaaattcaaaaaagtatgcaattttgatccacacacccttagcttaaattaaatcgtcacattttttttcaactgtcgaaactgaatcatgattctaagaacaacatcgtcattataacactctttagaatcttaatcaaaaaattaattgtgtaatatatagaatgtacatgtatccaagcaagggcaacaacattatgaggttcacttgcccgtgatgaatgggtgagctaatgcctgtgacactgtaagtctcttttgaggatcaagtgtgaaaattttgtccaaaagattcctgaaatgaaccaacaccttgggatcttcatcctcataacgtcgtctaattactgaacctaaatcttttggctttacgttgaccattattctccttattgtctttccagtaacactatcctcctctgtagcatagaagcataagtccttatcaaagtgttgatcgataaatgctcctttgcgaagcatctttttagggaagggacctttcagttccatatgcaggcgtaacatatcattgtttgtggagccagggaacataattttcccgctataaagctcatacagacaacaaccaactgaccaaatatctaacggatggtcgtagggtagtccaagaatgatttctggagctctgtagaaacgactaacaagatatggtgtaacttggttttcaccagcaaacattgcactaccaaaatcacaaagctttaacatgtttcttccctcattcattagtatgttatcaggctttatatcgcagtgaagaaccccacagttcttgagatgtttaagggatatgaataactgctcagcatacactctaacatcatatagttttagaccaatgttgacaccaatcttcttcacaacttcacggagattcagatgaagagactcaaacaccaagcaaaggtggttcctatattcaaaagttgaaagaagacggacgcagtggtgcttattctctgggtcagagcaaactagcttcttcaatatccgaatctcagcctggccagccttatgcattgtctcatttttccgaataatttttatagccacttcctcaggttcacctagctcaggttttgtgtcttttgcacgcaccacggtagagaatacacctttcccatgagtagccatgatttcatatctatcatcaagtagttcaccaagctgataactgtaataaccttctgcatcatcccaattatcattgagtccactccttacaaaaggaacaagtgcattccctttccgagtaccatcagctagaggagactccccaaagatatcatcactgaacatgtcactctttgggctgcctgcggaagctagtgtcatatctgagtctgatatcacaagccgtgcaggtgtttccccaactgctgaagatagcttggcgacttcaccatctacggcctcagtatccaacccagctttagcttgaacatctgccacagtagaggactgctccaactttttcttatatttctccaatatggcttgcgtaatcctcttgctttcctcgattcttttcatctctgcagcttcttgttcttcaactccccaaacaacatcttcaccgtcatcatcattatcaacttcagacctttcaacgttgccctgagtttcaccgttaggtttatggctttttaaagaatctaagtcatcttctgcatcatgcctaacttccccatatccatcaccaccacttttatagatctcctgatcactctggtcttctcttcttcctctatccctatcttgatccttacgtctctctctttcattctccctcccagtctctctactactagacctagctttatctctactactcctacctctgtagttgtctctattgctttctctatcaatgcttcccttcttcttcaaattctccccttcctccaaatcaagttcaccatcgttaccaggattccccaaaaatggataaacattcttttcattgccgtcctcatcaagatgatgactgtgtcgatgcttgtgatgatggtgcttgtgccgcttggaagatttaacgacttcgtcggaaggagaatacgacctacggtgtttgcggtggcttgattctactatcttatcgctcaccatcagatcgtcggaaaagatagacaatcgcaaaattagggttagggttcgattttctcccgcgctctctctgtctccgtgaacaacagacttccattaaaaaaattcacattatataaaaattacagtcggcatcggcaaattaaaaggaaatcagaatcgtctatttaaaaaaacaaagggcccaggcccattaataataaatgattaagaggatagagccatcatgtccgttgattattcgaaacctttccgatggatggatgacacgtcatcgatccgcaagaaactcgggtaaccaatgaaagccagcagaagcctctatataaacaaatgtctcctcagtttttccatcagacgcatctttcaattgtcaagtgattgtatttaaccacaatttcttctcatctctaaagtcagcatcaatggctccgaaagcggcagagaagaaaccggctgggaagaagccagcagaaaaagctccggcagagaaattaccaaaggcggagaagaagatcaccaaggaaggtggaagcgaaaagaagaagaagaaatcgaagaagaacatcgagacgtacaagatctacatcttcaaggttctgaaacaagttcatcctgatatcggaatctccgggaaagcgatggggatcatgaacagtttcatcaacgacatcttcgagaaactagctcaggaatcatcgcgattggctaggtacaacaagaaaccgacgatcacttctcgggaaattcagacggcggtgagacttgtgttgcctggagagctctcgaaacacgctgtttctgaaggcactaaggcggttactaaattcactagctcgtagggtttatatctcttaattctctttccgcctttcgaatcgtttaggtgttatcgctttcttctacatctttggtggtaaatctttgaatgaaaagtttcctttgttaatgaatatcgttttcttcataagaacaaaaaattatttgatcggtgatcaatatcttcttccgtttctgagggttttttggcctttttttctatccataactcttttggttcttcacgattccactaatttggtggggagcaacactagttatattttgcagagatttgtgggcacaatggtaaatcatatacttgagtaattatgttaaagaatgtttcactttaacaaaatcatactgatccatttggttttatcttaatcccttgatttaatcacttcatggtgatttctaactgtgtttagtgatgacgatgttgatgattgatgtttaaggttttcacttttcagtgaacaaacgttacaactgggcctatttatcattcgtgacccattttttccctcgtgatcgggctctagcgggaaaaattcagacacataaaataagagtattaaacacgagacacgtgtatatttctgattcgctccgagtaaggtggccacgtcttcgtctccctagttgacctttctttgcatttctatcttaatataaaaaaaactcgtttgatccatccgtcttctctcagattagctttttaacatcttggctgggtttcgtgtgatttcgttttggatatggttgttcggattcttgttaccatgattcggctatagtgtttgtcgcctctgattgtctcaagcatcgttctttactgatttttagatagctctgagatctgtctctgcgattcgtcggatttgaattcgtttttttttttgggtagctcttggatttcttcttctagggtttccaagaggatagagaaaatgcgggtgtcctctgagatactccttctttctttggttccggcgttgactttttatcattctggtttaagttctaatcgtttgaaacctcttcaaaagagtgattggcgtggtaatcttagttaaacaacaatttctctgtttttttgtttctccgatctcttcagatcttttcaattttctcttcggtttggtttgttttcacgcatttcctagctcggagtaagctaatcgaagaaaacaagcttgttattgatcgatctttcggtttttgttttgacgttttgtgtgaacgaggtaatttggctatatgattttttggctaaagtgttgtttgagctagagttctcttgttaatggtatttgaatttgtgtttgttgcagttacttttggatatgagctctgtctgtggtgggttggatttcaaagatgcagagagcagctctgcttccagtcccattatatgttctactggcgtaaagcatatctcttgtgttggatctgatgatgctcaagagtctgatggtgatgatagtggttatatacaccaaactgtgattgaagaatccaaagacaaggcgatcagcgaacccatccctgagtctttacctctcaattctttggatgatgaaagtgaagataagaaccttgctactgcattgcaagacatgttctctgagagtgtaagtgaccctatcttatttcataacactggtcgctatctttatagttgttgcgttttttctgttctattgtcttttgttctttctcctgtttagaatacggtgtggtctgtgctgatgtcaagtttctatctttgatcacatatataattgaacttagatgttttgcgtagctctaggcttgtgatcgtggctgtttcaatcatatgtcggtagttgcttacaacatctagaaccaaccttttagtctttagtggtagatatacaagaatgcgaaggagtaacattacaaatcatccctggccaaagcaagaacatagcttaggttttatgatccatgaaataatacaaatccttagattttggctgtgtgatatatatatatatcaatgtttggtgcttataaatatcttttctgtttatgatatatgtagtagagaaatgctgtgtttatgttggctgcttctgatttttgttgttttttgtaatccaacaacagatgagtgtggttactctgattcctgccattaaaggtggtcgagagaagcatggcaagtcactcgagaagctcagtgtgtcatgggctgaagatgtgtatgatcctcctccctccattgtctctcacacaagaagcaagaaacagcaaccgcagaaatcaaagagcaaagacaacctgaagaagaatggaaagaaaggacaaaagggaagcagcaattcccgcagcagcaaagacaagaagcagatttcttcacgcagcagcaaatacagtcgtgataagtttgattggacaacacaaatgtctgttctagctgcatcttcttgaatctgtgtggtatgaccaaggctcttgcgtcttccttgctcttgtctctctctctctctctttcttgtttataaataaaagatttgaagtgaaaacttttctcgagtttcagaacgactattgttgttggtacggaattgattttgtttttactcaatttaccacttttattgtgaagtttttccctctctacttgttcctttatctataatatagctgataattttgcaaaaagttgatactgctaatttagtagagcaaattggatcgtagttcgtagatttcaacccttaatttgatggaaagtgcacaagaaataatatatcagttcaagcaaaaccatacacagtacagaaaggaacaacattagtattatatgccgacgactttactatatttgcttctttttacttctttcctttacaaaatatttcactagatctgaaacctctcctgtgtcaactctaaattctaatatcgtctttgttaagggcttgtacaaaaaataacagaggtacacaagaaatgatccttctgcaaaaagaaaacaaagagtgggtttaaaaggggcaagagagcaaaaaaaggaaagatcccaaatcccaaaatccggatgaagcttcaaaaaatcttccatgaaagatgatatcagatgattgaagttgattctgaaaaactcggtactttcttctcgagcatcgatgttcccttgaagattgttagttgcacttctctctggtacctctgtaactgtaaacacaaacaccattgttaatcctcttttaaccatttttgtaaccagactgcgcaaccattaaagatttgatcaagtcaaaagattaatcatgaaagcatttgccaggaaatgtcccaggccaaactttacgtactcgatgttcagtcatctttgtgaatccaaatttatttgtccagatagactcagcttcttcagctgctgggagaagcaagttctcaacattcagagaggaaagaagattctcaacgcaagcaaacagcccttgaaagtagccctatagaaccattaaacaaattggttttgtcacaagttataaaacaaacaagcgaatccgacacagcaaagaaacatgggatgtacaaaagcttacccttccctgatactctcggcttgtagctacaataggaagttctgcaactttctgaccaaatatcctaagcagcgcggcagaaacaactagggaactaaaaacgcagcaaaaaacatttagaaagattgagagatggtaaaacaacaatacagagagaaagataaatgcatcaagaacaccagacatacttcaccatcaggaccaagcagtacattcctccaaactcctggccagatatgtttctcctgcaaacatgttggaagaattaccaggatgatcaattactattaacatttgaatgaaaaaggaacttgaatctgagtttatcatagtacagcttacccatagaccatgacaggaatgagatcacgaccagactttgccacaatgggatcaaaacactcctgaaaagtaaactcatttgctatacatgtgtttataaaataaattcgctgtacaatgtacatgtgtgtaagaaataaatttacaagccagataaaactcaaaatgatgtgagcacatttataaattgaggcataccctgaaaatagtagctgctcgtgaaagtaagggtagatgctctgggtatcgactttttccactaagcatcctccactccacagtatttccattgtcaatatatattcctttttctctgtactttctgcttatcgtgtctaacaaaagcgtgggaatagtttgtggcccacatgaagcagagctttgaagaaccctgtgaatcctgctgcagtcactacagcagaaccatttatcttgggggattccctacagcaatcaggaaagaaatgagacaggtttaatgaacatgtgaacacagaccacctatattacatgacttactttcaaatcacaaagctcattttccctgagacaaccgacgtggtactctttctcgcacttcaagagcaaagaggaaaaatgaccattagacaagaaagacgtgggtaaagaaaatctggaataagaaaccagaaacaacaatacctggtcacagagaataactgtcctatcatcaaatttcccaatgctaaaatcatgcgacctatcagaaatgggggataatgaataagcagagtggagtacaagtatattcgcattcaaattaaaataggtatacaaccaacctgcagaacacgcaaccaccaatttcgctttctggtgctttaacaactcttgtcagtcttataactatgggttttaaattgggatcactagcagtggctattttacaagaggtaggtccatcattgcagcttgaacagtaccaagtaccttcaggcattgattgaaatttcaagcatgctgcatatgaaaagggtcaccaagtattagaaccggagaacaaccttagagctaataccaaaacaatgctaattttgcaaatcatctttaagaatttatcttagaacttaaatggaaagaggcaaatatcagtaattcctttttcattatgcttaggaaaattttcttgaaatatgtgctcaagagattaagttgtagattcgccatagtaagtagaatgagcgagcaagtttactactatcctttagcagtaacgaatacacacctgtatgaaatgcttgaggacatccagcacaaagtagcaaatctccaccattgccacaaatagaacacatgtcatcactgtcaccagttgtaatgacatggcccccatccgccaatgacacagctatatcatgcaatgacaatccggaagatatgtggattcgacgataactgcaacagaaacagaaacttcagatatgtcttacaacattagtgcaaaaacacatcgtaactagataactcacggttgtcgtctaccagccattccagcatgtgcttcgaattgtgaaggactaatctgtggttaagaaacacgataaatatctgtcattatacttggaaaagaaaatgagtctaacggccaatttacatagtcactgcatccagcatgttacctttgtgtcgcagcagctacatactataccacttccttgcttgtaaccctgcagtagtttctgcgagaaaaacaagtgtcagcaaaagcagtcaaacttaaatttgcaacaagaataaacagagttactcaattaagcccacaaataacagacctgtgatttcacatagtaagccaattcagtcccatccggtagcccatttggcaaaaacagcaaccgatgtaaatcattgtccctataaagatatgattgcaattatttatcatcaccctttagagcatgaatgtggacaaaagacacccaaataatgagaatcacaaaagcaatacaaacctcttccatttaccgcctccagaaactttcttatggcaacccataccaaacatatgagaggtaagcctacagtattaacgaccaagtaaattttctatgttccttaaacaaattgtcataggtaatactcgagtatcaatatctaagcaagaaaacttgaggaccgtacttcttagcttttggcttatgtgcgtgtcgagtgtcctttgtacagattttctctctaaaataattgtcctctggaaaacatggagtagagctttgactctcatcaagagaccaaccagaaccaggataactgcaactttcacaactataacttagaccatgtcaaccttcttacaaaataaacaactagataacaaaggatccaagtgtcagctgaatgcctgaatgtcatcttcaattacaaatctttggagatttcagatcaagtaacaacacaagtaggaggtcaaagtacctaacaagtgattgaaacgaatgatccatgatatggttgctatcatcttcagtcatattcttatcttgctggaaacttcctgaagaacaaaatagcaagtcagctatgtccatcagaaagtaaaagaatacacattacaatccagggaaagcacttttaaaaatgcagggagatttccacgcaaacaatgcagactaaatccaccaagcaactaagatacctttccaagcctgaaaaccctcctcgctcagagcagaaccagccactttccttatcacctcctccaaaacgtcagggggagcaatcctcagctcttgaattacgttataaaccggccgtccattctccagatatatgtgattattagggtgttttgtttttccaccagcatgccgctcgaactcatatgcacctagaaccttcccacaaaacgaaatatgacaaagttaaaaatttgagaaattgcacttaagtacaaccccacaagaaaactatgaagaatgacaaacttactttcgagaaatcgcacgcagtacagccacacaaatacccacccgagtggattatcccttgaagctctctctaatgaccacaaaaagtaacataagaacatatatatgagaatatccaaactaatagcaggagaaaccacaaagaacagaaacttacagcagctgaggttgaaaggtacttcacccgagcaccatcgagaatccccgtccccaatagcttcttcacattagataggaagttggtagagtcaatcttcttcaacattttcacacctaaagttgaagaagctacattggaaggataaccctcccaagtatgctcttgaatcatgggcaaatcacagaaatcctcatttcgtttactgagcttaaatgtgattttcgttatcccagttgtgctaagatgctttggaatctccctttcgaaacttgacggtacagcatcactattagctagcgatgaacagtattcactgtgtttctcatcagttatagtctcataggaaccagaacaagacccgacacggtcaccagaactcgatttagccggattactagtgatatcgcgaaaactagaggcgttatccaccaccggagacgggactgggtttgatatctccgacttcatgtcatcatttgaaggttccttggtttgtctcttgttggaggaataaagctcttcttcgtctagattatcttgttcaaaacaaagacggtctctcttcaaatccttcttcgtttctgaattctctttcgcgaaacaaactgttgcttctcccattgtaaaatttctcaagaaattagcacttgtactgtgactgagattatctctgagatttgtaaggcttaagaaacaattcgaattccaagttttggggtacactgatattgcaaacccgatccgtaaaacacgtttgatggtcccaatccaaatcggagaagaaactctcttgtgtttgaggatttttatttttttccctcagaagaaatcgaaatggagaaatgtaccgatctagtaaccctaaaatttacatatggagatgattaaagtcgaaatattcacagagatagtggtaagaacaaaacggggtggaaaccctaagctcgaccagaatcgaaagttgggaagagaactttgtggatctaagatttgcagaaaacgattagagaaatcgatttcgaaagaaatccgaacaaggtaagagaagaggaaacgaattagggttagggtttccggaagtgagataagagagggaaaagagagaaaatagagggaacgtgtaacgcggcaacgaaccagaaggaagtaatgctttgtttagcggtccacatttaacttttaaatgagagagaagatgaccaactattttaaattaataaaacagattttgatggataatattacagatttttaaaatatcttattggtgggaaatttatttagcgggagaactgaaattttcgtttctagtgtaacgtgttgcgttggattgaggtgacgagttcgactctctacatcacacattcttttaaaaaaatcttaaatttacaaaacaactgtcctaatttttctgtttgtttttttttattggcttttttagccttcaaaatttaaaaggatcggctctgtttaaaataataagttatcattaacagtcattttttccattcatattggttaatgtaacttgagataatatcatgttttcagagaatatgtagacaacgtagtagcaaagtcactttagagtgactggaattgttctctctgtggctggaattaagtagattcgttggcaaatgtaacggaatctggtattagctatgaagaccaaaggtacatatctatgtagattaatgtataaaggtttttatttaataatgaaccctttctcacccttcttcaatgcatatttttgatgatagtaagaattagaggtatcagagaatgtagaatcctatgtggatatggtaggtatgatgatctcaaacgagaaaatcctaagagatgttacaagaggaaacaaaagagattagacctaagaagaagtttaaagcctgatatagtccatgaagtttggatggtcaaagagaggaacaagacctatgtaaagaaataagacaaaggttgcattctatacggtaaaacagagttaaggtgctagaagttgaaaaggaatttttgtttctaggatcttacattgttaacacgataaattattgtccatatgattgatattacctttttacctaaatagcgaaaataggtacaaagcatcaagaccaaatagaaatccatatccttaaagcttaagcttagctttagattagagacctatataataagaaatgctgatgctaaatatcaacgcttacaattataacaataatgagtatggtccctcgatggagttccacagttgtagcaaaaagccaacccacacctgccaaaatgtgtttaaaaagatatataaaaacaatgttttttaaaaacactcttgttaagaagaagaagatacatatatatacctgcacttcatgtataagcaaccctgagatttctcaatatagaatttgcaagaaggacatcttttccatttcttttgctttgccatcgtcgcaagcaaaatatcatctcttcctctctcgttcgccgctagcttctgaaactcctcgcaagtcatctccggatgccactgagtcccacactccacacacaccattctatgacaatgaggacactccgaatctttcatctttacttcactctcttctaagaaaaccaaagcagagcaatccttgtaaggacagtagaatttcttcgaacgcatcactactgcttcacacaaagcatcaccccaccgatcaaaaacctctttaggcaaaatctgacgacactgatctggctcgagccgaccagaacaaccagagacaggacattcgattgagagaatgttgtcttgtaatttagctgctatatatttcgaaacacagtcgttgcagtagaagtgagagcatccaccgatacgaaacgactcaattatggattttgaatcaacacatatctcacagtcgaaagtcgccgtctttgacgaagaagactgacccttttctctgtggattggtggtgcgaaacagaggattctgatatcatcgtcttcatcatcgtaaagatcaagatctatgtaaattggagattctgacttgattacggttttgtgaggagggtagacccagagacgttgaagtttccgatcacgatcgtaattctcaacggaaatagcatcacgctttgtggaaccacgtgcagagagaggaggagtggagaagatgaaacaatcggaattatcgccgtcgtcgtttacatctccgggaagatcaacgatcactgcgttaactgactgtgtcgccatttcaaaaatgattctaattaggtttcgtccacaatcagaattagggtttatgaatcacttactactttttgctcttttgcattgaatcactttccattttccaaagcgtctcactttttggcttactgctaaaaaacctaaatcgaatttttaataattgtccggttcacgaacgaaccggtcggttagcaaaaaattgtaatccttaaacccattttgttgcttcactctcatcatcttctctggaaactgaaaactatggctttctcttcatgtctcaaattctatccattttctatctctcaagctgtaaccctaactcatcattccttctctctcaatctaactcctccttcttctaccatctccttcgcttctcctcactcagcagctctctcctctaccgatgtcaagcttctcgactcactccgtagccagcctgatgattccgccgcacttcgtctctttaatctggcctctaagaagccaaatttctcacctgaacctgctctatacgaagagattctccttcggctaggtcggtctggttcgtttgatgacatgaagaaaattcttgaagacatgaagagttccagatgcgaaatgggtacttctactttcttgatattaatcgagagttatgctcagttcgaattgcaagatgagattttaagtgttgttgattggatgattgacgaattcgggttaaaacccgatacccatttttataaccggatgttgaatcttctcgttgatgggaatagtctgaaactcgttgagatttctcacgcgaagatgagtgtctgggggattaaaccagatgtatctacgtttaatgttttgatcaaagctttgtgtagagctcatcagcttagacctgcgattttgatgttggaggatatgcctagttacggtcttgttcctgatgagaagacatttacaacggttatgcaaggctatattgaagaaggggacttggatggagctttgaggattagggaacagatggttgagtttggttgttcatggtctaatgtgagtgttaatgttattgttcatggtttttgtaaggaagggagagtcgaagacgctctcaatttcattcaggagatgtctaatcaagacgggttttttccggatcagtacacgtttaatacgttagttaatggtttgtgtaaagcagggcatgtgaagcatgctattgagattatggatgtgatgcttcaagaagggtatgatccagatgtgtatacttataactcggtgatttcgggtttgtgtaagcttggagaggtgaaagaagcagtggaggttcttgatcagatgattactagagattgttctccgaacacggttacttacaacactttgatcagcacgttatgtaaagagaatcaggtcgaggaagctacggagcttgcccgtgttctcaccagcaaagggatccttcctgacgtttgtacatttaactctttgatccaaggtttgtgtttgactaggaatcaccgggttgcgatggagttgtttgaagagatgaggagcaaaggatgtgagcctgacgagttcacttacaatatgctgattgatagcttatgctccaaagggaagctagatgaagctctgaacatgcttaaacaaatggaattgagtggttgtgcacggagtgtgataacttacaacactttgattgatgggttttgcaaagccaacaagactagagaagccgaggagatatttgatgagatggaagtacatggagtttcaagaaactctgttacatacaacacactcatcgatgggctttgtaaaagcaggcgagtagaggacgcggctcagctcatggatcaaatgattatggaaggacagaaacctgacaagtacacatacaactcgcttttaacacatttctgcagaggaggtgacataaagaaagctgcggatatcgtgcaagccatgacctcaaatgggtgtgaaccagacattgtgacctatggaaccttgataagcggtttgtgtaaagctggtagagttgaagttgcaagtaagcttttgaggtcaattcagatgaaagggattaatttgacaccgcatgcttataatccggtgattcaagggttgtttagaaagaggaaaacaacagaagctataaatttgtttagagaaatgcttgaacagaatgaagctccaccagatgcagtatcctacagaatcgttttccgtgggctatgtaatggaggtggaccaatccgtgaagcagtggactttcttgttgagctgttagagaaaggatttgtacctgagttttcttctttgtacatgttggctgaaggtcttctcactttgtcaatggaagaaacactagtcaagttagtgaacatggtgatgcagaaagctagattctcggaggaagaggtttcaatggtgaaaggtttgcttaaaatcaggaaatttcaggacgctttggccactcttggcggcgtcttggacagtcgccagccgaggagaacctaccggtcaagatgatagatacctttagaaaaagtatcgttcccaatttcgtagaagatatgtatgatgttatgaatatgatttcctataaagttttggggtaattcatccatttaatactatgttcgaagaccaacatgcagaaacaaaacgacaatggagtgtgcggtgttaggtgttcctcattcgttgggtcatcctctctcgtccacttctagtctctatggtctctcgtccttactgtttgtatatgtattatgtaggctccgattgtttttggcattgatgctagcgttttcagattattgactataagagaaaaacctagacatgatctcttttattctccggttaacttggcagatttcagaccaacccggtcaaatcctgtggtcctatggtcagtccactatgcttcaataactatcctcggtcgtaatttcaaccacaaccacaagcgtcgtgtcctcaacaatatactgtatatgctatagtcattattgttggggtcagtggggttccgattctccactaaaacttttctggtataagtgtatgtttgttcaatcaagcagatcagtccacatatgtatcagtagatgacggtttcgtcactcgtagataaattatcattgccacttgtatcactacttccacatccactagtggattttgtatggatcacaccaaaacattctttgaacctactatatacttttaccctttatagaatagtgccaaaacaagataatttatgcgtttcgagaaccaaaacattatcacgctacgaacaacggaacaaggcaattttgagaaaaagaatgttcagttgtggttacagttgaagataaatttaaattgtgaaagactaaaaccgaaaatctttagcaaacaatcggctatggatcttgtacaaatacgttactccttaacacatgaagaaaagatatcaagaaaccgccaacttatgaagaaaaacgcagacctgtgggtatggatgaacatggttttaagatgaagaccattcttatcttctattcagaccacgatggtcccagccttaattaattatacacttctcaccggcattctgaatcacctatccgaagaaagatgaatataacgttactgctatatttaactgttaaagctacatgaccttaaaggttgcttacccttagagaaaacctccaccagtccaagcggtgtctgatttcccgttgtgaccagcagatttcttatcgcctgcactttggtaatgaccatcgaacccatcatctttggcatcatgatcatcccaaccagtccaaccatcatcatcattagaagcagatgacccctttggagctactgcttctgtcttcttattctcattctctccccaactatcccaagaatttgaattc

SEQ ID NO: 102 - DNA, 112929 bp, Arabidopsis thaliana
gaattccaagttttggggtacactgatattgcaaacccgatccgtaaaacacgtttgatggtcccaatccaaatcggagaagaaactctcttgtgtttgaggatttttatttttttccctcagaagaaatcgaaatggagaaatgtaccgatctagtaaccctaaaatttacatatggagatgattaaagtcgaaatattcacagagatagtggtaagaacaaaacggggtggaaaccctaagctcgaccagaatcgaaagttgggaagagaactttgtggatctaagatttgcagaaaacgattagagaaatcgatttcgaaagaaatccgaacaaggtaagagaagaggaaacgaattagggttagggtttccggaagtgagataagagagggaaaagagagaaaatagagggaacgtgtaacgcggcaacgaaccagaaggaagtaatgctttgtttagcggtccacatttaacttttaaatgagagagaagatgaccaactattttaaattaataaaacagattttgatggataatattacagatttttaaaatatcttattggtgggaaatttatttagcgggagaactgaaattttcgtttctagtgtaacgtgttgcgttggattgaggtgacgagttcgactctctacatcacacattcttttaaaaaaatcttaaatttacaaaacaactgtcctaatttttctgtttgtttttttttattggcttttttagccttcaaaatttaaaaggatcggctctgtttaaaataataagttatcattaacagtcattttttccattcatattggttaatgtaacttgagataatatcatgttttcagagaatatgtagacaacgtagtagcaaagtcactttagagtgactggaattgttctctctgtggctggaattaagtagattcgttggcaaatgtaacggaatctggtattagctatgaagaccaaaggtacatatctatgtagattaatgtataaaggtttttatttaataatgaaccctttctcacccttcttcaatgcatatttttgatgatagtaagaattagaggtatcagagaatgtagaatcctatgtggatatggtaggtatgatgatctcaaacgagaaaatcctaagagatgttacaagaggaaacaaaagagattagacctaagaagaagtttaaagcctgatatagtccatgaagtttggatggtcaaagagaggaacaagacctatgtaaagaaataagacaaaggttgcattctatacggtaaaacagagttaaggtgctagaagttgaaaaggaatttttgtttctaggatcttacattgttaacacgataaattattgtccatatgattgatattacctttttacctaaatagcgaaaataggtacaaagcatcaagaccaaatagaaatccatatccttaaagcttaagcttagctttagattagagacctatataataagaaatgctgatgctaaatatcaacgcttacaattataacaataatgagtatggtccctcgatggagttccacagttgtagcaaaaagccaacccacacctgccaaaatgtgtttaaaaagatatataaaaacaatgttttttaaaaacactcttgttaagaagaagaagatacatatatatacctgcacttcatgtataagcaaccctgagatttctcaatatagaatttgcaagaaggacatcttttccatttcttttgctttgccatcgtcgcaagcaaaatatcatctcttcctctctcgttcgccgctagcttctgaaactcctcgcaagtcatctccggatgccactgagtcccacactccacacacaccattctatgacaatgaggacactccgaatctttcatctttacttcactctcttctaagaaaaccaaagcagagcaatccttgtaaggacagtagaatttcttcgaacgcatcactactgcttcacacaaagcatcaccccaccgatcaaaaacctctttaggcaaaatctgacgacactgatctggctcgagccgaccagaacaaccagagacaggacattcgattgagagaatgttgtcttgtaatttagctgctatatatttcgaaacacagtcgttgcagtagaagtgagagcatccaccgatacgaaacgactcaattatggattttgaatcaacacatatctcacagtcgaaagtcgccgtctttgacgaagaagactgacccttttctctgtggattggtggtgcgaaacagaggattctgatatcatcgtcttcatcatcgtaaagatcaagatctatgtaaattggagattctgacttgattacggttttgtgaggagggtagacccagagacgttgaagtttccgatcacgatcgtaattctcaacggaaatagcatcacgctttgtggaaccacgtgcagagagaggaggagtggagaagatgaaacaatcggaattatcgccgtcgtcgtttacatctccgggaagatcaacgatcactgcgttaactgactgtgtcgccatttcaaaaatgattctaattaggtttcgtccacaatcagaattagggtttatgaatcacttactactttttgctcttttgcattgaatcactttccattttccaaagcgtctcactttttggcttactgctaaaaaacctaaatcgaatttttaataattgtccggttcacgaacgaaccggtcggttagcaaaaaattgtaatccttaaacccattttgttgcttcactctcatcatcttctctggaaactgaaaactatggctttctcttcatgtctcaaattctatccattttctatctctcaagctgtaaccctaactcatcattccttctctctcaatctaactcctccttcttctaccatctccttcgcttctcctcactcagcagctctctcctctaccgatgtcaagcttctcgactcactccgtagccagcctgatgattccgccgcacttcgtctctttaatctggcctctaagaagccaaatttctcacctgaacctgctctatacgaagagattctccttcggctaggtcggtctggttcgtttgatgacatgaagaaaattcttgaagacatgaagagttccagatgcgaaatgggtacttctactttcttgatattaatcgagagttatgctcagttcgaattgcaagatgagattttaagtgttgttgattggatgattgacgaattcgggttaaaacccgatacccatttttataaccggatgttgaatcttctcgttgatgggaatagtctgaaactcgttgagatttctcacgcgaagatgagtgtctgggggattaaaccagatgtatctacgtttaatgttttgatcaaagctttgtgtagagctcatcagcttagacctgcgattttgatgttggaggatatgcctagttacggtcttgttcctgatgagaagacatttacaacggttatgcaaggctatattgaagaaggggacttggatggagctttgaggattagggaacagatggttgagtttggttgttcatggtctaatgtgagtgttaatgttattgttcatggtttttgtaaggaagggagagtcgaagacgctctcaatttcattcaggagatgtctaatcaagacgggttttttccggatcagtacacgtttaatacgttagttaatggtttgtgtaaagcagggcatgtgaagcatgctattgagattatggatgtgatgcttcaagaagggtatgatccagatgtgtatacttataactcggtgatttcgggtttgtgtaagcttggagaggtgaaagaagcagtggaggttcttgatcagatgattactagagattgttctccgaacacggttacttacaacactttgatcagcacgttatgtaaagagaatcaggtcgaggaagctacggagcttgcccgtgttctcaccagcaaagggatccttcctgacgtttgtacatttaactctttgatccaaggtttgtgtttgactaggaatcaccgggttgcgatggagttgtttgaagagatgaggagcaaaggatgtgagcctgacgagttcacttacaatatgctgattgatagcttatgctccaaagggaagctagatgaagctctgaacatgcttaaacaaatggaattgagtggttgtgcacggagtgtgataacttacaacactttgattgatgggttttgcaaagccaacaagactagagaagccgaggagatatttgatgagatggaagtacatggagtttcaagaaactctgttacatacaacacactcatcgatgggctttgtaaaagcaggcgagtagaggacgcggctcagctcatggatcaaatgattatggaaggacagaaacctgacaagtacacatacaactcgcttttaacacatttctgcagaggaggtgacataaagaaagctgcggatatcgtgcaagccatgacctcaaatgggtgtgaaccagacattgtgacctatggaaccttgataagcggtttgtgtaaagctggtagagttgaagttgcaagtaagcttttgaggtcaattcagatgaaagggattaatttgacaccgcatgcttataatccggtgattcaagggttgtttagaaagaggaaaacaacagaagctataaatttgtttagagaaatgcttgaacagaatgaagctccaccagatgcagtatcctacagaatcgttttccgtgggctatgtaatggaggtggaccaatccgtgaagcagtggactttcttgttgagctgttagagaaaggatttgtacctgagttttcttctttgtacatgttggctgaaggtcttctcactttgtcaatggaagaaacactagtcaagttagtgaacatggtgatgcagaaagctagattctcggaggaagaggtttcaatggtgaaaggtttgcttaaaatcaggaaatttcaggacgctttggccactcttggcggcgtcttggacagtcgccagccgaggagaacctaccggtcaagatgatagatacctttagaaaaagtatcgttcccaatttcgtagaagatatgtatgatgttatgaatatgatttcctataaagttttggggtaattcatccatttaatactatgttcgaagaccaacatgcagaaacaaaacgacaatggagtgtgcggtgttaggtgttcctcattcgttgggtcatcctctctcgtccacttctagtctctatggtctctcgtccttactgtttgtatatgtattatgtaggctccgattgtttttggcattgatgctagcgttttcagattattgactataagagaaaaacctagacatgatctcttttattctccggttaacttggcagatttcagaccaacccggtcaaatcctgtggtcctatggtcagtccactatgcttcaataactatcctcggtcgtaatttcaaccacaaccacaagcgtcgtgtcctcaacaatatactgtatatgctatagtcattattgttggggtcagtggggttccgattctccactaaaacttttctggtataagtgtatgtttgttcaatcaagcagatcagtccacatatgtatcagtagatgacggtttcgtcactcgtagataaattatcattgccacttgtatcactacttccacatccactagtggattttgtatggatcacaccaaaacattctttgaacctactatatacttttaccctttatagaatagtgccaaaacaagataatttatgcgtttcgagaaccaaaacattatcacgctacgaacaacggaacaaggcaattttgagaaaaagaatgttcagttgtggttacagttgaagataaatttaaattgtgaaagactaaaaccgaaaatctttagcaaacaatcggctatggatcttgtacaaatacgttactccttaacacatgaagaaaagatatcaagaaaccgccaacttatgaagaaaaacgcagacctgtgggtatggatgaacatggttttaagatgaagaccattcttatcttctattcagaccacgatggtcccagccttaattaattatacacttctcaccggcattctgaatcacctatccgaagaaagatgaatataacgttactgctatatttaactgttaaagctacatgaccttaaaggttgcttacccttagagaaaacctccaccagtccaagcggtgtctgatttcccgttgtgaccagcagatttcttatcgcctgcactttggtaatgaccatcgaacccatcatctttggcatcatgatcatcccaaccagtccaaccatcatcatcattagaagcagatgacccctttggagctactgcttctgtcttcttattctcattctctccccaactatcccaagaatttgaattctgcgagttgttgtaatgaccacttgtcgatgatgattgtggccttcctcctccaacagatgaattcgctgctttgttcccatttccaaagttctggtagtaaccattgccctcattttcactctgctgattccagcttgttgatccttctttagtaaactcttctaccttctgtgtcgccattgccattactcctttcatgattccccatgtcctatgtcctatctctgttgtcttattagcaactacatttacagtttcactcaccttgtgatcatacccaccttccttcacctgcaataaaatggtttcttatctgattttgactccacttttccaaaactctattgccagcagtattatggtaaacaagaattctacagagagcatctaagaattgtgctttctacagagttaaagattctcactagacgtgtcgttgaggcatcaagcaacgcagtaactagatatttcacaaactctatgcaaatcaagcagagagtacagatagttagttaccttggatgtgaactccttggttcctgtttgaacaacactagcagctgactgagctgcagatgcagcaaccagagacagtcttccaaaacccttagcaatttttaaacacgaatcaacacacaaaacgtaattcaccgaattcaaaaaggaattgcaaaacattcattcaattcacctgagaaacaacggagaaaacatcatcctgttgattatttctcggtggtggagccgagcttgatccgaatcctacatacttgccaccttgcgaaggaggaagaccttcaggcttagactcattctccgccattctcctcgcgaagaaactctctttcccagcggcagaagcctcaagctgcgatcgcgtgtagatatcctccgacgactttgacttcacatgtgcaccttctctatttcccgatgccctgaaatcattcgctgactgattccttctcatatcagatttgtaagaatcatcgttatcccaactatcccatcctccattgttattgttattgttgtttccgtaaccgccctgagccaacggaggcttcttattcgcttccttaacaactggcggatcattccatggtctaccttcagctaaagcttggatccggtcacgatacacagaagcagcgttcgaattgtacttggagataatatctgtctccttagcgattccgtattgcgcgaagaatttgttgagccgttcgttaccaccagcttccattttcttaatctggatcgcagaccatgaatccatggttacggatctgacgaaggatatgtgaacgcctaagcctcggtgtttcccggagcattccaaacacatgaagattccgtacgaaaccgacgcccattgaggattcttctgagcgcaatcgacacataccttgttttcaggctgagattggagagttcgtaattgtctcgtcgccgccatgtttcccggagctccgaacgatgatcaatccaacctgaatcagatctaatccaaatctcgcagacttgtgctgctcagattgatgcgtttttttttcttttccgttttttctcttcttcctaataaatgttcggggttttttttggtacgtgtctctggcacgtgagaggtttccggtagtttctcaaatggcccaaatgataattgtatttactatttagtccaaatatgaaattatatgtagacgatgcccaagatgcccaatcatggttatttatatgtagacgatcttacaattcttactcaagagctatctatatattgtagataaactacatcttcaactaaccactttaaccatgcattaagccgaagtttaagtactagatcaatttatttattgttatcatacatttgtgtctccgttaatacttagagaagactcactaacaattttggaaaccgtaatatcctctacatgagctttgttgtgttgttgaaccacaaggattgatggaatgatgtggttgatcgaagaggcgagcacgtctccgataggacctaactcaggatgttcagcttgacgctcagctaatgccgccacctcggccgacggtatcctccctcttccaaccactattagatcaaagtctttactctgtcctattgacagtatttcttcaatgatgttgtttggttccttttctttgtactccaccatttctttccatttgctcttgaagtcttccaatgccccttcgtctaattcctataattatttttccaagaaagaaagctatagttatatttgtcataactggtatataaacataggggatcaaaagagatttaccttttctttttctggatccacgttggttgttaaaaaggcatagttcttctccttgcctttagacggtgccggtcgtaaagtgacggcggtactcctcaacgtttctcttaccaaaaacctaataacggtaactttaacggccggatgctcagccattctcccgccgagctctatagactcacggtcatcaggcccaccaaagaaaatcacacaaaccctttcaaccacattcgacccatctaagctcaaagtttgggcctcaatggacccaagtccacggtctacaagaaccgccaccgaacacggcgcattcttcaaaaccctttggttaaccaatcgccaaccatgaccaacgttttccggtacgtttccatctcctcctccgtcttggtggtggtggctatgaccatgatcagcgttccatcgtttgtggaaaggtaaaatgatcattgtgaccctcttggtatctgccatgtggcaaatgtcttcgtgcattgtgggtaatggagagactgcggtgatgggccggactgcgacccggcctagttgacgataggcttcgaagcctcctatgacgttgctgtgacgctcaccatgacggtaacggtgaacgaaaggaagtccgtttttacgggctctttgcaccattatgattgacgaagaccgttccgttagttccatcagatgcatcacaaacagctttagccgtagtatctgccaaaacaaatacgactttttaaattattaaccaagattataaattattacccagctgatttttaattttaactatacaaaatgtgtgtaattatacgtaggatacattttcattgagcatttcaatgatatcttaattttctgatataactcttatcatagatttacaaatttaaatatagattattgtaacgtaaaaatataaaagaaaggtaatttaccttggtggttcggatggactcgacgagagagatgagggaggagacattggctgggccgtggaggcaggctaggatgcgaagctcttccttggtggagtcttggctcgccgacaagtcttttagtttgcggtgggtgccacgtgccggcttgtaaatggccattacagtaggcgtcgttatgaacgttgtgaagagtgccattagcactagtattgcaaacgtctcgtcgtttagtacctggttaaagtcaaccccgcgtacaaacagtttaattaaaaataaccacacttactacattaatgggtaatcattatttcactttattgttgcattatgaagaagatcataaatctgcaagtggatcagtaagtgacgattacgtaaacattggcccattcgaaaaggtatattcgtataaagttttcatgcagaaaaaaaaataaaaataaagttttcatgcatgcatatatatgactagtccttaattgatcagtttttctttattaccccaaaacaataagaaacgcctttataataaaagtgtagtatataactataatctttgttgggaagacacgtttaaacaaaaaattttatatactacatatttccagaagcattatagtataatcttgcacatatatttaagataaaaatgtttatttcggaggtgacaaaagaatcacggactaatgttttgaagctaccattgctaactgcatcatcttcgatgcacatagtaaacttagctatcaaattgcaaccgtgtccatcagtctatgattaatgaactgcagatttgtattatggtgactaatattactatacaacggttgagagcaaacctagctatcaaattgcaaccgtgtctattatagtgatagtaaacctagcagcccggctcaatattttattgggccctgtgctacaaacaaaaatagcccttaaatctaaacaaaataactttatgtgacatgtgtttactgtatttttattttaaacttattatcttttattttggtggttgttttttttgtagttttccccttaaaaaaaaaaaaactgcaaactagaagacttaaaattaagaaaaaaaaatgaggaccctgtgtactagcacctctggcactcccctagagccgggcctgcctagctatcaatttgaatttatacaacggttggttaatgttcaaataaaacataagcaattttactattccggatccccgaccagcctaccaatattgagcggaccggacgcatatacacatggatccaactagaacctaaatttttaaatatatctaaacaccctaaaataaaggtatagatgcgattaaatcaatataataatcgtattttgttttatatgctttatccactaaacatgatcaaataactttagtgttactaggttttttatatttataatattcatcagataactaaaagcgtaaacaagaaccttaaaaaatcagaaaaaaggaagacaaaactaacctttttctccttgcctatgttgagtacaatgagctccactaaacctttagtattcatcaagaaaccaagtgtcaacgcctctctcgccggaactttaaccatcaccgccacaacaaaagttccgactatcttcccggcacaagccgtaacaacaacaagacccaacatcccccacgactcagctcctctaatcttagccacgtcagtcttcaaaccactcgtagcgaaataaagcggtaagagtaaaccggaaacaaaatcctcaattcgttcaatcaatcgctgaccaaactctccatctttcggtatagtcaaaccgaaaacaaacgctccaaaaatcgaatgaatcccaattaaatccgtcgcgaaaccggaaaccataacaccggctaacgtcaaacacacgtaagactcgcgtacgacgtcgttttcaggagatccacgtttcgcgacccatttcattccgggtcggatcacaaccaacataaaaaccacaaacccagcgcccgataacaaaacccacaacgacactaacggactctttttctctccacctccctcaccgccattacccgctaacgcaaccgctaaagcgagtaaaatccacgcggctacatcgttaaaagcggctgcagccatcgcggtttctcctatctgagtcgttaaaagcttgagctctgctaaaatacgcgcaagtaccggaaaagctgtgatcgagagtgcgactcccatgaaaacgagaaactcggcgtaacctggtttatccgcggcggtgtagagagtgttacggatcacaaacgcgactccgacgccggcgataaacggtagtgtaattccagcgactgcgattccgaaagcgcgtttgccgcttcgtcggatcgatgataaatcgagttctagaccgacgaggaagaggaagaagagaagtcctatgctcgcgacggattcgagtatcggcatactccatttcggaaatatacggtccatgtacgccatgtttctacctaaagccgatggtcctaacaaaatccctccctgaagaagaagacgatggcagaattgtaaattaagaagattattatggtaaaattgtaaatagttagtgtgtgtggggttagagtgtaatttttaacgtacgacaatctcggcgatgactttgggttgacggagaggtttgaataagacggcgaggaagcgactgacggcgatgattaacgccgtttggacgatgagtaacggaaaagcgaagtttaaaggattgtcgccttgccatactccgttagatgaggttttcacggaggttatgttgaagggcattttggggatttcaaaggactctcttatcgacgactttttttttttgttttgttctcgtctatatttggaacatgtgatatagttcaagtatgaagaagatatgtgaagaaatttataggcaaaaattataaatgtattggtttgaagattcaaaaaagtaattatgttgttacttgtaattttggtgcatctcacgtgtgactagaccttgagtggaagtatttggttttttttttttttcttatgatatttgtttttttagtagaaaatttaaaaaccattagattttgggtgctataattagaaaccatctatgtctttgaattgttcatgtttacaataaagtatagaaagtaaaaatctactcaaaaacaatttgtggttgctataactcattcttatcagttttatttcaagcaaaactaataacataaatttagtattgagaagaaaaaaagaaacaactcgtctcacagacggaaattgcaaactaaaataagagtggcttatcaccgaagcaggaatcatgtgagtcaaacgtgggacgcgagagatgggcgttgacaaatgctgcgtcggcgtggatgggttttacaagtgcaaccaaattgacacgtatctatgacttctcatatattccaaagtatttcgatataagttggcaatattttcattaaatagagctgttgatttttccaagaagtggtatctcaattctgcttggtatttacgactttcctaactttttatctagtttagattgttcgtcaagtttgaaataaaactgttgataatagctatgactatcatatacagtatgaaaaaattaagagttagattgtggcaaagagacatctgaaattgtagaaataaaggatctaaagcagtggactgcctcgaagatgctataaattttgtaatcacactttatttcgaccatttcatggttaagtaattatgtatgtttgtggtttaagattaatataatgatcacacggttttctattagatgttttggagcgttagttacttttgtgcatattatcttaaggatctctcaaatccgattgacgcgataaaaaggtcaccaaaagttatagactcgaaatccatattttctgacctacctaatggtcgaaatattagtccaagacacatatccaatggaaaaaaacttatttaaattttttaagagaaactacgtcaatcatattactttttaaaagtttagatagtgggagaattcacaagaatactgattacaaaaaaaaaaaaaaaaaaaaaaaaaaaactgaaaatcacgaggcgatcgttatttcatttccctttctatgaaatagatttggacttttcatgaaggcaagccaaaagtgccaaacaagtggtcctccaaattttgaggaacagttagttcaaaacatagcaagtttggtctcacccatctttttttacattacagctcaaagatagaacattaaaaaaaaaaagaaaaaaaaagatttatagagaagattcatgaatctagctagactattgtaccttaaattgcagctcaaagtcatattttgcatgttgatcagatatgtcataagagttatgtcaaatacacttgttgtatctctttgtagaaaataagattgctaatcctaataattttgttgacaaaaaaaagaaagaaaagaatacatcctcaatttataaagacactatagctttgacattgacgactcacacgcccaaataaggtcggcagagtgaaattgtctgtgaaatcatggtgttttaagttgtactggaacttgtgtatgaaacagtctatagcaataataatgaaaaagaaacaacacattttgctccatagcttttgtatttgtgtaaatcggaaagaaaagtggtttattattcatggtcgaaaaaatcagaaaaatgggtcgattagagaaaaaagtaattttcagtggctacagtataagtacagcgaactgttctaggtagagagtcccattatacaacaacaactcattataaaatttgacttcagtaacgactgattgagaatatgttaatgtacactaaactattgacattgatgtaattgtatatttttgtacaattacgttagtaatatggcgattgcacctgattggtgaagaatctatattctcttccagttaccctacactagaatttttcaatgaagttatcacttgacataatcaatttaaaaatttgatttcgagacttcgacgataaattttgttgggccactacaaaaggttttactgagtgctgactacttattataataggcccaaacaaaacatatatgttgggccactacattattagccaaaagattttactgtaacttattatgagcccatacggagcatttcacagggaaaatttaactaaacgcgaaagtggcgttacgattattagaatgatttcgtaataaacagaggattagttaaatcacgtttcgattactgtatatgattaaaaattaaagttgaagacaattctttttttttcaattcattcatcgtttaactgagaaattacaaatctgaaatccctagatgctgaaattgaagagtttacaaaatccgaaattgcaatccgaacgatttagccgccgaatccatacaaagttcgtccttgtctcttgagagcgtaaacgacgtccatcgccgtaacagttttccggcgagcgtgctccgtgtaagtaacggcgtcacgaatcacgttctcgagaaagatcttgagaacgccgcgagtctcttcatagatcaaaccactgatacgcttcacgcctcctcttctcgcgagacgacgaatcgcaggtttggtaatcccttggatgttgtctctgagtactttccgatgtctcttggctcctccctttcctaatccttttcctccctttcctcggcctgacatttttctcttgggaaattaaattcgaactaagaaaaagattatttgattttgccgaatggttttgattgattgaaatgaaaattgagtttgttatataggatgagacgacgagaagaggaggagtgcttgtgttttttacaaaactttaggaagttgtgtgtcgttggatctgagtttatcgacggtcgttatcatctatccgcgtgtttataatttaatgattttggaccgttggatctgtttgctatccgcgtcattatgcctgatgacatctgagccgttgatacgcaattggtaagattcatcaagttaaaggagcgctctgggaaagttgtgttttctttcacaaaattatttgcttcgtttggttaacattgtatgtgatagatatacatgtgattaaggagaatgctagttttgttctcccttgaaattaggttagttgtgtgtttatttgggaaaatagggaggattaagaacattgatcttggaatcaaaacttttgaggttaatgaaaatctgtagtgagaatgtgttatggttgatttaagtttagtcttcaagcaattttgatattttgagttaatttagagacttaagaggaagagaaaattgttaacatatatcatggacttcaatattaacccattgatgatctctatagctttcattgaaagaagttggtaaccaattcaattgatcatccgtggtaactgatattcataaggccgcctgatttttcaatattccaataaattcagaggcaaaagaaagataattgatcaaaagaggcaaatagtttaaaggcagagtcactggtctcagacaaaactctctttaagtccgatattctaacaaaacataattcgagaagcttaggaatcataataacgattttgcaacaagaaaccataactctttacgagcgattcacaaacttaagatgacgttcacttcttcttctcagttgcaccaccaccgccagacctgcgtgtaagtaaacaaagtcccaaaaatcagtaattactataaaagaattggtttttgaattgagaaaaacaaagccaacaataagcttgttcgattgttcagtttacctcatcttgcggagaacactggacatctcctctctctttcgcttggctctcttgtgggttcccaacttcctcttagcaaccttaagagcacgtttgtctttaccaaccttcaaaagctcagtgattctcttctcatagggagcttgaccagcaacttcctttatcaagtttctgataaagattgtcctcttgctcgttttctgagcaaatcaagaaacaataccacactcagatgcataaacaaacacagcaagaagattgccacaaaaatcataacgaaataatcaagagatagctatcaaatcgccaccggcgaatcatgtcatactcagtatcagaaacagatatgatagctcaaaatatggattaataatgttactaaacacatggacaataatgcatcaatattgaaagaaagaaaatggtttagcagaagcaaaatggtttagaaagtaatgaactacacattcacaaaggtgaagaattcgtcaagcctacaataacaaatgtctatactttatgagcccacaaagagatacatcacactatctgaacgaaactaaagcaacctaacatagtctagaaactactaaaatgaatgtttcaaaacaattttaacagaaggcaaaagtgaaacaacatactcctttgcgagaacgaggacgaggagctaattcacgtctggtaacaacatgtcccttgttcaacccaacgaacaaaccggtcttcacttgtggagttgtcatcttctgtaaatttcatagacaacaaacaaacaaaactttctattcaatacaaaatcaaattttacaagagacggattcagagataataaagagatgaagagagttaaatcaaaagggattgatagaagatacctaatcaatggatcgagctcctccggtggttcagacaaaagaaggacgccgactgaaaattacatttttgtatatataccagagagactcaagaaaaaaccctagtccagtttgggcttttattgggccttataaattttgggtcagttttgacaaagtaaatacaaggctatagctgctttgctaacgtgattaattatttaccatttaccaaaagccttaaccgaggccgagcgagaaaaaaaaacaaaaaaaaggtagagggcaagaacgtcatttccacaaggaattgaatcggaaaacgaggtgtgccgaattcgaagcctttggacccgtttttatacttttttacttgccattcgtttttttttgttcattggcctcatttgattacttgtttctttgatttctccttccatagaaccgaattgttttcagtctgagatttctcctgccgagagaacgattttaatctattttcctcggtaatgttatagcctaatttgtgtttttttctttttcctgatccggatatcgttattctgattgacaattgtcagtttcatcttctattctgtgaaattttgatttttttccgatctgtgatttcgtcattgtatcagcgtgcttatatgcgtttgaggcgtaaatgagtgtgtacctcatttatcatttgctatgttttttttttttaacagagatcttcagctgtaatattataatagattgaattgataacgtgattctggatctggaatatatatatgtcacattcttcttaggatttgattttgtctctctttggatattaatattcttcactcccttgaaaatgaatctgtttattataatgtttagatatattccttaccggcatttgttttagcataaatatgaaacatagcattgactgatttgtctttttattattcttgtttttttgccaaattggtctcatgtttttgcagagagtagaaaatggctgatggtgaagatattcaaccccttgtctgtgacaatggaactggaatggttaaggtatttctactaacgaacgttttcaaactggattacaaatataatctttggggatcaatctgaaccttagaaaatttcaatatgtttttatcatatgaacaatgtagttaaggtgattatgttgtgtgtttgacttaggctggttttgctggggatgatgcaccgagggctgtgtttccaagtattgttggccgtcctcgccacactggagtgatggttggaatgggacagaaggatgcatatgttggcgatgaagctcaatccaagcgtggtattcttacccttaaataccctattgagcacggtattgtcaacaattgggatgatatggaaaaaatctggcatcatactttctacaatgagctccgtgttgctcccgaggagcatcctattctgctcactgaagcgcctcttaacccaaaggctaaccgtgagaagatgactcagatcatgtttgaaacctttaacgctccggctatgtatgtcgccattcaagctgtcctgtcgctttatgctagtggtcgtactactggtaactccagaaattgataggctttacatgtttattctgtagattctagaccaagtcgtaaaaattgttgatttatgttgtaggtattgtgcttgactctggagatggtgtgagtcacacggtccctatctatgagggttacgctctcccgcatgcaatcctacgtcttgatcttgcaggtcgtgacctcacagatgctctgatgaagatcctcactgagcgtggttactctttcaccacaacagctgagcgtgaaattgtcagagacatcaaggagaagctttgctacattgctcttgactatgagcaggagcttgagacggctaaaaccagctcttctgtagagaagaactatgagttacctgatgggcaagtgatcaccattggatctgagcgtttccgttgccctgaggttctttaccagccatctatgatcggtatggagaatgctggtatccatgaaaccacctacaactccataatgaaatgtgatgttgacatcagaaaggacttgtatggtaacattgtgctcagtggtggaacaactatgttccctggaattgctgacagaatgagcaaagagatcactgctttggcaccgagcagcatgaagatcaaagtcgttgcacctcctgagaggaaatactctgtctggattggaggatccatcttggcctccctcagtaccttccagcaggtgaataataatccaatcaatttcctttcactaaacataataattccactctgcagctctgactgatcggtcttccgttcttgaattttgtagatgtggatcgcaaaggcagaatatgatgagtcaggcccgtcgattgttcaccggaaatgcttttgagcttgaagttaagtctgcttccggagaagccctgggggttttccagtttgtccttactgggtttttatcttcgttctctgctcttctttgtttttcttcttcaatattttcagattctggcctaagacattttgaagaatttacattatctgtttgtagtgttggttaaactgttgtcttgttccttttatttattttggatgacacaactgtgtttgagtgaataagaactcctgatttttccaagtttagagaggttatttgataatcttcttaatttagtctacctctaattttttaattcttttttgtcaatgtctacctgtaacttttatcattgtcggttttgtgttatgctacagtcatacgttattcttttactgaagaagaaaatattcatcactgttcagtgttcactgttcataaatcactaactgaagactcttgattatagaaatttttgcaaatcacgtcatcaagcttatcatattgttaaaaatgattaaagaaaccacatctacataatttacagagtattacatctataaagcacgaattaaacacagcactaaacagattcttgtgaaagccggagcacagtacacagattcttacaaaggaaaggcgtgtgagcacgaactctgtccacatatatttatgtatattccattggtggcgtcatgtcatcctggtttgaggatcagacaaatgctatcttctcgtgtcatagttgttgcattaaaccttcggatcagctcatgtctgaaaaagcttcggaacgagattcttccaccaggactgtctggcattttacaatggaagcgctgggcgttgtcggacaacgtttaacacgccccttgcagttgcctgctaccaggaaagagagacagtgagaagctcccattgagaaaaacttaaatcttctgattgaaatccttacctcgtaaaaggaattgaagtttagacgtaaaagaaaacgtctcaagaacggggctcgctggctcccggcgagtttgctgcttctcagtatggtgtacaaggaatttgacttcttgttgaattccttaaaccgcaagataaaaaattatgagagaccattgttacctttgtatgagtattacagtgaaaagataacgcacctcagctatgttttcaagttctgaagtgtttgggttgctttcttgattctcaatgttccagcagaactggagacatagtttcatgatgctatcaagtatccttgagacggaaccaatgtcgaggaaagattgagagataagagcggagaggtacctgcatttgtatagtacagtaggtaagtagagggaaaaattactgaaaaagatttaggttcagacttgcttcacaaaataataaaaaatcgaaacgagaaccaaacacagaagaataaatgccaggccaagtaagtagcatgaagactcttgaaagagaacaacgagcattggatatacttactcttgatggaagccaacgagttcagtgaaatcttgagaatcgtggatgtgagtttgcaacaccttccattgagattctatcacgtcaaccttaagacaaagagagaatcaaaacatgagaagttttttgttttacaaactggcttataaccaactttgaaattcttaggaaacgtcgtctttacctgaatgtaaaactgaagattccttatcaaaaacgccatgtgctctctaacacgccacatgggtcgtattccttgtcgtctttgttgagatgttgatccgtttaaaccatcttttcgatgttgagcagattctatatgatcttgatgcattacagaagcccatgatttctccaattccatctgagttctctttagccgtatcaaatattggaacaccttgagatacctaacacaagtttatagctctcagagaaagcatcacatatttcaagttccagcagacagccgactaaaaatttcatagtataatcgatgcaaaaactttgaaagtgagaaaaattagaagaaaagaaggatataagcagtgcctaaggattattacttagaaagcacttcttgagtgaaaaacagttgcatgggccaatcaacagaatactccagagcaatagcgtcccagccatccacagaggtgtctgatgtaagatttgccttcccggtgagagatactttagatctcaccatgtcagcttgagaagatctgactgtgactccaaatgaaggcatcctggtgagaatagcagttaaatagccaaattaaggaacagttgggagaaatagttattaatatgtgcgtcccacttagctcaaaggctcgacactaaatccattaatacaaagtcgttaagaagaatttgatgtgttactaaccgtagggataccctagagaaatacttatcttcctccgcaatggtttttgttgcagcctgtgtgttccaaaagaaagaacattacaaaaacaatttgacctgaacagaactttaatcatgaaattgtttaagttgtaaccacataccaactgaaacggtaccataagatcagattctccagttgactggcgaggtggcaaacgcatcaactgacgactctcctccagaaagcactgaaatcagaaagtctatgagatgagaaattaaatgtccacaggtctttaactgaggctagtgcaagaagaggaggacatgaacaagtgggagcgacattaatcacccttaattttcatttaagagcatcaacagatagattatgtggtttacctgaaagaaatctcctttttctaagaggaaataatctttcagagctttaagatgaccattgagatcagcacgcacaacgacaagctgaagaaaggaaggtaatgtgacccaaaaaaataaatccagaagattgaagtttaaaatgttgtcaagtgaaaacctgccaaagatgactggctgctattgctcgaacagaatcaacagtgcactcaaatgatctcttgtgaaactcagatgattcctgcacacaaacgtataaatctaagtttacaatctgagctctaatgtgatcctaggagaaaggcatatactatctctacgcatgatctctatgcatgagcagtaggatcgcgtgctgcataaccgaaaatcaactcagttatttagattgttatactttttaccaaagatatactgtccagtgagaaagtacctttaaatctttgagcatagcttcaatcttatctgcctcagattgtggaagcaactctccccctgtaagatctgcatctaactcagtttctgtttcagggaaatcactatgcataaatcctcgaattctctgggagccacgcattgtttgctgaaaactcttgtccttctggaactggaaagcaggactgggatttcgcaaaacccttatggctttccccgcaaaaagaattgattcaccaaggcgcataggaatataatcaggtaacatatcctgcaatataagcacagaaaaatcaataatatagtaacagtacctaaatcaaaagtgtaagtggcatggagaataccaaagaaatgtgaaatccagagtgccaatcagttaaagatgtctcatgaactgaggtacgagccaacttttcagatacttcttcctgagatgagcgatgatctaaatcaccatcgtcctgcctacaagcaaaccagaaatgagttgaacattctttggagaagataaacagaaatcaaagtgcatctgcagacgacggcaggccataatgtatcaatgcaagtatacagcagatacctaagcagaataaatacataatgaggaccactaatgacgacattaagaaaaacgagatggcactcagcaaatatcaagataaaattgacaaaacgatgtagatttacaatttacctcttgatgaaaaattctccatgaggatcctgaagaatgccatagaccatccaagctgcaagctgattatacatgacctgatgtccattccaaagaagcctgcacgtggataagggaacaagcaggatacaaaaactttgacaagtggtgacgctggactaaatgatctcagtttactgaaaataaagccactgaggaacaaagctagtgaatacctttggagacaagtcctcaattcaggcacaccacaatgacatcttttattcaatacattaagaagctgccctccacgaatatcatcacgctcaatctcaagaattacctcatacaggggcgggaaaagaacgaaaaactagacagaaaatggcattggactatcaataaacacaaattcatttggcaaatgctaatctcaatcatcaagtgataaatgtgttggtattgtactagaacatgtaccttattgagcccctctgtaaccgtagccagaataggcgtagtctccgccaatagcttctgttcaatgtgaagaaccgcagatctatagaccgaaagaatctccccaattccattagcaatggctctacggtacacgctaggcttcttctctctactctgcttcgacaattcatcagcccgttccaacggatgcacactggtcacagacctaatccagctcaaattgcgagacttcttcgcaaaccggtcgagttctcgatagtagaaccctaacttgatcaacctttcgatcaagtccctgcaaggaagcgcatcagagtcactagaaatcaaaatcagcggccaaatttaccagatcagcgcgagcagagactaaacctttcgctgggttcgatgaaggagatgtcaggagcgagtttgaatgtacattcatcagaaagaggtgaatcggagttgaaagcgaggcctagggttttccgttgctcacgctcgtcgacgatgagatcgccggtgaagcctaagagagctagaagaagctcgtgcaacattgggaaattcacgaaagacgaaactgctaaatattttttgggggagggaaattgaaaatccaaatgccgtcactgtcgccggacttgttggtttaccggtgtagttcagtggcaaatggtgtaatttcatgagaaaacaaaggtgttttgctaatttagagagtctctttttctcttgtctcgggtccactcgaaagaccctttattcggtttggtctttccaatcaacaccaattcgatatggttaaccaaaccaaaactctatctaaaaatccgatatgaaaccgaattagagaaaaaataaaatccgactatgttttaagaaccgtagtcgaaaccaaacttgctcgtgtaaccactaaccggcacccggcaagtggagaaaaaaacaatttacttgaccaattgtagggaacaaaggtagttaagctaagcttgattaagtcaaaattcttttttgctacacttctagttgagccaacaaaaatgatgctaaattatattattcgaagaaaagccattatctcgattgacccttcaaataatttgaccgttcagagaaaccattgaatcttgatcgtctcagaccttttcacataatatgtatagaccaattcaaaaattgttttatgtttagttagttcaccgttattaaatcaataaatttgatttaaaaattagcacgtacgcttaaaactctttaaaaattgaagcatgattaggtcattgtcctggttgtatatttttcgatgatttaatctgacttcaggtcgagcaagggactactacttctctttacactataatttttttttttttttttaacagaacctaccaatactttaattttttattttgttccaaagtctgatcaacattacaaagtcaaagtattagtttattccaacaacaacaaaattgttatgattaacaaattccctatatacctatatataaagctatatcttccaaacgtacataaaccaactcgcgcgttcataaaatagtctatacaaaaatcctcttacacttaatcttcttcataggagatttgagaggattaatgtctcaatcacttttcaatctcaaaagtttatctcgctcgatcaacaacacaatcagaatgtaagtctatccatttgtataaaccttatggttttagaaaatactgtatattggttaattcttttgaatatgttgcgttgtaaactaaatgagaattcttttttttttataaatattattctaggagaagatacattgtgatcacaaaagcctctcaaagggcatatacaattggaagtagtcaagagaagccatcgtgggcatcagaccctgataccggatactttagacccgagaccgctgcaaaagagttagatccatacattgcaaaaacctctcaagttcaaggtaaaatgatgagaggagaagagttatggtggatgcctgatcctcagaccggatactatagaccagacaattttgccagagagcttgacgcagttgagctacggtctttgcacttcaacaagaatcaaaagacgtacgtagtgagctaaattatctctacatgcatgtgtggttaaataaaataaaaaacttctggtacattgatttgaagtgagaactcgtaataaggttttggcaaattatttgtttgcctcattgcttcttagttcttatttttctaacgcgagacgcatcattgtttagtcatgttgactttatcaaacaacatgatttgttcaaggttgcttccaaatgttgggttttatctggtgaatctttttaaaaacaagttgtcacgtattactattagttatctatataaaaaattccattccaaatttctgttatatattttaccaaatgaaagatctccatgccaaatttccattttcagattctaatcaataaaaattgtttgagagagtattacaaaaaatatatctacatattcttaatttatttttcattttacgagtggtctttctataaaaaaacaaacattacgaatttacgatgtaaattgaccttagtaacaaattaaaacgagagagatatctattaagtaatatattgaagttagaagagaacataagcatcaaagccgtcttagctcagtggtagagcgcgtggcttttaaccacgtggccgtgggttcgatccccacagacggcgatttattttttatttttttccttctttaaaagaagacagacacaaacattggagttgattgatcttacaacgagtttttaccaccaaaagagcaaagttgtatcatggattctcttctaaaattgtagcaaagcaccgttatagtaatttaggaaaacattgtattatttattgaacaagggcctctataaaacatacacataataagcaagaaaaaaatatgatagatacagtgtagagtgtgtttgtgtacataataatatttctaaaaatcagtaaatcaacggcaaagctgaacacataagctattaatccgtgaatccgagggatttgccaaaatgtaagatgctgatttcccattcctcaaacaagtcatgctcaattggttacctaattgagtcgtctgcagaaaaaacaagaagagatgctttgtgattagatacaatggaaggaggtttgatactaggctagagaaaccgaggaacgaaataaaagagcttaaggtttttaccgtgcaagaggctggttctcggttacagctccatttagatgttggaacacatgaaagataatgacaccacgaacaatgttcgtttccatcgacattgttgaagagagagatcaatccaacaatgaacctgataaggaaagaagcttggtttggttttctcacaaagttcataacttttttagtgtcaatcaaagagacaagatcatcatttacacaatctgcaggcttttattagtatagttaaaaacaaacagactgatttattgctattgacgtgacagagaaatgtaacacttacccagcgaccaagatgagaagagagatagtccataatatgccctgatatatcttgaacctgtggggtttagctccaggaccgtttctttggttgatccatccgtaatggggacggattaagagcacaaatccaagaagaaaacctgtagcaaaccctccgatatgagcaaagttatctactccagggagcacaccgagccccaagttcaccgccacaatcaatacaagagttacaatcgtcacaacctagaaaaagcattggcaaaacaacataaattctaaagttcagatctttagatcatagatagaaaacaggtcttgaaggtatagtgagttaccttgttagaatagattgtccagttgataaagatctcagagagcattcctccaagtaaaccaaacacggcaccagatgctccaacagagatgtttgaacggaggaaaagagctgacaatatgcttcctccaaaccctgatatcaaataaagcaatccaatccgaactgcaaacaaaaatcaaaacaaaggttatatacttacacacacacttcactaaaaaaggatcttcacaagctaacaaagtgatcaagagaggcagagagagtagttaactcactaaaaccaaattcacgttccatacgtataccgatgaataaaagagtcaacatgttcatcagtaaatgaacaactcctccatgtaaccaattgcaagaaagtagacgccatccttcatctcctttaaccacttttttaacatctaatccacccattgtttgtaacctgttgcaagtaaaatgtaaccaaaatcaatctctaaatctatacatcaagacagttcaaggaagtggagaaaaacacacactatctctttactctactccttctacatcgttaaccatcattaaaccaatcagctactaaagaaatttcagatttttcattgaaatcctaacaaagttcggatttttctgcttcacttgactcagtaaagatcagacctttatttgaaacaaagtaaaactcttacttacgtgagagaggaaggacccagaagaggattttctctggtgttctgaaacgagaaacgacccaagaaatcagcaaaacaatctccagatttcttaggacaattgttgacatacatggtgatcacgaagacggcaacgttagcaacaacgaaacaaggaatgagccaaggaaaccaactccgaaactctttaactcctctacctcgttcttcataagaacttcgactctgagtcaacgatcgttgttgcccagatacagaagaggacgactctaaatccattggctgtatattgttgttgttgctcctctctctctctcgagttttcccccaaatcggagctgtttctgaatctttctcacccattgaagcaattaaaaatccgagctttgaacagaattcgagctttgaacaaaattggagagatttgagatgtgtgtagggagaaattaggtttcgtgtttagctctttatgggagtttttaatcgggtgttggactttgggagctaagtgcaaagttcaatctatacaacaataagcaaattttggttggagtttttgagtctgaaaacaagaaaaaaaggaaagagttaaataagtcaatggtctttaccaaatatgcatcacacatggttcctaaaaaacaatcatcaaaacaaaaaaaggaaaagttatgttatttcgtgtctcaaaattgtttacaaactaatttataaacaaaagttttagtaagaaaaataaataaattttgtgatcataaggataatagttatttattaccctaaataaaagtggccctaaaaagaaaaaagagaaccgagtcttttgcttaatttgcttatcatccgaattaggactgacttgttaagtagttcaaccgctccgtcgtccaggggtttctttttattgtaattgactcgtctacttgtatctttagtacgtaagcatcgagctttgacatcgacgcttttggtcgtgctttctatcggtgacctactctttctctatattgtttatgtacctacataccatttggcatttggaatccgaattgtctactaaaaaatccaacctatcattatcagtttgatttgaaacagttaaaacataaatagttaatgaaagtgacgaagttgaagctttcttaagaatgattattgttttatggttttcgctagatatgagaattaactaccaataatatatataaccttagattgctttggcaactttaaatttgttgaccatatattgtcgttaacttgggagctacgttagcgaaaaagattaaatccaaagttttacttaaaattaagtatcattcaacattaattttaaacattatcaatttaatttattgttctgcaatcacattttccattcaaattcatttgacttgatttctattatatatacaccttattcaacacgtttctttaactgattgccagttacatcctaaaatgcttccgaatggaacaaaatatgtactccattttgccacgttatttatccaaaaagtactcgcaaagaaattcctccacaacaagaaaatattagtgaatgagaagagatttatccatgaataatgtagagtcgtccacgtgttaaaagaaggatcgatgttgagaagtcatgggaacgaagaactggtccaaactgttcggaggagggttttaggtctaaaagctaaaaaaaacgttggttagttttagcccccaaaaaaaaacatgtctttagagaaaaatataattcagaaaacgttttaaatttactgataatttcagactactcagatgttgacatgtgttgttaaaattgagttcaaattttcttaaaacattggagtttttttgtaaagaatttttgtggtttcatggggtttttgttcagacacaaacccaactttaaaggcggatgtttttatacggctcatatctttctatatattttacttccacacaaacaaattccaacataaatctcacttttctttctcgcacaaaatcaaaatcgtttcagataatcaaaaggtttgtgaatttgtatgagatttgtgacgaatgtttgtttttccaattatcctcatcatttttgtgtctcatatatcggatatatgaatgtttgataaaccgagattgcgcaggctcaggcttaacgtaagcaatttgcagttgtgtgtgttgcaaggaacatggtggactgtggtgtcgatatttaccaacttcctgttgttcctagggcatgtagatcacccagagtacgcatatacattcgaacatgatttattttgccataagttacatacattttggctcactcgattgcatcttttattttttatccagggacgcaggctaaaaattatgagaaaacaaagatcggagttcgaggttttagcccaagtggctggaagattctcaggtgagcgtaaaaaccgaattgttatcggctcgttggctcacgaaacaaaggagacgaaggacgataatgtcgtcgtcaataacttcttggagacaatggaagttgaggttaagccgcaacctggtctggagaacctttctcaggtgttattgtctaaggactggttagctcttggcccttccatgcctaactcgccaatcacacaagaagaaaactttgattcacgttccaagatcggtaagatcaagtcatcatatcactcgcgaactttacttatatataaggaaagcttttttacagagaaatgaagaatattattgaccttctttttttttttttttgtatttccttggatttatgtagatagtaaaagaaaggtgagtcacttaaaagagcgaggttcgtgtattagccaagaatcgcagaatatgtatcctttgaagaaacgaaagctgttttaccaaaatcattcatctgaatcacatgatactccatgtaccggtatgtatatctatttgagatcaaatctatatgaaaaattgttatttatataacattctcttgttgcattttcagtgaaattcggtattaagtcgttgaatatctcggagctattggtagacgttcccgaatcagccacggttggctcactgaaactagcggtattggaggcggtaacgcagattctcaagggtggattaaacattggagtgctctttcaaggtaaaaccatcgttgatgactccaaaacgcttcttcagattgggatcccatacgatgatgacgatgacgaaaacctcggttctttgggattcatgctagaaccgcaaaaatcagaaacaacaacaataacaacgtttaccactgtttccccgagaacacgacttaggtacacaatcaaaaccataaatccttatttttgtataaactcatttctaaaaaattatgttattagtaatttcgtattctttttaaactgccggtcataaatagacaaaatcaggtcctagggtccgtggatagcactgaggcagtagcagctaaatccgtggttccagtacgtatgaaaccggcctggcagccagagatggttcaacggagaataagacggccattcactgtctcagaagtagaagctttggttcaggccgtagagaggctcggcaccggaaggtaattaattttcaagctcttgagatctctcatttacttctttttgtaataatctggtttgttaaaatactgagttgtgtcttatatatacattgtttctatttaggtggcgcgacgtgaagtctcatgcatttaaccatgtaaatcatcgtacctacgttgacctcaaggtaccttttagtagtaaatgccatgtatgaaatcagaatttttactgagaataaaaaaataaaattatatgtgtataaccaaaaacaggataaatggaaaacgttggttcacacggcaaagatatcagcaaggcaaaggagaggcgaacctgtgcctcaagaccttcttgatagggttttagctgctcatgctttctggtctgaccggaccggatgaaatttagatttcgatttagagttatttaagtttaggattttgtttacataacacataagattgcccttttcagtacttaaagcaggtagataatctaggatatataattactccaccaaaagtggtgggaacattttaacctgtgaaggtttaggttctaagttacactagatgattaaacgcgtgtaatgattcaacacttgataacatctataatcaatgcttttgagttctgcgtctattgaattatttcaaaattgggattcaattagcgggtttattaccatttaaaccaagatctattttcttaaagactttggttcccttggtacaaaactgctgataaaaaacaccaaaacaataattcctctgattaatctatatttgggccatagtctattcaaatctgtatttgggccatatcttattaaatgggtttagtatatgccgtcgatttaatctagcgtggtcccacactcgttctccttaacggcttaaccgataaactggctagtgcaacttggccacgtgttttttggtctatccatactttacggggcacacaaaaatatctcctctgttcctgtaataaaaaacaaactaacattctcattcctctctcgatcttactcaattttgcgtttctgcttttcattttctctcaagaagcgtaaatggcgaacaatggacctaactgggacggattactcaaatggagcctctcacattccgatggagcttcctcttctagccgtataaggtcctttgatattttctctggaattcaattgaaatctctttaccctttttctttaccggatgttacattataccctagtcattcttgtatcaagcttgttgttatctttgaccaacctattcgtctcttgctagttgctaataataggttcttattttattggaatatattcttaattctgagagacaataaaccatttggacgatgaatcttgaagttatgataaaactgtttgttgagttatgatattactattcgtcttttgagttatgatattactgtttgttgagttgtgattttggagtatttgattgtgttctggttagtgaggaagatcgacaatggtttgtggaagctatgcaagcacatacaatcgattcaatctctcgtatgaaagtaatatctcaaatcatgaagatgcctgaacaagtcttggaggctcaaggagttacacctgatgatcttgaaggttctttacttcgttccaatggcgattattcggttatgcaaaagaaccatactgatcgatttcataaacttatatctacttttgttttgacaggaatgttggctgagctgcaggaacacgtcgagtcgatagatttggccaatggtttgatcttacataactagtctttgtttttcgaggttcttttttttaatatattatttggatctttaaatgttttagatcttcactccattggaggtttggttcctctccttagctatctcaagaactctaatgcgaaaattcgagcaaagtctgccgatgttttgactacggttgtccaaaacaatccaagaagccagcaacttgttatggaagcaaatgggttcgaaccattattaactaactttattgctgatcctgacattagagtccggaccaaggcactcggggctatatcttgtaagagttactatttctagcaaagtttgctttgagaacccaaaagtttgacagtttttttcttgctttcgacattgcagctcttatccgtaacaaccaacccgggattacagcattccgtctggcaaatggttatgctggcctgcgagacgctttggtctctgataccgttagattccaaaggtaaatagggtctcaagaatatgtattaggtagatgaattgatccgggttttggttctgtttcggttcaggttttcagtgtagtaaccaatatactctttctgtttcagaaaagcgttgaacttgcttcactatcttctccaagaaagcaactcagactgtaaaatcgttagagatcttggattccctcgcataatgatccacctagcatccaaccaagattttgaagttcgggaattcgctcttcgtggtctcctagagcttgcccgtgaagaatctgtgagaaaccttgatagaggggatgtgaatctaagacagcttcttgaggagagaacaagacgaataattgtgatgtcggacgaagatctttgtgcagctagagaagaaagacagctagtggatagtctttggaccgtgtgttatgatgaaccgtcccttctaagagaaagaggtctggtctacctcccttctgacgacgagctggctcctgatgtggttagggaccgctttgaacctcctctaagggcttgggctgcaagacgacatgatgaaacgagtgaatccccggttccacttcttcttggtcctgcaccgtgatctcgttcaaccaaattattagattttgcagttatcaacaaatcagctttgctttagaatttctctagctcttgtttatgtatatctgagcgacaacaagacgctattaaagagattatctgtgttctgtttctgtaatacaaatctacactcatggacttcaagttctacaacttctccgttcactttgccaatatcatagtgtaccgttattatgtttaagtcatgaataatacttgcgagactgttcttgatactgaatccactatcgcaatcataatcttcatactctataaattcttataagatatcacaaaaaactcaattatatattccatacaaaggcaaaaatgtatgtacatgatccgtattagtaaaccttttttaaaaaaactataaacataaaacattgctagagttggaacatcaaacatcacctcccaccggagagtagagagtcagcaatggaagatccgccggtaaaccctttaaacacagtggaaaaatcagtcattgcaataccgctaaaaccgtcccggcctcccagattcatcacgctccccgccgacaaatccaagggcgttaattcaggcagtgccatgtctcctcttagatattgtaagacctgcctcatacttggtctagcccgagggtctgaatgcgaacacaacagaccgagtttcaataccatttcaacctcttcaagatcataacctgaagaaccgagcttcggatctttcgcttccattatgttacctctgagccacaaactgaaaacccattccacaagcaagaacgtatcatcgcttgcactatggaactcgatgggtcgtctaccggaaacaacttctaaaagaaacgcaccaaacgcatagacatcagtcgtggtagtggcacgtccagtccgggaatgttcaggtgctaagtaacccaatgttccaacaacgtgagtggtctgaggatccgagccgtgatcatacaaccgagccaacccaaaatcaccgagtctaccattgaaatcagcatctaacagaacattgctagctttcacgtcacggtgaatcacaacttgttcccattcctcatgaagatagaacaatcctgaagcaactcctttgataatcgtagatctttgtttccaatctaaggtagtctccggattgttgtaaagatacttatctaagctcccattaggcatgtaatcgtaaaccaaaagaagctctcctctccggcgacagtaacccaagagaggaactaaattccggtgactcatcctaccaatactcacaatctccgccacaaactctttcataccttgttttgaatcatgtgagactctcttcacagcgacttcaagcttcgtcgttggtaaaatgcctctgtaaactctcccaaatccaccggagccgagaagatccttctccttaaaacctttggtcgcgtgatagagctccttgaatctgaatcgattcttcccaaactctgtttcccaatcatcaagctcttcctcgtacttcttcttcctcctcacgatgtagaaagcgaggaagatgatagagaagatcagagatagtgaaatcaaaggcataccgattttgtagaattcagagattcttctaggctcaaatcgaggaagcttcgggagtttcgataacgagagcatcggagcttctccgtttaaccggaaactccatccgactaagaaatgctccgagagaactgaaccagtcgcagatgagaaacctacatacatatcttctagaagaatcgaagaaagatctctcacatacgaaactagaggttttctaggtttatcagaatcaaacggagccacggtgacatcaattcgatgactacgattatcgtaatcgatccaaacttggatccgtttgcgactaatcaaactcagattctgaaacttatcgtgatcatccctatatcccgccgtcgagtaattcgccgatcgtaaaccgttgagatcgattccgacgtgattatcgtttggatctccaaactcgctactctggattgtatcgaattcgacggcaaagatgtgattcgtgtcgttaccattgttagagatgttgaagagaccgatgtattgactaggaagtgcaaaaggaagacctagcgttggagctacaacgaaggcgattccatggccgcttagtgttgggatctgagaatgtatcgcgaagacgaaggttgtggagaaggatgatacgttgccgttttgggaatctttgaaccggattcgttcagtacagaaggcgtgaccggttttttgtaccgatgtgttggtaagcttcaagagaccattgggtgttactgttgcgagaccttggagtgagatatctgttaatggaggatggaaaccattgtaggtgaagttgagattttgagaggaagaaatcataatttgacagagtaggaagaagaagaagatgagcttgagcttgacgaacatggctgcttccggtttaatccggtttagttttactctgttttgttaaacgaaagaggaaaagattgaagatagaaattgaagttattaaaagaggtgaagagaaggataagaaaaaaaagtcgtggtagtgtttctttgaggccacgctttgtgagatttgaataatatgtcagtggttggtgaagtattaatcaagattatataagcttgaattaaatagaagttaatttcattctatgattaattggttttataaggaggaagtgtatatacaaaaaaaaaccacactttgattttgactgatgcattaatccagtttgtctgcatgtgacttctagtggtcaatggtcaatgagtgagatgttgttgatcatttttgtttagttaaattaaatgaagtaaattcaatcttatgagtcatatggttaagacacacaaattcaagtttgtgattctgagactggagttctagaaacgtgtttctcttcggctttgtttggttttatttccagaacttttgaaccatggtaaagctttcttttttggtcaacaaaacttttttggttaaacttcatataactaaatttaacttgtaagagaactatcatttctctaattgactaaaacgttctggatggtgacagaagtattattcttgcaacatttccaaaacttaatattgtgtgaacactaaaaagatatcagaatagatgtgtacttatccaaacgtttcacaggaagtacaaaagcaaaaatcattttagatagtgtggcttgaaaggctgagattgacgacaacaaacaaatgagaggctaagatttactatgtgttatattagtggttatgtaactaatattgttccttcatcagaaagtattcagtggtcgacatataaaatattcctctgcatatgaatttttataaattttgtgatgcaataaacggaagattcttttgacattttctcctttggcgtgatgcagaaacaaactaaatgctgagataaataataggatttcatgtcacagtacttatgaataagtggacttatccaaaaattgttagattttttctcttttgataatagattgtatcatttttaggaaatgaaatgttccataaatacactatagtctatagtgacgttgaaaacttgtttgaggtgtaggaaaacgtgaatgaatgaatcctggatttgtgagaaagaaaggtagtgataagagggagagagcaacgactttaaggagtgatatgatagtgatgggtcctcatgtgtcaaatggacaactggtcaaaacttgtccacttgtctctttaggaagcttctcaatttttgacctttgatttttcgtctcagtcagcttcatgatcgatcttctttgaattttcttgcacttcaattttattctatcccgacactctaacatttaggaggactggttatagttggattcggatgtgttaaattgatatgatagggtttagaaacataaaagaacgccatataacttctttttggtattagattctcagaataaaatgacaagatcatattcttatatagatattgaagttggctaagttaataaaatacaagtactgtaaaagtaatatctttggtaacgatcttgatcggtcaatttttagttcaaaatctcgacatattttccaataagaagtattatagactaatactatgaacaattcggaaagcatacagaaaagaaaagcctatagtatggcaactggtcaaaatccatattttgttgattcaaaacttctcaaggtttaaatttcagtaaaaagaaaccaattttttttctggaccacaagaaaactagcttaagagattttgaaagaaatttctgaatgtttttcttttggttgatggatatatcattgatttcagaaaaaaaaaaaaaaaggaaaataatccagttatggctaagcccagaatcaggcccaggcccagatgcatttagttagtaatgtataagataagccccatatatatgttttttttatatctaaaagttacaaaaaaagttcagagtataataaaaacttctaacaattataatcgaaactttttctttgaggttgcagataaagacatccatgtgaaacgccgacactgaaaagtcactcaaagaaatgttcaaattagagttgttcttagaagccaaccgtagggttaaaataagctaatggagattataatgttaatttgtcaatatcaattatttgttggataagtccaaaagactaatgcggaattgttctaaatagttttccctaagcaacgattataatacttttccctcgttaaccatttcacaagttaactaagcgagtgccgtcaacatttatatacattacaaactgaccagttatgtaagttgcttcccgccattattagatgttggcatgttgctatcgtgaaaagtctttttaatttcatttttgttgttgttcggatatttatattgtgaacatacattataaactgagattgcaggttaattagttagaaaacatggtaaattcaatgtaattgcgacacgttaacatttatatatcaatttatgtcaacattagtacaaatcaagaactatatgttttgatatctaacatatgtaattttattatgaaattttatatcattgaccccgccctaaagattgatatattatctaaaatggttttaagtcttcatatctatatttaatatagaaacctaaactcataaagaaagaattctgaactacattcgtagttgaaattcatacactataaattaagaatgagcttaatctaagattcttattgtaaacaattggttaacatttgacattagtaagtacaattaaatatagcgtatacgagatctatgataccgacttataggtacatatctctaacttgatgaaaatctatgaaggaagctaagctaagtcaataaacatgtatttgtgtaagtattttctaatgacattgattaaagaaaactagataacatatatatgtcctccaccgtttgctgataatacgtgtaaaagatgtgtttaatttcccaaatacattgttattttttttacgtcaatttgcatacattgtttatttagacatcgcacatttgtattttcatgaattatagtttctaacattttttgatacattcataaactttgtgtgtgtttataagaaacatttatctacattgtcggctatattaaaagttaaaaatgtaaacgcccaaaccaattaaaaacaaaatacacaccattacacaatcgcaagacaataagcacataacttatctatatacttttgtcggctagaaaaagtcgactttgactttaatttttaaaatgaccaattatcacgttctttatcagtatattaaaattttttctcatgaaatataaccatcaccttgttatttatcaattttacatctcttctcaaatcaaaacgctcccttgtttatattctccctcgcgcgatatcatatacaaatgaatagaaaatacttggatcgtcgatcatattcatggtccggatcacaagcaagaccatacatatgcgaattttgcgagagaggtttttccaacgcacaagctttaggagggcacatgaacatccacagaaaagacagggcaaaacttcgacaagcgaacctaaaagaagaagacagtgaagatgccatttgcaccacttcgagaaatcggtttgggcaagagcttattgagttacctttcttcgttgatacggtcggtccaagaagaaaaggagaagatgataaaagcgaaaaaggtttaggagatgaagaaaagaaaaatatgaggatacttcaaaaggctttatctcaaagtgcagacgtgatagatcttgagctccgtctaggattagatccttataaaaaaacaacaagtacaagtacgtaactaataactatatatgtgaatactttaatccccaagtttgtaattatgtgaataatttcgtttgattagatattgatttgttaatattacacaaaaattagaatatactgtatgtacataatggttactgattgtgatgagtttttaatcattaaatttgtgaccaaaatttgtgtaaatggtatttagggtttcatcatatattttaattgtgaatcttatgaaacatgaatacaacgtactaattagcatatttgaaacaaaagtgcaacttttatagacttgaagtgattacagaataaatcagaaagtttcgaaaaatgaaaaaaatgaagatattaagcaggacatgttgtcaatgaaaaacgaaggaaatataacactttttttttgttttcctccgaaggaaatagataacaattatagttgcagaataggtaagaaattattgcttattgattagttagtagttaccataataaatgacaaactacataccaaaaaaaaaaattcgagccttctactaattaaaaaccctagtctgttctagtttccacccatgcacggcctattcttctcttccttttgatcactctatctctccaagtctccaacctcattccacctacacaatgatttgaacaaagagacatgagttttatactatatgagaagacaaatacatacattgatgcagagaatagggagagcataagcaggcatatatatgatgagatctttatgtgatgaattaatggattaattagctgtctcagtgaaacttcttgtgaatcaatagataagctaacaacaaaaattactactgattaaaaactatagtcgatttcaaaatacaagaaaaagtccttcacgagaaaacattttttttttgtttgaattgtgatatgcatggacatggtcttgggctcttggcaattgaagaaacacctgcctagggtgttatttgatcaccattaattattacaccaccttataaaaaaaaagtagctcaaaataccaaaaaaaaactttgttctccaaaaaccacacacttcacattaagaaagctttcaaagattgctcaattatatgtcttcaaatttcttatgcaaacttggtttatattgatgcaaaagcctaattattgactaaccgacaaataataatccggtttgatatgcgttttagaacaaaaagaaaacatacatgcgtacaaaccaatgtgtcgtagtcaattcaattatatattgaaccaataaataaaaaactaattgttcttaaaaaacattactaattaaattagtctataactggaaataaactaatttttggaatcacgcgtcaatcagtggagaaaagtgagctttaaatatttgaggatagtcttttgcttccagaaagttctccacatttttatttttaaaaaacaaaaaacaaatcgcggtctagatcacgccacgtgttactaagatgacgtggtatccgaggtggcacaacgtaaatccccgtaattgattctctctctctgagtcaactcgttctctcttgtttctctccgtttcgagactcatctgaaaaacacgaatttgcagtgagaggtgaaacgcagatcactatattgttttgggttttgtgtgtgagtggtttatggtgattttggatttggaagaatcgttgccatgaatgggaatattgtaggaaaggttccgattggggaatgtaaagcgactgtagtttacatgtccggttacttaccaggagctgcgtcggagaaatccccgattctctcccctgttcccgtgcgtttatcggcggctgttcacggtggagattcgtggaaagatgtatgtggtggtggttgtggattcgctatggctatttcaggttggatttattgaaaagatcataactttgggattcttggatttacaaaagatgtgttttttttggggatttactaattttgtttgttgatgggttttagagaaaggaaagcttataacttggggttctactgatgatgaaggacagagctatgtggcttctgggaagcatggggtatatttctttaagatgattgaattttgtctcttcttattacctttttttttttttttacgaaattgattcgattgttgtcttgtattgaatacgattggttaaggaaactccagagccgtttcctcttcctacggaggctccagtcgttcaggcttcttcaggatgggcacattgtgcggttgtaacaggtaagtttaacttctctactttggcttctattacattacactggtctatgacttgaaacatgaaatggagtaatgatacttgtaactgtcattttttgtccatgacctgtgtgttgctgtgtaacagagactggtgaagcatttacttggggttggaaggagtgcattccatcaaaggatcctgttggaaagcagcagagtggctcaagtgagcaaggtgatatcggttgggatatctttggttgtagtgttgttatttttttattgttgatggatatggtaacgttttcaattgtgatagtgagtccagcatcacaaggttcaaatgcggctagtggtacgacactacagaatgagaaccaaaaggtaggggaggaatcagtgaagcggagacgggtttcaactgccaaagatgaaactgaaggccatacatctggaggcgacttctttgctacaacaccttcacttgtgagtgttggccttggagtgaggatcaccagtgttgctactggtggtcggcatacgctggcattgtcaggtgaagttgaataaacgactttttacaaatccgagatgaagctgctaccttgtagttgaagattcatttgaggatgatcatgtttttacggaagtttcagatttaggacagatttggggttggggatatggaggcgaaggtcaactaggattgggttcccggattaaaatggtgtcatctcctcatctaataccttgccttgaatcaattggatctggaaaagaaagatctttcatattacatcaaggaggaacaacaaccacgtctgctcaagcttctagagaacctggtcagtacatcaaggccatttcatgtggaggtcgtcatagcgcagcaattacaggtctatcttctcttctgagttattcctctgtacactgatcaaactggcttgctatgaaataaataaaaaggttgcgttgcagtatatgttttgtaaaatttagaaaactttgtaatggtttgatcttgattgcacgtcctttctaattacagatgctggcgggttaataacttttggctggggactctatggacaggtgaatattttacaacttagcaatctttgactggttatccaactgacttaagtgcattctgtttagcctctctatgtgctcatgctaactcgacaatttacttggcattcagtgtggccacggaaacacaaatgaccagttaaggcccatggctgtgtcagaagtgaagagtgttcggatggaaagcgtagcagctggattgtggcacactatttgcatctctagtgatggtaaagtgtatgccttcggtggaaaccaatttgggcaactgggaactggtactgatcatgctgaggtatctctcataatcaagatttccagaaattttgtgccattcatgacctgaaagatctggtattctcaaatattttatctcctctcttctgatttagatattaccgaggttgctggatggccagaatttggagggcaaacatgcaaaagcagttagttgcggcgcgcgacatagtgcggttttggcaggtatgttatttcaaatgttgatggccgaaagggacctccccaagtcgaactgagccctagcatttgttttcagttgttttaacgagaagaaactaaagagccctagcttgtgagatgctgcaacttgtcttcaggtctccttttgcattgttttcagttttaatctgtggtctctctttcaggggagataaagctagctctttccttcttagaacatgtgacatgttcgtgaaacactttgcgttctatgatatgtgcctgatgttgatacaccttttaagtttggttcattgtaatcagtgaaggtgtggtactgaatgtattatctgttttttctgattaacactgcaatttttgtttctgcagaagatggtcagttgctatgctggggatggaacaaatatggacaggtacgatgttgttcctgatttggtttgctaagaagttatgtgagtatgtctcatgatcactgcatttgtacaaatagcatctcatttttgcaatctctcctgttgttaatcaacagctgggtctaggggacacgaatgaccggaacattcctacacaagtccagctggatggctgcagactgagaaaagtggcgtgtggatggtggcatacattgctactaggagattcacccacttgagttttcccaaccaatcaccaaatcctcagatacacatttccgggttttgtctgtaggtttgacgatgtacatacagacaggctttttgctgtgtatgtatttccttctttaacattaatccgtcttcatgttttttacttagggggagagctttgactttgtattgtgtagcaaattgcggaacaaagaataaaactgtttggtatgaaaaaaaaaactttagattggtaatagttgcgaatataaaattttcaagagttgtgaggataactcatctactaggcttctagttacataaccacatacagtaatcgaataagagttttaattaaatttcaaattacaaaggagatgaatgcaaaatctttagtatattccataacgaagcgttaaatacatgtatatgttaaatcacagataagtcatgactaaaattttaaatcactgtacctccattgagtattttaattctatgttagttaaaaacaactagaaaaaagtgtcactaagagtgcaataataaatgtgttaactaaaatatgctggaaggcacaaaggactgaacatgggtgcagaagcgaaagtcagtaaagatgctattttttggcgatttaaggatctatgattctattgctttaattaaaagaatcttagagatctatggttttgctacctcattcagaacgatttaaggattcctaaatacaaatacttttacgagatttgatcaccattatttatacacaaatgttttataaatacacaaatgatcaccattactaaaacacaaacaactcaagtatatgcagttcttcagagcaaaaaatctatttaaaatggattgacgtagagtggacaaggattttttaaagatctttcgtacatttagtgtgttccaaggtcttaaatatcattctatatgtacaaacaaacttaatttgatcactcatattatgaattacagtcgagtgtcttcttaaatatctgaggattggtttgtgaaaacctccttaccaaaaacatttgtaaacctaagatcagtccgaagtttcgggaaacgatacgtgtactgcttttttttttttttttgttaagaacgagacgtgtagtgctaattaattatttcaatatcttgtgtagaatgttattatatggttgggtttattggccagttggctactgaacactttcaagtataaagaagtaaagaactatattcctcggaacccatgtcacgttgcaggaggtttgtctcgttgctacaccaaagttttattttggtcaaggtggttacgtttacatcatttaaaagtattagtggaaaacatactttttaaaaatttataggtgattattttggtcatggagtcaaggttccggtatatatatatcagtcgtatataaaaatgaatttatgtaaacaccaaacaagttatttaaataagtttgcaagaatgtgaatggtaagcactataggaattggtgaaataaagatgaatggaatgataatcatataagaataacttttagttcataggaatgcatgattctgctatgtatttaagttatctgatactaatttagttgctaattatgggaaattttgccatgaaaaaaaagaaaattttggaaaaatcacgtaaattttttctaaggaatattccagatactaaaactctatacataattacatatagatggacatgtatgatgatgcacgcaactaaaaaacaacttccacttgtgtatcctacttattttcgaagagaaaaatattcagcattttgggtcaattcgaggagatatcagaacacagcttttaatgtaccatgatgcaatcggaacattgaaagaaactatttgacaagattttactattttaaagaaaaatcagaaatcatagtacacatgctaatatacttcccacacaccctgatcagaaagagcacatgcccatacaactaaaaaacaaaacacaatggagcttccatggctctctctcaccaccttcactctttccctacttatctacttctcttcaactacacaagctttcaaacgatgccctaactgtggatctacccgagtcccgtacccgctaagcacgggactagattgtggcgatccaggttacaggatccggtgcgacaactacggttccctatggttcgacacgctcaatggctcaaccaatccaatcaaaacaattgacccatcgggccaacggttcgttctccgtccaccaggtttcgaacaaaacaaatgtgtctcggtcgatatcaagtaccacggtattcaactagacctaaaccttccttttaatgtgagttgtagtaacacggttataatcatgaactgtacaaaagatggtctagatgcgtacagctctcaagggtttaactgctcagacaatagcttgtgccacaagtttctaaatgcaaatctcgaggcacgaggcaattgccgaggcgtgacgtcttgctgctggtataaaaccggggcatcggttaatacttacaaagtttatcgagctaggccagatatgtgttcggcttatcagagttttatgaatttggatctgacgatcccggttagcaaatggggcgaaccagccgtggaaatactatgggaagctcctagagaaccggtttgtaagagtcaaggagattgcagagatttattgaattcagtttgttcgaacgattcaacgaatttaggacagaagagatgtttctgcaagaaagggtttcaatgggactcggtcaacgcagtatgtgaaggtccggtccggttttgtgatatggtttttgattatttgagatttgagtcttttactaaaagcaaaattgttatttgtttgtttagttaacaggtgctctaagcgtaaaagttgcaagcgttggagcaatttacctttattaggaggtaatcaaaattaaatcagatggttgaaccgggttagattcggttacattctttggtttgggtatctgatttccaatttttctataccgagaaggaaaccaaacattctttggtttggactgattagtttctgttattgaacaggtttagccggtggtgtgggagcaatattgatcgccggattcataacgaagacgatagtctcgaagcagaatcggagaatcgccggaaaccaatcatgggcaagcgtaaggaaacttcatcgaaacctgttgagtatcaacagtaccggactagatagaatcttcaccggcaaagaaatcgtcaaagccacagataatttcgccaaatcaaatctcctaggcttcggtggattcggcgaagttttcaaaggaaatctcgatgacggaaccaccgtagctgtgaaacgcgccaaactcggaaacgaaaagagcatttaccaaatcgtcaacgaggttcagattctctgtcaagttagccataagaatctagtgaagcttctcggatgctgcatcgaattggaaatgccagttcttgtttacgaattcgtcccaaacggaactttgtttgaacacatttacggcggtggcggcggcggaggaggattatacgatcatttaccgttgcggcggcgtcttatgatcgcacaccaaacggctcaaggacttgattatcttcactcgtcttcatcgccgccgatttatcacagagatgttaaatcaagtaatattctcctcgacgagaatcttgatgttaaggttgctgattttggattatcaagattaggtgtgagtgatgtgagtcacgtcaccacctgtgctcaaggaacattaggttatttagatccagagtactatcttaactttcagttgacggataagagcgacgtgtatagcttcggggttgtgttgttcgagttattgacttgtaagaaggcgattgattttaatcgtgaggaggaagatgtgaatttggtggtgtttgtgaggaaggctttgaaggaagggagattgatggatgtgattgatccggtgattgggataggagcgacggagaaggagattgagtctatgaaggcgcttggagttttggcggagttgtgtgtgaaagagacgagacaatgtcgaccaactatgcaagttgctgcaaaggagatcgaaaacattttacacggaatttaaatgtttgttgaaacgacgtttttgtgttgtcgtttaagaatctgtaaataaataattttggaagagaatttagagatgtttcactcttctttgtactaaacagcaatgttatttgcgaatacccgttgcaacttgtgcatttgattcgtaactattcggaacaaaaagatcggaaaaaagctagcgataaaatgatgtgatcctaggtataagatgtttcaccgattggaattactcttctttgcactaaacagcaatgttatttgcgaatatcccgttgaaacttgcactagatgatcgaattcggaagactcaatgactaaagcatcaatcattgtgaacaaggtagtagtaactttgtttttaagttctaagtaaggtgtagtggttaagagagaaatgccaatatgcagcagtagcacttgattgcaagaaacattgatagattcgattagaagcagattgttaacgtcatcaaaagctacaaagatgtctcaacattccaagaagaagaaaaagttgggagttctttgcgaaactaactaaaccgaggctaagatccaaaatgtgacatgagaagaaacagcaatctggatccaagtgacgaaagaaagcgctacagctacttcatacctaagacatggatattggctttgagtattgcaatacttgatatctttttcatacaagactacaactcctgctgatgaacatgcagctgcaagagataacattgccgtcacctgcaaaacaagaaaaacaattctcaatcctttaaaaaatcatatcaagaacactgaatttaatgtagcaaagccataaaaatgtggtgttgcatacccaatcaccaacgacgaataagctaaccaagatagggttttggagatctttctttcccctgagagcataaacatcaagacatgctagcccaaagctccacaacaattgaagacccattgacgcaatcaagtagctgaaaccaaccccaaaatcataatcaacatcaacgagacttgtactactactaataaacaccaaaattgcttgcagaaattccactaccatttctactaaatccgacaactaaacgaacaaaacaaggttaaaggaaacaaatcaaaacttgaagaaagcgaaaccgtaccaaaaagcagtgtgaacagagaactctttagcagagaccataacgccgattgaagcagcagctgaagcacattgtccgattctcagtaacagaccacacacagttcccggacctcctaaaagcttcttcatttcaatcaataacgactccaatttctcttcccaaacccagaaattccgacaaaatcagcgaggaaagaggaacaaaatcgaacaaaaccctagttcagcaagtaaaaagctacatttgcttcaggagaaattttggcggggaaaaaaagaaattgcagaggaaattcatagctaagaataaccctataagaggattttgtcacctacaaacagaatttcccgaaacggcttagattcgattataagctaagcttcttccttgtttctcctttgacattctctttttcttgctttgctttttagtggactgagataagtgagataagcatcctacgtggcagcacaaactaactttttttttttttttttgtctttttttttttttagcgattgtatttggtcgttaagaatctgaagtattatttgttgtatttttgagttctaaaaatgtgtatgcaaatgcaatgcctttttgcctgtctctatgtggctattagaccattacataagttttcgtagtaactcgtaaaattgatcaaaattgcaacaaaacagagttaaattgagttccaacacaagttaagtgtttgtgcttatggatcaaatatcatcatcttatcaagtctttacaaacagtggaatcatcatctcaataactccactgtaattagacctatcttaagctaccctacattgtaccaaaacctgttcttaatagctcagtgctgataaaagatccgataccaacactgtaacaaatccatcgctagtcaaatctactcacaagaactgaaagagatggatctctagaagatatagtaagccaatatattatttctgggaacgcggcttgactcagcttgtcatttcttcctttactacacttttaagtttaccctccttatgtggattttttctttgtgcttgaatgtgatgcacaaatgcagctactataacatggagctttgggggaggcttgcttgttgaagagacattgtgaccagcatcttttaaagctttggcaacattcttctgtgctttctggtagtgcacgttacacagtacaggaacagtcgatgctagtgttggttttccacaaagtaatggtcctgctggagatctgaatgtacaaagcaaacaaatgcagagttagtagagaaccgctcaaataatcatcatgtgctaattacaaaccagcatgaaaaagtacatatctatgaaatctggattgtaacaaaccgaatctgataataacagtgtatcaatctgaaaccaggttaatgttgtattccaagtcacttacattttcaaagagctcatctcaatgttcagttggaacacattttcaaagatgacataataatgctaataatactcataaccctacctcgtttgcaaagataccttaatagagacatctttgtcacttatgtatatcaacgcagcacatcaatcaaggttatgaaacaagtcaaagtaccgaatctatatacggttaccaaagctaaaattttctcccaatccctacggaaatctttgaaacagagcaaagtctcaatcctaaaacctttccgcaggctcaaagaagaaagaaactatttcttggcacaaacattgctttgcagtttcaattcatcatcactacaacatcttaaaccgactatacaatataaaagaacacaacttgaagcaaacctgttgatgacgtttgtgcaaccagtgtagagcttctgcttactatccttgagaatatgcaattgacagtatttggtaagcgccatagctttagctttgcatccatacatacagaacccggaattgctgtttgcatactgatcaccatcattacccttatctccactaccttctggatcaagcctccgtctcttattcgattgattttgttcgtctttaaactgactaaccccatacttacaccaataatccctgtgttgcgccttgagatcctccattaaagcccaataatggtttttataacacttggccagctgctttaggttgtctgctcggcgtcggagaagctctgggcgtgtgaggtgactagagcttgcgaggatttcatcttcttgtaacatcgtaatcggtgaattcgaggtcgatggtaagacgtttgtgctaggtttagggttccgaatttggggttcaactgaagtggaagccacagcggtggaagatgcagcgttggaggaagacggaggtcttgggggtttcaaggagaaagggttttgctcagtgttcttggcagctgacgccattgtcgtcgccggaaaatgatgacagagaagattcaaaatgcgagatttttttttctcttaattacttgattgaaaacatccatgggcccaaaccaattatttaactattttatcaatgtatgggccaaattattcaacaaataggcccaaaggaaattggatgtgaaacctgattttctgaattaggtcaagtataagtactaatagcatctctttcgagattacgccgctcatttttagggtttcagatataggcagattctcacatttgcaaacatgacgactcagatcagcaagaagagaaaggtgaattgtgtgattctgttcattttgttctttcaatggatttatcgtattggaactgttttggtaactgtgttgagattttgattttgtagtttgtagcggacggtgtgttctacgctgaattgaatgaggttcttacaagagagctagcagaggatggttactctggtgttgaggttagggttactcctatgaggactgagattatcatcagagctacacgtactcagaatgttctcggtatgtttttgatcttcgagcttaatcatttcttctattatacggtagtgactgtaaaatttgattgtatttcaggtgagaaggggaggagaattagggaattgacttcccttgttcagaagagattcaagtttccagttgacagtgttgagctttatgccgagaaggttaacaacagaggtctctgtgccatcgctcaggctgagtctttacgttacaagcttcttggtggtctcgctgttcgtaggtacgacatttctctagttcgtttgctatgttactttgtttgatcagtttagtttatcattagagactgatttggataggttactagtgtatataagcattcaccgatcgttatagttgtatgtttagtatagagtaattgttcttatagactctgtatggtttcaaataggtattgtctagcttctaagtgtaatgactttaagttctcatgcaatggttatatgttgtatagggcttgctatggtgtgttgaggtttgttatggagagtggagctaagggatgcgaggttatcgtgagtggaaagcttcgtgctgccagagccaagtctatgaagttcaaagatggctacatggtgtcatctggtcaaccaactaaggaatacatagactctgcagtgagacatgttttgcttagacaagtgagtttcgtctgagttgttcttattagagttaagtaaaaaatcaacaacgtctaattaaagtgttgttaaaccgaatatgtagggtgtgttgggaatcaaggtgaaggttatgcttgattgggaccctaagggcatatcaggaccaaagacaccattgcctgatgttgtgatcattcattctcctaaagaagaagaggccatctatgcacctgctcaggttgctgccccggctgctctcgtagcagatgcaccactcacagccgtagattaccctgcgatgatcccagtcgcctaaaagaatcctttgtactagtcgatgtgattttgttttcaactgttcttgctcttttgacagattatagcttctcgtatcttcgaatcagacacgtttcctctgttcttattcgaaaattatctcaagtttccattgttgaaaaagccctttttagtttcataaatcattctctctttggcaaattattctgaattaattcgtaatattacaagaccagtttgtccaaattttggtacatccatcgaattaactaatcgtaattactaattactaattactctcatcacatgaaatatgaaaacacaagtatttgcgtttagttatatccacgtgtttgaatactaaccgtctgttgttataaaactccgacgattttcccgctccgtcgacacaaacctcctccgtctttcgtaaaaggttctcgagatctaagtctcacttctaaagctctgacaatggcggacgaaatcggattcttccaactcaacaccggagcaaagatcccatcggttggtctcgggacatggcaagctgctcctggcgtcgttggagacgccgtcgccgccgctgtgaaggttcttctgtgattttccgtctcatggtttctcatttgactgatccttagagatctttgattagatgttctgatccttacatagtttggtttttccctcaatattggttgatcttgggatttacggattgatttggaaattcgtttcagtagcagaagaacttaataatcatttcgttttctgcagattggatatcagcatattgattgtgcttcaagatatggcaatgaaattgaggtaaaattcaccgatccgaatctgtatcttccatagtttgcttcatatagttcatcttttgacggctcgttacttgatttgcctttatatagaacagtatatagtatgatcgttcttactcgattggctgttttatgtaattcttactaaggttaaccaatttatatttaggaatgacaattgcacacattgtcttgtgtatctttttcttaaactagctttaagttatgtaggattaatggagttatttgttatagactgtttacaagttcatttgaaatgtggctttttgtttttcttgatggagaaattgaaagctttttttaacctgcagattgggaaagttctgaagaagttgtttgatgatggcgtagtgaagcgtgagaagctgttcatcacatcaaaaatctggtattttgttcatgaagtttctgcatctctatcatttttatgcattttcagtttccctcgtttgcttaagcctcttaacctattaaaatctacaaattatgcaagcacaggttgactgatcttgaccctccggatgtacaggacgcattgaacagaactcttcaggatctgcagcttgattatgttgatttgtatctcgtaagcacgacttctttgaacaaatgctgattttttaataagttctaacagttttcaagatccgttcctttcttcaatatctagcctgaattgtccggatctctggatttgaaactatacatatgcttgcttatactttgatttgtttcatttgatatttttttcaagatgcactggcctgttcggttgaagaaaggtactgttgactttaagcctgagaacattatgcctatcgatattccgagcacatggaaagcaatggaagcactggttgattcaggcaaggcaagagccattggcgtaagtaatttctctacaaagaaactctcagatcttgtggaggctgctcgtgttcctcccgctgtaaaccaggtggaatgtcatccttcatggcaacaacataagctacatgagttttgcaagtccaaagggatccacctctcagtaagttttaaaacactaaacatttccaaatcatttaatgagtccgaatgtcatatttatatacacttcgtgaatgttgattgtggcagggatattcgccattgggatctcctggaacaacgtgggtgaaggccgatgttttaaagagtccggttattgaaatgattgctaaagaaatcgggaagtctcccgcacaaaccgcgcttcgatggggacttcaaatgggtcatagtatacttcccaaaagcacaaatgaaggaagaatcagagagaactttgatgtcttgggatggtctattccaaaagaaatgtttgacaagttttccaagatagagcaggtaagtgaaacaataaaccacatttctgcaaatttcgtatctgtgagtagtcttaactgtaacctcttgtattttggattttgaatcatctctgtgcaggctaggttagtccaaggcacgtcgtttgttcatgagacgttgagtccttataaaacacttgaagagctttgggatggtgagatctgaatcaaaagatgtcttttgttgaattttaaagttgaaaaagaacaaagttccactgctttaagctttgatcgagaatgtgtaaacgattcaattttcaataaaagtaggattttgcagacatattaacaatctcttatgttcatacagtaaatcactaatccgagaggttgatgatagataatctaacagttatatttgaaagagaaatatagacgagtattagactgtagatagaatctgattccattggcctcaaagcctaataattatctttaataaagcagaaaaatcgaaaacatgaattcgcataaagagaaactaacattttcaattcaatgacaaagccacatagctaataaatcgaaacctcaaaaaacaaacaagagcttatgacattgtcagattgtctctcactgttgtttagcttcgaccttcttcttctgccagagcctgtccacgccactgtctgcgtctccctgcagatgcaatcataatgtcaatatacatatacaatcatgaactttgttataacaactgtggagatgattataaagtaattagcagagtggaaattcacaaacctgagcacggacaaatccgcagagagcaaaagtggtgaattggccagtgtagagaccattagcatcaagatgaccaatgttaagctgaactgaagcatgatcctttgatgtgatcattctgtttgttgccgagctaaacaaattaccattacacaacaatagaatcagcttaggctacttaattaagacaattagcttaagattttaatcaaacgttacacagagaacaaagagagctgatatataccatttccttggaatgtagagctctgtgacctgacctgcgtcgttctccatttttgagatttagcttcaaaaaaaaatcgatctgagcaagtaaacaaacaaaaaaactaatcagatgagcaatagaacctcgaattaagagattcatcaagaataattgatcacattcaacaataatatataatcaacaaaagacacaacgagataactaattctgaaatcgaaacctagattattccgatgcgttaattagcaatacagtgaaaggagattaagatactacggagaaattctcacctgcgaggaagaagaagaatctgagagaggtttggcggcgacaaagatagggtttgcttaattcataggtttattagatttatagtagcgagctagggtttgcttatttcataggaatgactactatacccttcaacttttaattgaagagcaataaaaaccgatccaattagagcggtatacaaaattaaatcaaaccgaaatactaaactttttcaaccagaattgtaccgacagttaattgtaaccggaatcgaacgtaaccaaaccataaatactggttcagtttggtagtaacttaagttcattcaatttgataacaaacttttattattggttcaaatgtttgcttcatggatgaatttttcagattttcttgcatactttttcccaaaatggtttgtggtagacaattgagaatgatacacataaaatggttgacaagtttgttctctgttttgtaataatgaggaattcagtttttcttgtttgtgaaattttgactctttatcgaaaccctctcaagaacctgaaatcacacatcaaaaacaaagtacaagagacacaatatataatctaacgattgtgactgttaaagtttaacaactcatacaagtatcacttcacccaatgtgtttctgtcccgaaactgcggtctccagcgtctccaagcccagggattatgtacctagttcatgacaaatacataaggacattaaaatacaatcgccagttttcatatggaaagccaaagaacctaatgacttaccccttttcattgacttcaggatcaataattccagcatatacatgaagcctgaaatgtttcaaatagtagccaaacagtttagtaaaaagagagttaactaaatggtaagcaaggtgagagttgatcttttgctattgattacccggggaatttctcgttaagcttcgatagtgcaggaggtgcagcaatcgcacaaatctgtaatcagaaaaatcaaaacaattaacacttcgatttctgacaaaagctgtttcctatatatatgcttaccactttgatttgctgaacagacaaaccacgttccttcaatagatccatcgccgccattatggtaccacctaaaatacaagttactaagttactaaacctacgcttctagctatgaaacattcgtattaccatgtcatgcgttcacattcacatattatcgtgtacatttgaacatcaaaccctaactatacttctaatatggaggtggctaaaatgataagactttcttacctgtggcaagcactgggtcgaccaaaaatactcttgaattcttgggaaattcatcaggcaacctaaagaagatgtatcaaaggtgttattataaacacttcagtaactacaaacacaatgctgcagagaagttcttacttgttaagatacaccgatggtaaaagtgttttctcatctctacttactcctgtaaaagaaaagaagcacggggacatcaataagctatttgataaaagttttcatttttgacatccgaagttcaggcaagagatgatatatagctagattactaacctaaatgataaattttattagcaggtaaaactgaggatgcgtgttccgcaagagcaagaccagctcttaatatcggaacaacctacacagagacaaaaccaagaattagaaacgcttacatgtaaggtcgaaaagaaaatatagacaggaagagtttgagggataaacaaaccgcaataggctctctaggatcaatgaattcaacagaagcaggacccattggagacattatttcacccacaacagttggcttaaccgcatagagcaaaaaacaaaaaacaataagcaaaaaacgggtaggaagaattcaagaataatagagatgtgaaattctacgcaccagccactctcgtgatgcttcatacatgagtaatctccctagttcagctattgcattccctagataattaaaaaaactcaagctttaaagatcaacacagacttatactagtagcaaacctaaaaaaactcatattcaaacgcaatgtagcagataacaccaatctaagagctaaagattgtccaacgaatcaaaaaaaaaaaaaaaaaaaatggatgtaaaattcagttctttaacaacaaacactggttaaatcgcagaaatactcataagaatcttatctactcactgaaaacaggacaaggagtttgttcatttctcagaacagagatccagtgtttgatcaaaggatgtggtggcacaaagacctgaaacaccagaatcaaattcacatctttcactttcaaatcaaactcaaaaaaaatctgaaaattgaaatcctagagttttattaccagcatcctgttgctcccgttaatggaagcctccgacgcagccatttttgttctagctcgtatagtccgtcgggaaagtgacgaagaagaagcacccaaattctttaaaataatccagaaattcgaaaatcaaaattcagtttgaatatgcaaaaggcgttactggaaaagtgtgctttggacattagaataaatatatatatatactcgatacctgtgcgagaattggggaggaattaaaggagaggaaagaggaaggattagggtttaggcggctgctgcattgttgtcggggagcaaaacgcagcgtatcagaagaacacctgaaagcgttaccaattgagcacgccattttcgacgagatgtccgaatctggttcgagatttttgcaatgacgatagcgcgggcgaagattaaccggtcgtcactactgtaccgaataactttgggtctacttattacacggcccattgggcttttatattaatttttagcaatttctttccaaacagaaatctacaaattaaggaataaattaataaataatttattaatttacatagagagttttctaatgtagtaactttttaaaagtttctacaagatatttttcatcatagagaatatctttctaaaaccaattgcaagtaaaaaataattatcatgtctataaaacaatatcaaaagttttgatacagtaaaatattataactaaattcaaataagaacaaatacgagtttaagcaaaaaaatattagaaatttcttacatataatatattagatatatatatattttatatttatacaattactaatttataatattgatgggatcatatatttacataggattttcaaaaaaattattattttattaatttatcaatttgtgtcactttttacagtcccaactcgggactggaaaaaattattaatcttatatagattattaatttatcgagtattaatttatagaggttttactattacaataaacttgaaaacttatttagactagactccttaactcttctcctcttcaactcattcatcagtttttgtaacaaatctctgaaactgtacaaaccagacacggattctttgtctgagaattcaggcacaattaagaagtcctaagccctgtttgaagattctcaaaagtctttaaccaaatacagcaaaaaatgtttagagaaagatcaaaccacaatcaaaagtttgtaaaccgaaatagcaacaaaagtctagagaaagatgaaacaacacacatagaaccatgtcttgtggatgtaagaaagattcacttaccctctgtagcaaagtgatgtctttctcaatggtaactttcactctcggcttgatagctttaatcgctctctcctcgtatttggcgagtccctgaagatctgaatctatcacttcctcaattctcttcttcccaatctttgtcctcgtagcaaaataagggagctcggtgaccgaagaggccacaaaagcaaaatcgaagacgtcatcatctccgtccagagcacgaatgagtgactttagaaacgatatcatagcgtatgctgaagtgaaagatcgggaagcctagatcggagataactcgaaatgttaagtcccgcgaaagaggaagagaaaaaaagaattcacggaagaaaaaaaacttaaaacggaggacaaagacgagaaggaaggtgattatcatccgattcacttccaacccgacgattgaacactccaagttaaacgagaaagaaggactcacggtccgagtttctaaggaacatccgaatttctttcaactctcggtcatacttcgcaaaaggtaatcggattttatgacccgcatgtgagctaagctttagcgggttagaccgagttaagagacatagagaatccgagaggaagtaccccgagaaaagaagaaccaagaaaaaacttgatccgagaaaggagttgtcgttaggtggttagatataatctttttcaattagtaaaattaaaaattaaaatttttttatatatataatagcaaaaagtatgaattgtttataattgataaaatatataatactaaattacataataaattttataattggttcaattgaaattcaatataataattgcacaaatgcaagataattgatacagctatattgtaaaagtaatcgaaggatgtgtagattatccaagtggttaggattttataacttgtacaatatctattttcactgtaatataactatataagtttacaaccccgtacaagacattttacactcgaggatctccaatgttactattataaacacacaagattacacaatcacactgtgacagaagacataagagtcattggagccaaaaatctctattttttactgattcaaataatatctgaggtcttcggcgttgggttggtctctgagtttagccattgctctccgttcgatcttccgaatccattctttgctaactttaagaagcttcccaatctcttccagggacttgggcctgtagtcttgaagaccataacgtaggaccatcacttgcttctctcttggctctaacccttctagaagatcatgtatgtctctcctcgcgctctgcctcatcacggcctcctcaggactctccatcgttgtgtctggtgtaaattcctgcatactcggaaaacaaacgttgagtctcaaaactgaaccaaactgaacaaaaagaatagcttaaatctaaactgaaccaatctttatgataaacctgatggtaacagtattttcatatccaaaaaaccaaatttaaacttaaactaatcaaatcttggtccttgttcgatagacatttctcaaaaccaaagattgaagcaaactaaacagacataccaggaattttgtagtaaagcaatccccaactttcttgtcaattgaaccgaccacttttaggcattggttagctgctcgaatcttcttcaccgagtggcctgttagttttgcaatctcctcatcagccgcatattttataccatggctcgttttcagggtcttacgagccttttgtatatgattgatagttcggattattgatgactgccaaaaaaacagaaacaataaaggaaaacaagtgaggttctagctttgttgaaaatgagacaaaaagggccaaaaatcaaaatgcacaaacaggaatatggacgcctcttgcatgccgtgacaccatcgtagacattgattttcttatccaatactgcacatatgttgaaaacttgtaaccccttgtgtgatcaaacctctctgctccttgtaacacccccacataccctgcctgaaaaagccacaacattaggacaaaaggaactacaatgacaattttaattctttccacttgcaaagtttcatcatttgtgtaccaagcagaatcatgaaaccaagccagacgtttcctatctgttctttctgtaatcctaatctaaaacatagaatttttgcaagactcttaatacgattctaaggagagagatgaacctgaattaaatcttcgtgggcgattcccagtccacggtaatttcttgcgaggaagagaaccaaagaccgggtgcttttcaccagttcatctctacagtaccaaccgtaatgtagattgcgcatcaggagtttctcgttcatcccagctgctgcagcccaacaactcaaactcgctaccttaccactttcttcctccagttgtgttctgattctctccatgtccgccactatctttaaaagatacatgagagtgtcgtaaggttaacaaaaagtgaacaaaggaaaggaaaaaaagttacaggaagatttcacactgaaccttgactcctgttgacatctcagtctcgtttctagagatcctctctcttttctttctatattttggtggtcttctcactctagggacatcaatattgttccatgtagttcttaaaccgattggcagagaactctgatcaccattctcagctgtcacactcgacctccttgctttcttttttacttttctcctcgaggatacaaagacttgttgattcggcgtagtatccaccaactcagttgtgtcagataagcacgacgtgattgaggaaccacgatacctagatagacaggttttaaataactcagcagcccccaacttccccatttgcaacataatatctctttccattcttacagaatccaaggcaacaaacgtttcctctagtgccaaaaggttctttgccagtaaattgtattgcaacatgctacgagatgaatatgatctttctgcagaacccacgccaatattttcctgaaaacatggcaaagaattctgaatatcgcaaacaaggaaaaagtgtgaaaaagtgtccatctgcagtgaaattcaacacacctttgggtctttgagctcaacataaacattattttgtgcagtgtaaggagatacagatgcgcagccacatgcttttagagaatcgttctgataaattctgctttcctctttgactgaggatagaaacgaccacctcgttgcaaccacagaagtcattggaattctaactgaagcatcaagtaacagagaagccatccaacaagtagcaaagacgtcaaattttggatcaagtagttggttatatgaaataagaagcatctaatttttcaagtgaaaacccataataacaacggcaagcacaaagagacgttgcaaattcgatcacaagagtgaccgtaatcataatttttgtactcaccgaaaatggggaaagaagtttggtcagatctcaataacgagagccaatgtttaatcaaaggatgaggatgtacaaagacctgatccaaaggaaaatatttcacactaattcaaattaaattcagagagaattcaaagaaagagaagaagagagcgtcatcgggctaccagcatactattggtagaggtcatagacgatgttaaactcgatcgcactaaaatacgtggccgagaagtagaggaggacgacgaagaagaagaaccaacaatctatcatccgaaaaataaaaacacacagagaaatcagctcgagagtggacgcacgcgtgtctatacgattgatatgtacatgtaaggagagacaacaaacctgtttgggaatggggaacgaattgaaggaagccattgagacgcagatgggagcggaggaaggagatgattggagtcagtggagagatatagtttgtgtgcaaattgtatggtctacgacttctctcttctaatttgcctaattccctctctccgtttcgttgccactcttttttttttttttttttttttttttactcagttgtaaatttttatacacaaaatatctaaacccaaatccaaattttatgcaaccataactgaataaaccgacgttttcattcaatgtatatgtttatagcaatatcctaatcactagaacatgaaatgcaaacgtaaagaaatataaacttggtctatattaaaagagaagacaaaataatgctttgtgtaattatgaaaaagataagccatgaggattctatgttgtacaaatctaccagaggaccaaaaaagaaaagtgaaagaaacagaggatcatcgactaaaatccggcatgccctccgtcgcaggcggcacaaccagtatcatcatcatcattttcgcgattaggtttagtgctgatgcagcaacacacgagagccgccagcaagatgaatccccaaacaaatgcaaatgattgtgccagcttcaagaatttctccatttttgtgttcatacaattcctcttcttgtcatgatcacatctctaataaaccacccaaaagccttgaaaatttcattttaatatcggcagaaataaaagaatggaacattgtagatatgcatatcgagaaagatgtgaacaagtgttttaatttatagagaaagaggaatcaagaccaacatgttcgagagtataaaatgacctgtgactcctttatatattaaaccatgatgggatatgatgttgaatgatctgtgggcatgtgtgggatttattatatgttttaatgaccttttttgccagatcgaataattttgttggttgattctttttttatgttatttatcattatgtatgcgtatatgactattacaacctcattttaattacctttaatggaataaatgatacataactgaattattcagccatgaaccaaacacgaggaataaagaagaagaaaaaaaagacaaagcattcaagttttttaaaaggaaggtaagttttctgtttgtttttatgctggagattaaaagtgaattactgtacatagatggtttggttgaattatgaaaataatgctatgtttttgttatttatttaagaaaactgtcacaagtgtaatatattatacattgccaaagttcttcatttatatattgccacaagtgtaagaattccttgaatcatttttattttgatttagtgtatcatctaagtttttctgtctcttgactcacatatggttctaagtctaagtggatgcatatgaatccctactgggccaaaaataaagagaagtccatggagattataaaaaaagttttatggcccactggacaagaagacaagttcatacatggttccgctaatatatgaaaaagcacaaatttggtccggtatggttaacaattttgatcaaattgtcagcattttcttatatccaaagagttccagatcatttgaaagaccatttgaagattatgaatgttgtactatccgagttaagaacaaaaaaaatctgattttcaaaggaaacacatgtgagaatcatagacataaacatgcaacattgcaacaaatgaccaatcatgagagagtttgccaaataccatgctaaagattcgaaccaggacctttaggtatttagtttgagtatattatctcccaaatttgaaactgaaacgtaaggattatggaaagaaataaacggctggaaagagttagcaaaagcggctaaagtcacaatcaagcagaaaaagctagtgggcttttcacaacggcacgctatataggctgctctggatcctacaaattaaaattcttgtgtgactacttaacgctatttcctactatttatttatacgtttatatcaatatacacgtaatcccattttcacacttcatataaaacgtttatactccatctttatttttattttatcgacaaatttgtttctgtgaattgtttcaaatcttcaatccaaaagcagttcatacagaagtttgttttggaaatgtaaacacaaaaaatatttgtaacggacaccaataatttcaatagatattaattaatctgatcaaggaacaacagattttttgttttgtttaaggtagtaatgtttacaattcgaaaatatttgaagatttgtagtaacgacgcgtagaaacataagttcgtagttatttcataactttaaattgttatgattggtgtagcttgtagcgatgacttcatagtttaagaccactaatcatgctgtcattatgtccactcaaagccgtaattttaaataaaaccatactattaaaatttaatacaaatcatcatcatctccgatcgtataaatcagaagcgtcattttacaagttgattcctttgctctaataatattagtaaaaaaaaactttgcattgaattcaattcaaaataaacctttctttctttctttctttcttctctatcattttatctgaatccgcctcccaaattcaatcctttaattttcaactccaaatcgatccttcaatcaatttctgaaacttttagtcatcatcagctcaatttcggatctccggagttgtatttttactcctttgtcggaggtaaaatggctcagtcgtcgttggtggcggcggcggggagaagcggaagggttatcggcgattatgcggtgggtcgacaaatcgggtcggggtcgttttccgtggtttgggaagggaggcatcttgttcatggcaccgtcgttgctatcaaggagatcgctatggctcggcttaataagaagttgcaagagagtctcatgtcggagattatcatcttaaggaagattaatcatcctaacatcattcgctttatcgacatgatcgaggtttatatttctcttgttgtttctgggtttttagttttttcttattgctcttagtttctagctagaggatttgaatgcgatgagtctagatgtttaggtttgggttttggggtttagtgagttctctttggttgtctagtaaaatagaatcagaacagtcatgatatggaatgatgtagctcgtataagctgacattgttggtgggattctaaaaatgtgtcagctttgttgaatattacaacgaggaaaagactaggtcatatgttttagctggacccttatgtaggctgattattagttgtattggaaatggtaaatgtttaaactttatgaaacttggtttaggctcccgggaagataaatttggtgttggagtactgtaaaggtggtgatctgtctatgtatattcacaaacatggaagtgttcctgaagctactgctaagcattttatgctgcagttaggtacaagtttgaaaaagattcttcatcatttactgttttgtttggatcagtagaatcacattctcattctttgtataaattttcggtgtaatagcggctggcttacaagttcttcgtgacaataatatcattcaccgcgatttaaagcctcaggtatgtctgataactcaaacccagatttgatctttttatgtcagttagaccatgacaatacgtgagagctcattcttaaagattaatctctcgaagagttgaaaggacgccgtagaagggtattctgttaggtttctcacaggatatggtttctttccgagaaattctttcactagctgagataaagattttttctgaaattgaaattcgattgctaaggttctttcgttcttgaaacagaatcttcttctatccacagatgataatgatgcagctctgaagattgccgattttggatttgcaaggtattttagtcagcccctttgttacagaaacaatgagtgtaatgtgataatcagagttggtcttatatggtttctgcttttcttgtatctatctatctagcacttaaacatcacactatctagcctgtggtagcaccctttgagtttgtaattagcacttaaacatcacactttcttagctcagatcgttgcagcctaggggtttggcagaaactttatgtggttcaccactgtatatggccccagagattatgcagcttcaaaaatatgatgcaaaggtgcgactttttgtttctatataccacataggccattcttataccatatcctgcttaaaatcttcattgctacacaggcagatctctggagtgttggtgctatattatttcaacttgtgacaggcagaaccccttttacaggaaacagccaaattcaggttttgtatatcaagttttgaaaatatctagaaatgtaaatgtttgtgttttggtgaatgcagcacggctaacatgctctccatcttatgtccacagttgctccagaacattataagatcaactgaattacattttccagcagactgtagagatttgagtaccgactgtaaagatctatgccagaagctactgcgtcgtaatccaggtaagcatctttgtaaatatatttccagattctgttagcatatgtgggtttatctaattttgaagaagttacaagagaatgcgcaagtcagactattttcatttttgtcatggtcacagtttttgttttgtgaaaaattacggctaaaaatttgaaattgtccatttgggtgtcttaaacactctgggtattgatttcaaatggacgtttaccattaagctcctttcatggtccttatttgttagtgtttaacattttatttttggggatcttctgtccgacagtggaacgtttgacgtttgaagagttttttcatcatcctttcctttcagacaaacaatcatatgatttcacaaggtagatatggtgctaaagtagtttctttatcatttgtggtataaactgttttattgatgatgatttacgttgcaggagtagattagattcacgaactatgaacgattttcattcatcaggaagcagtccctcaagaaatatagaagaaatttctcaagaagacgggttgccgttctttttagatgatgattctagtggacctgagggaagcccttcatcttttaaacatacttccccgatgaagtcatcttacggatttagtgttgaaagaagggaggcagcattaagtcctttgaaaaacatggatctttcttccagatatagtagagtcagtcatagagcagaaaccaataatttcaagtttgagggccatagattatcagatagaagccaattcaaaccgtcaagcttacctgattccagatcatttagtacccaaggaagaggtaatcaaatttctataatttgcttagcccataaaactaaaattgtctttggaaaagatgcctcgcgcagtttctaatatatgttggttccggaagtaggggattctccagactcaatggatcaagattatgttctgatatctggaccaccggttgatataccatcatcttcatctggttctccgaagcctttcaattacccattcaaatcacattctcctcctgtagagttcatcaagagaaatgtaactaatttaacggctcctatgccaatagctagtgctactggcaacaaccttagtcgatttggaagcttggagagtcagaattgtatcccgggtacttcccatgggtctctggatcttgtagatgcttttgaacagccatcaactaacagcttgacaagaatccggtctttgcaaaagtgtgcagctgcaatagcagaattggttcatgaaagggttagcaacttcgaatatagtaaagttctgcacaaaaccttactaacttgagtttctgagcgttttcttttcacgtttcttttttcatagggtgaaaatggtaagcatttagaagctttctcgatccaactggtgattcttgcaatttggaatcaagcactacacatctgtcatactcaggcagtctcgggtatagaaggaagcctgctccaagacattaacagagtaggaagaaatatcagccacggaggatcagagaagttattgcctcagattcagaaagaatttgtccaggaagtggagcgtgctgaagaacttgccaagtttgttgaatctggtacgcattttcttgaagtaaccaaactgctgagacaatctctcgtttctttattttgattagtcagaatcgctaaagtttagtggctaaactaaaacatcattgtagataatgcaaagatgccggatgcaatggagatgatacttcaagcagctcttgctcttggcataagtggaggagtaagtttatatttccttgatgaacaatcccaaacgaatctggttattattgcttgttatttacatttcactcacaagtaggagtgtccaatccgggtttggtttctgtgaaatataagatcaaaaccaaataccatttggttaccagaagtctttaaagagtaggcaaatctctctttttgttgagactttggaatttgacaattgcaggtagatgaagtgatgggagacgcagagaacgcaggaaacctctactcaaaagcggtgcgtttgttagtcttccttgcagtggaggcgcagacgctgattctcaatccacctttaacactcacaaactcagtaaggtatcgactcagaacatatattgactcactcataaccagattgaaacatctgcaatcacatagaagaacttcatatcctcagaagcaatgaggaggaacaaaaaaatccgaaatggttctcgtgtttgttttgttcagtgtctgtaattgtaatcatttgattgtacagccaaaaccaaaaaacgtaattcttaattcttttggggttaatccggagggacttgtaacattctctttgctgtgacgctcatcaattgtttctatagatttaattttaatatatttgaaaagaatctggttaaatttccatgtatgatgttgtgaatcttgtgatattgaaatatatattgccaaatcggtgactgaacttttttcgttatttcatgttgtagcaaaacattggacgatgtcttattcgaaagctctattgtctaaactctaaagtctaaacatcaaaaagatagggacagaacgaaaaccaaaactttctgcagctacatatattaagaattaggaatccataaggaaagagatacaaagaccataaagcttggatcaatggaagagctcttgcacaaggcaaaattgttatcttgaaagatgctaatggaggagcaacaaattgtaaatcttaactcctaaaaactgcaactactagactactactatacactgacagacccaaaaaaactactaccaaacaaaggacaaaatgattgtctgtttcttaagcagaaagtagcttacactaaagtatataagacgttattaattagggacagttgataagagcttcttcaattcctcgaatgtcatgaaggcgatgccaacaccaggaaccactttgtagtattctggtatgattcctctgtatagccctctcatgccttctgtcttaaatatgtgtttgaatgttccaaagagtcctgtggtatacactctcgctcgcccaccagctccttccaactgcattcttcttctcaccaggtccaatgggaatgtcgctacaaaagttatcagtataatataacaaactttcgtgtaattttctttgggctaaattatctatggtaactagagagaagggtcagatcagatcaaaaacctgtagaggaaacaattccggagagactgccacaaccaagactaaccacggcatttgaatcattaggcctgaacaagttcaaagacaaatgtattacgataggataagttaagactcttattggacagatgaactcactaggcaatattgatagtcaaatcccaaaataaagaggcatttacctatgagagagccaaaatgttttaaaagtctcatacgctgcgaagctgattgcaagacttggaccgacaccctgcaatacaaaagatgtaccaaaaagcttcaaggcaatactagttggatgataatcttacagctagaacctagagcatctaagacgattccaagtacactagttctatattactactagaaaatacaccaaagaaaaacacaaacttaaactatagatgatttagttaaacttttaatactttacataacacaacacttcttaagtttttttgactatagcgtgttattctttttaaaaccaacaacttcaatttcatcatctttgaacttaaagatagattccttaaattctcaagcctgtagtgtgtttttaagttgtttttagagtggtcactaagtaattacagtctcacactctttaaagttcttccgaaatttgatcctgagcatgaaatgcatcatcgagaaatcatgtctatattcttaactgcttacacaacaattaaaattcctagtgcatatatcaggtgctttaacacctaatcagctgtttaaaccacctaattggacattaagaccacttaagacactccaatctaccctagcagcctagggaaaattgcactggaaggtattggctaaatggttacttataccgactaatttaagactaccaaggagttcattcagaagaacaagggtaggcaaataaaacataccaacaatgtcgcaccaagtcctttatatagacccaaaattccctcttctctgcaaatggtacggaaggcatgcccaacaccctgataatagattgaatttctctggaaaggatcaaagataatgtatttaggcaaaggggagactaaaaaccctttcttcttaatagttaaaattaacgttgataatacaattacctgtgcagaaagccgtgtccttacaagatcgagagggtaggtagctgaagcagctgttagtccagccaagccaccacttacaaagtgcacagaaatgtccacacccgcatttcctttataactctgcaagactggattcgagtgcaagaactgcaaacaaaaagcaaggcaaggcttagcatgaactactacagaccacactctaaaagagacttgaatgcaacttacagtcttgtattcttcatatgcatagaagttaactgcaccataaggaagccgatgagctacagtaaccaagtttcctttccaaaatgctctaaaaccttcctccttaacaatacgcgaagcttcatgccaaatgtttggactgctcaagattgcagcttccgactgcataccttgtatctgtcaatacaacaataaaatcaattcagcttcaaatagccttagggtaagtcaaagtttccaactttatatcataactggatccttacacaatcataccaagaatcaaattcagatgcctgaaaatttcttaaatttcacattaacttgtaaaaactatacctgaaacaagattgtaagacgagcaagaggagcggtgcatgtcttactaaatgcgccggcgattccaccggcgagaagacgctcaacggtgccgaaatggccttgctgctgattcaacgactgtttattactttggtgatgttgatgacagctttgtgtctgttgcgtctgtggttgttgctgtaaaagtttcctgtttccggcgtctacgacggtgttatgaacggcggtggtggtggctgtattaagagctctctgtcctccttccaccactacaccgactcgagcttccatattcaaatctctttctctctgtgagattactctgtggttgatgcggcggagatggaagctgaattcgcatcaattaaagcggaaagggtttctgaatttttgtgatcggagattgtcagattggagaaatcgtcgtggagaaggtaaaccctagagaaacccctaaaacctggtctgcgaaggcagaagggtgttttggtaaattatgtaaaatatgatgacgcaaacacatatatatagcaagatttgttccgacaaaacttaagaaaacaaaaaaaaaaaaggcaaaggaaaaagaaacacaaatttgatttttgggaattcgaattttcaaccgccaacattttaacaaaaatatggatcgtgtcacatcaacaacactaacacaaattattagactacttcttaaccagctatttaattgtaattgtttttttatttgtttttactgtaataaataaacaactaacatgtaaatttttggtaaatgataacagtaaatgtctagatcgtgattagtaaattgacatttccaaattttagtgacggatttgtgtttagattcgatactgtatatagagtatggagaagtatgaacacctcccaaattacttgcataagaaatgattaattggaacagctttccactaccacattagcttgcatatcattccgaagcacttgcatttgctcaaaccaaaagaagatggagctaaacaaaaataaactagcttgaaaaaaagataggtgtaacatgagataagaaataatggcatttctatcaaagtgctaggaaacaaagttaagtttattatagcacccgaagattaatccttattatgcaaattaagtttctagaagtgggtcatctcacctaggttctctcactacaaagtacatgtaaattaccattgtggcatggttgtaacttgcaagggataatcagattgaatagacgatacataaaaatgtaaagtcacggtaataatatatatcatcaaacctactcgtattttaactttgcgtgtgtttttgaacaatctcatatttaacttatacccgtgaatcttgaacggatcgagataggttcctcttgtcggactatatcaaggctaataagctagtccattccttacgactatatttaaagagaaagagagtgacaataataggattgtacattttgatacatattataagagtgacatcaattagaaatgggtcataccttttgagaccactggctgcagacagcacaaccaaaaagcttatcaactaatctaaattagggaattaataaattaatttaccaactaatcatgtagaagaagtatgatttatttttgttgtccaagcatcaagatgacgaaatgatattagaaaaaagacaagtatggagaaaaggtaagaaaaagtatacgttagccaataggactaatcattttatgaatggctgtgaaatgaattgagctgtagagcaaaaaaaaagttccaaattatagaaacctatctcgttatgtttaggtttatgagttaagtttttgaaatgaaaattacttttctaatttgtaatttggaccacctgcatatcaaagatctcttccccattttgtttttagagtaaatcataaaacccgtatactccaaagtttcatattaactgaaactattttaacaaaaaaatcattcaaaatgtgtttttatcgactaaaaaaagtagaaaaagttttcttttgttgattatgttttttcatgattataccttttgagcaataaagggggaaacttgctagttaattaactgaaaaatacgtttactaatttttgtttttacctgcaaggctctgcctctgattacaaaacaagatcgattgtgtttcctgataataaaaataccttttttttttttgtagtagtagtagtagtagtttgaagtttgaaccactattacgtatctcttttgttgaaatcaactatgagtccgcgggacccacatagcgtcgtacttttccgatcatcgaataataaatcatcacagataaatcgacggctgtgattaatttacagtgtacaccttttccccactctaatcttcttttaagtgaagcagaaagcttccaaaagcttagccaacaaaaaatggcagaacttattccttggtactacacttcagggtcagggatcgtacttgtacttcaaaccatttttctcttctcgatcgtacgtgctgatttaccaggctcatgggaactcattgtacaagacgccggtatagcttctatgcacacggcggtgacccggttcaacacggtcatccttctagaccgaactaacatcggaccgtcgagaaaggctcttgaccgtcaccggtgccggagagacccaaaagacgccgctttgaaacgcgattgttacgctcactcggttctgttcgaccttggtacaaatcagatcagaccactgatgatacaaaccgacacgtggtgctcgtcgggccagtttttatccgacggatcgttgctacaaacgggtggggataaagacgggtttaaaaagatacgtaaattcgaaccctgtgacccgaacgaaacgtgcgattgggtggagcttcaagataccgaattgataaccggacgctggtacgcttctaaccagatattaccggatggttcggttatcatcgtcggtggtagaggaactaatacggttgagtattaccctccacgcgaaaacggtgccgttccgtttcagtttcttgctgacgtggaagacaaacaaatggataatctctatccgtacgttcatctcctccccgacgacgacggtggcaatctcttcatcttcgccaacagtcgcgccgttaaatacgatcaccggataaacgccgtcgtgaaagagtatccaccgttagacggtggtccgaggaattatccgtcaggtggatcatcggcgatgctagctatccaaggagatttcaccacagcggagattctaatctgcggcggagcacaatccggagccttcacagcgcgtgcaattgatgctccggcgcatggaacctgcggacgaatcgtagctaccgcggcggatcctgtttgggtgacggaggagatgccgttcgggagaatcatgggagatatggtgaatttaccgacgggagagattctgatcataaacggagctcaagccggaagccaaggattcgaaatgggatccgatccgtgtttatacccgcttttataccgacccgatcaaccaattggtttacgattcatgacgttgaacccaggaactgtaccgagaatgtaccattccacggcgaatcttttaccggacggtagaattcttctcgccggaagcaatcctcactatttctacaaattcaacgccgaattcccaacggagctacggatcgaagcgttttcaccggagtatctgtcaccggatcgagctaatctccgaccagagatccaagaaatcccgcagatcatacggtacggagaggttttcgacgtgttcgtgaccgtgccgttgccggtggtggggataattcagatgaattggggaagtgcgccttttgcgactcattcgttttctcaaggtcaacggctcgttaagttgaccgttgctccgtctgtgcctgacggagtaggtcgttataggattcagtgtacggctccacctaacggcgccgtttctccgcctgggtattatatggccttcgctgttaaccagggagttcctagcattgctcgatggatacgaatagtttcttgatttaaaaccagaggagatatttaaaatgttaatttgttaaatagttaaacacatcatgtaatataaatattttcatggaaaaacttactccgcaaagttaaccatcttaatttgatctgattcagtttagacttttagttattaagttaaaatgactataaaatcacttttcaaaagtgcaacaaacagtaaacacacacaaaaaggaacaaaaaatggttatcatatgaccaaaccaatagctaaaagttacataaacttggacgtcgtcaccaccgtcaccaacaacagcttgactcggctacacactcttgtaagtgtctttcatgcccacgatcacataagcacatattagcaacggtcaaagtggctagcatccagtaaaagcggtccatgcagctgctattaaggtctttcccgaaccagcccttccctcgcgcccctcaaaggcttgcaccctaatatcttttcaactcaacatttttctcatgaagctttttgagagtttagatttttacttgttgccttattcttgtccttcagtataagtgaatcttgatttcaactgtgtgatgcttatgttacatacacgttgtcgagtatctaagtcttttgacaagattagatccgataatatagtctgtgcatgtttcctgtaagatgtataacatcatcgtactaagctggttcgttgggttgctcaaagtcccaaatcataatggtaaaacagaggtaatgtaccattatgattaattacctctgttttgaaaatacgtatatcataatttaaaaactattttgtatataaatttggacttggaattcagttctgtaagatgtattacatacgtttctaaaggctaacgccacactaatgttaaaatgactacaaaatcacttttcaaaagtacacaataaacacagaacataaaatggtcatcatatgaccaaaccaatagctaagttacgtaaacttggacgtgttattcgtccccgtggctgtctcaacgtcatcaccgccgtcagcaacaacagccagactcggctgcacagtcttgtaagtgtatctcatggccacgatcacaaagcagcatatatttgcagcggtcaaggcggctagcatccagtaaaagcggtccaagcggctgctattaaggtctttcccaaaccagcccttcccggaaatttcctcggctaaatgatcactaaccgttatcaaaagattgttgacaaagctagccgctccaagcacgctgaggtaaaacgctatgcctaagcttctcatagaatctgggacttggtcgtagaaatattcttgaagaccgacaagggtaaaagcatccgcaactcctaagactaggaattgaggagctaaccatatagcactcaaggtcatggtcttattcatgtggtgttccttagcataatctaatcttttcttctcaatcagagcagcaatgatcatagcgaataaggagaaaaccataccgaccccgattctttgtagaatgctaatgcctctttcgtttcctgtggcacgtctcaaaagaggaacgaggagtttctcgtagattgttacggtgatgattatggagagagctatgagagagaacaatgaagctggaggaactatgaagcttgtccctgtgatgtgtcggtccattattatggcttgtttgataaagagtgttgagctttgagtggcgcatactccaaaggctaatgtaaagaaccagattggaatcatgttgatgagtagcttaacttcttccactttcgtaaccgttgcgagtcgccatggactctgcttctcggctttagtgttctcgtttcggtcctcaataactgctgctttgtctagaaatctgcaaacagaatcggaatcacttacatgcatgtttggatactataatatgctttaaacggattcaaaacttatgtaattttttttttttgttgaatatttgatcaagactaattttaaacccctgaccgaaattgtaacaaatcgatccatattattttggatatatgctacttgtttgctattgttaaaaaaaaaactaaaacatccaaaccaaaacctaacttaaaccaagactaagcatccgagttgttatgcacttacttaagattctttgagctggaaagaagccggcctttagtatactcttcattagttaactcatgaagaagagaagaatcactgggacaaggaagatttcttttggcaatggcggcgacaaagacttgcaacattggggtcaatgggctaccagaaggtgctctataacggtaaaacggtttgccgatacggaagataaaaaacgaagtagccataactattgtgagtatgatgctagccacaccccaaccaatccggtcttcgatatagacaattacagtcaccgcggttaaaataccagcgcatagaccagcattccaccagttaaagtaagacattttcatttttcgttcttccggatggccatcttcgaattggtcagctccaaagctctcaagggatggcttatgacctccagtgcctatggagatcaagtagattgcaatgaagaaggctatctcgtgggctttccttggctcaacacacatgtcttcatgacatgctttcaatcccggtataaaccaagacaatgttaacagaatcaagccctgcaaatttgtaaattcaacaaattaagacaagaaacaaggaaacaaaacatatatcaagttttgactaatctcaaaatttgttgtgtgtgataagatatgaagttattagagctggtttttataatagtgtccaaaaggtactaccgatcaaaaccgacaacaaaataacaaaaataaattataaaatataaaatatagatatatatattaataaggtagatatataaatatatatttaaaattttgaactcatgatatttttgggtatcattgactcggttatgagagtatagaagaggtgtgtatatgtgaaggtctatctttaaactattgaaaaggatcgataatagtttttgagtattattatttatccggtttctcagaaattagtaccataaggtaaatggtggttgcaagtaggacagttccataacggccgagataagcatctgcgacgaagcctccaagaagaggcatcaaagtagtgacaccagaccagtagttcgtattttttacagccatcttgagatcttggtgaagaatggtagtcaagtagaccactaagttcgtggagatcccaaagtaacttagcctctcgctgaattcgatacctttatgcatatatcaaaccataagactataacgtaaaaaatacttcacacataaagttattttatagatataattcaaaaaaatctctttagaacgtttgatatatacataccaatgatgaagagtgcagctctccaagctccggtttgagcccgaagcggaatctctcctctactatcggtcgaagaatcgagaacccatttttgttgatcatcatatgaatcttgaggttctgtatcaaccttgttgtgctccataattttttgtgttaatgattgggaaagagagagagagagagaaagaggattgttgctgagtaagtgtgtgatgtgtttgtggagaagcttggtcctcttatataatggataacattcactatgtttgactcttcctccatagtgcttccaagattctttaaaaaaaggacgacacgttaggtttacaaatagaagacacataattacgaacttctcaacttccatttcgatttatttgtaaatatatatgacataaaaagctaccatttaatttcacacgactttctatttgatgattattataaagtctatataataatacagggaagaaaatgatagtgaagctttgatctaagataagtacaaatctcggtatagtggtagtcatttttttttccattcggtcattttcagataataacttgtgtggctttgtggacctaaaaagagacataaataaagttgaaaattccctgaactcttatgattaaaagagagtcaaacggatttgccaaatcaaatagagatggagacagaagaaacctcaaatttgttcgaagttttctacgaattaaaaagatttcatgcatgaatttccccatgagttaagaaattttattaaagtagaaatgtgatgaccaagttttattcttgttcaacaactttgagctatttatgaagccaaaaatgaatttacacctcaaccgaaagtgaaaccaaatataaagttatacccatagcttaaaaaaccttagcatgcatatttcgttgaacaaatatttttattagaatcttatagagtaaaacctttatatcatatgcgtttgatttgatgccaatagagtaaagattctctctttgggtctttttggagatatctccctcttggctacagccaaaacccaaaacattaatactaatgcctgagccaagtgacaaaaacctcttattcaaattattccaaagtaccaaagttttttttgtccaaatttttttttcaagattctggataaaccctctgtgtagccttctaggatctgatcctcgctatcaacaaattcttaaaagatttttttcttttctttttgtcatatataccacattttatttctagaggatatgtttttaatttacaatcctattacaaatgatgattttatcattcgtttacatatttgccacacttaaaaacacgacgtactcttaacattaaaccaaaaaaaaatataagacgtactcttaacattaaaccaaaaaaattatatacgaataactctataccaaacaatgaaaatatttgcaccacaaatatccacgatagccagttgtgcttgcatcatgtttatgatgtacatattaacatatgagtatatgacactacgtacgacgaacgattctacgtactaacatacaccatgctgaaatttatggtaaatttgacgtgttttaatatacatattttaaaaaaaattgaattatgaacctagtgtagaagtattaaataaactcttatatatagcctcttaaattaacttcaattcaataaaacaacaacttttccggatatggttttcattttttgaaaaccttggtctatttaccatattcgttaaaaacacaactccttaattaggtaatattacccaaaaataggtaagattaccgaatgatgtagaaccatttctgaactcccgtacgtatcttcttcggatcttacctaaaattcactattgacaaaaatattattgcgccgccacatttgaaatttgttttctaagatcatactaatatgatatcatcatctattaatcatgtttttaaacactaccacagtatattaaacgattaatatattgcattctagcaccaatataatcactcacgagaaaagggtaaaaaggaagaaacacacttaaacataatcatataagtctccaagtttaacagtaattataatcacatgattcacatttgcattaagggatcgatttatgcttaatactgtaaccaccatcgaaattaatgccttaaacgatcattatcatctagttctagagtgatcaatactgccaaaaaaaaaaaaaaaaaaatcaagtagcaaagaatttctcgtggatgtgtggttagggagtcatgagaccaatcaagttttattaaatgtgttttaagtgattattgccaggagaaagttgtgaatacttagtggatttgctaccaaaaccaaaatcatcatttccaaatcttttctatttaataaggatccaacactaattaaagaaacaattaatgttttagattatgagtcaactcttatcatgtctgaactaatggctatggttgaggaaagtggattaccttttcccatagtgctgctaccaccatttgactgacccttaagcaacgaaattgaatcagatcgtggatgatttcattggtagtttttaattttaaaattttaattagactaaaaatgaagatgatttataatataggcatatagcatacatagtttaaattattttgttaaatggaattattatttgatgtcaacaacatacatactgatttgaatatggatggtacacaacaacgacaacaatacaaataatcaagctacatgtactcggctatcaaatgaacatgtacgtacataaacaaatgtttacaaaaccaagtgaagtccccccccccccccccaatgcttcctctctctctatttttttttatttcttataactttatttaccttaataattatggaatgttttatttcttttgattgtaatatagactatttaagctaaatttcacaaggcttaccaaaaaaaaagctaaatttcacaagattaacaaatgacataaataggtgggaataatcaatcacgattggtaatttgcaagaactactttgggaatcgtaaagctaattatcattcgtgggttaaaatcaagcatcttgtttcatgtcctttttccctaacgataggaccaccgttgtgaggttactcggccgagggaagtcaatttatgtgtatagtacattgcatgcttcaacaacaagtcttgttgaggtctctatcaagaatctataccattgtgtccaaacaaagaataattatcacatgaagctcgtgcttgtttttctttttggcaaatctaatttacctaggagattctgctatgctttcatgaacaagccgtttttgctgcccgatttctgatcagatactcttgtaaatcttctcttattcttgtttgaaaatgatgtcagagagaatgagagagaggggaggaagaggtcagatttcacatgatgatctttgattgaaaagactacttaacttcttccactaagcgctctcgtgtaatgcactgataaatacagaaatagtagaaatcaaatggatcataagaaacacatgtgattatccaaatgaagcaccaaagtctttgcctctttggttaaaagagtcagatcgaacatcattaccttacgagaatactaaacataacttctgcaagaaaattattaccataactatcaataagtaaatgtatgttgttttaatagtaatttttcgtgcaattacctgcattttaacttttttgatacaattacatccttttagtgccatgaaatgaagataggtatttaagaggagtttttaattggtttatgagtttttttataacattttaaaatacaacaaatatttttcaatacagtgtttaccttcttattttaacctttgtatttttaacttgaaacacttgcaaatatgttcacatccaatattacataaatccattaatatataacgaataataccaaattttgactagtctttagaaattaataaacgaataacacattatctacgaaaaaacaaattaaactaaataatatgttattttcttttttgacatcatccttagtttactatccaaaagccattaacatatcacaaatggatctgccgactaaactaaagaccaaaatgtaccgagttattctgttattgaatacacttttatcctacaaactaacaaaaaagcaccagtggtctagtggtagaatagtaccctgccacggtacagacccgggttcgattcccggctggtgcaatttgttttgttttccaaaatctttgagatttaaggcccgttctatttattttgcagacgagcccaaaactgtttaaacgtaggcccaaatttgatctctttatttaagtcaaaggcatatatcacagtacttatagttttcttcttttccaagaccaaaatttgttggagaacgaacactctcgagacggaatcgatggcgaattctcagacggtgatggctatgatcaggttggctagacctcctttccgcaacaatcacgataaggttgctttcgctattcactcttctttcgtcgcttccggttatatcctcaccgccaccggacggcctgctttcgccgacgaggctctctcttcgtcttctcagagttagtattgattccgtttagttgtttttctgattttttctagggtttaggtttctgattttgtacgattttggaatttttagatgatgttggaatcgaaggatggaacgaattcgagggagagtatgcgtttgtctatgcgaatccgaagaaagggtcaaagaaaattctggttaagtgtttggcgatggatgataaacttcttgttgatgccatagctgatggtggagcagaacctgctcatcttgagattaagtaagtttctctttatttgtgctcgattctgattctttttgtgcaaatctagtaagaattttctggttgtttgtgcagagttggggattatgctgaggaaagcaatgagggggattactctgcgcagttcaagaatttggataagttagtgactgatttgcagagtgagattatcgataagcttgatggaaaaccaaaacctgttgcttcgagagcacagtccaggtaatttcccttattaagcaccaagaatttgatgcctcttagtgtttgatcattgggacttgcaacgaacatatgattgtagcttgtattgtcactgaactgtattggcgatgtaaacttagatttgctcattcgtatagtctttttgacagagttttaaacacactgaaataatgtgcagcagagtctctactaattttgagtctctcttttaatgaactaggttttgatttggtacatgtagtctgttctcattgtggaacttcgttttgtggaggcatttgttaattggaccagaatgatatttgtttcctaatactagaagtgtattctgagatctccattgtttatcatttgttgcttgcagctctgagactaatgaagagcctagatattacgatgatacgcctaatccattaggccctcagattcacccctcagggtatacatcaatttctactcttatgtgctcacaattatgatcaaaaactaaaacttatcggttattgacttgtgtatttcctagcgtggtagttcctccgatacctggtaatggtggttacagtgatctcttccctggcccaggtgctggaatgtaccctggcaggtttgttatagacatttatagtttctattatacaactgtatcactttaaatcatttataatgtcactcaccacatatattttctctcccaaggggtggttttggggatggaagcatgcttgtaggtatgtacgattcttcaatccctcttgagaagcaagatattataacgtcttacttgattataatttgttaaagtgattctgtttggttgcaggacctactgatcctcgctttttcccatttggtgatggttctgatcgacctggcttcatgggaccaccacacccgtaaaatcactctttctttcacacacacatagagatacacagccatagatttgaacacatgaaaagctctctaaattgtttctgacaagttaccatggatttttgtttgtggttttgacaggggtatgccacctcctggtgcgcgttttgatccttatggtccacccggtgttccaggttttgagccaggccggttcacaaggtagtaatcttatgcactcagtagtctccttactacactccacaatcataatctgtttcgcaaatggttctgattcttctttatatcaatcgtgtgtagacaacctccaagagggccaggaggtgggcatccagacctcgagcattttcccggcggttcagattttatatagtaaagtaaagccatcgccaaggaaatagagaaagtgtgtgcacaacttaaagtatggtagtaactacatatagacaataggatctatgtggtttgttttttctcagctgtttttttgtttggtggtgttgttggttttattccccagcacactttttataacttcaataaatatataaataaagacttggtttatttcgcttttaaatttccgttggccaagtcagaatcggtcgtcatatagattatagacaatggcttgactatatttgagaaattgaaaactatagcatcatctcttattgcttcgtgttagatgagtatatattggtgatagatctgacttgtaaactaagtcgtactagtgtttgccaaaacgacactagtttaaacaatgtcaaattttcaagcacaaagttggatacttgtgtttctgtaatttgaaatgtagagtggaatcatttttatatatttattgatataggttcaataacaacaatcacactgatacacatataaacattatcgttattcatatattataaggtacatggagacgtagtagtaaactccaagcttccacataaggcccaatgttatctccttcatccttctaatcgtcaacattttatggaagtgtgtatgctataaccaaagggaaaaaaagaaacaaagaacattagatatatcatgaaaattattaagtaaaagcataatataaagatgtaacagaaagtcacttacctccacacttgtaaccgacgggacggttagcgaaattgcaccgtttagggatggtaagggcaacctcaggatcgacaccggaggctttggccgtgtcggaaagaagaatggcgcagagacatttagggttttgagaaaatctcttaatctgagtacagcaacctcctggcacggcggagttagcgtcctgagctgcaccagcacatggagccagcttcatcgcctcattgtctggcgaagatctaccacactcccctgcaccgtcaacgactgttccgatgaggagaatcagaccaagaatgcagagaaatttcatggaagctgccattttgtttcttggagagattttaaatgaaccaagatttgtgtttttttgtttgttagttgtgtgtttgaattcaattagtgaatgtttggtttatatagcggaaaattgtgtggaaatttgaggcactgaagagatagtggaataagcacttgagttgagtgagggaggtagtgttcttaccaacaacataagttccaggtgttgatgtcttagggatcactgaacaaacctcataattcttatttgggattatcaaatcggatggtggatttgtgggagttgtgtcatcaccgtccttatggcttttaaaatggtgctaatggggtagattaaaaatgagttttgtattgatttttttattattattggttaatgtgaagtgaaacggatgaaacattcttgatctctatttaacaactttgaatcttggatgcttagtatcactaagatggtccaacactgtgttttagccttataggagaattgaatatgttagaccttctgagaagaagctcgaatttattcaagtcaaaaaccttgtaccacaagttaattacataagtataaagagcatagaggatgaaaaccaaagagagacagacaactgtgagactggctctgtctatctattgtgttgaaagaccaagatttgggcagagggtttggcataaactaaggtaaatcaaattcaaggactaaacaaaatcggttaatggtttagttgggttcgttacagaagcggattgcgttcttagtaatgttgataaagtttttgctctgtttccgttgaaactagaaattgggtttcaatcccaccggcccgtataacttcggcccatggttctgatatttcactttactttgttgtttttcttcttctgtcttgatgatcttctaaactttctacgatttgtcttgggtctctgtttctagtaagttttatcagatttcgaaatggatcgtgcaaaataaataaatataattaccacggtgatctatctatttattaaaaaaaaagtagaatattaatatttgatgtaaatatctttctgtagaatttttccttaagaaatattctaatatttagtcaatgatcaatgtgaatgaatccaacctgcccatgtgaaatctgtaccacaaacttatttttaagcaatatattggatatacaaactatttttaatcgagcccaccacatgttcaagcaaatcacatggagtgattccagcaaaacacaaggaatattaaatgaaacaaataagcaagaaactctcaaaactagaagatgaaaacactctgggttctttttttgttgtagtcaaattacaaataaaaccaacataaagattcttttattaataaaaactaaaaagcataaattgcgatgattatttggtaggacttataagataaagacagtttttttttttttttttttttgtagtgagaatcgtttattcgttatccttgacaacggtgacagggcaaggcgcgtgttggatcacaaagctgctcacgcttcccattattatcctgtttcattattttcaattattagtcactagatatttcacttagaccaaaagattaaagtttagaagaattcatcactaaaagattaccaatgataattgttacgttaaaaatatcaagaataaatcaaagacaagtgtttattcaaaaaaaaaaaaaaagacaagtgtgctaaaaacaaaggtgtaaccacaatcttaaatgtttgtttttttcttaattatgaaataaagacaaaattcaaagttaaagctaaacctaaaacctaatccatagctaaagctaaatctaaaacctaccattgtcattttcaactagaccttatccatttcgttgagaagtaattgtcatcaaaattttgaatttaccatattcctcaaaagtatatatgtttaattagatagaccaaaaagacaaaaataatttgtcaaccaaaattgttcaaagtaaagcgagatggtttaataaattaaaccacggattcaaaatcaaagccattggtattaaacattgccttaaattaggtaacgagcgttttttaatcatggatttgttccaacaccaaattatatcaatggccctattgtatctcacattttataatttcatatacagcaatactaaacagtaaacactaagcaataatggcattttggcaagaatataaaatggaatttattacataaaaaagaaaaagagagcaagaaattacctttgaagagcactgagtcctctgcttcccatgacaatagaatcgagtttaagatctttaacagcatcaacaagcttctctcttgcatctccccagtataacttggtcactacatgcacctttttatttcaacaaaaccaccattagttattgtctttgccaaagagtctttgaacaaaaatgtattgttgattcggataaaaacctctttctgcctcgaaccagtgtcgagcatatcaagacatgcgatgtcggttttgacaccgtatttctccataatctccggttccctaaactctgccaacggtatgagagctgcaagcaccaaattaaaccggattaaaccgacagatcatttcttttcagaatccataccataagaagaaagaaacttacgagaaccggatttgaaccagagggagttacgagattcatcgccagagagtggtagagtgtggatgatgtaaatcgtgtctcctttgtctgctaagttctcgatcgcccatttcagagcgttcttgctgctctctgagaaatccatggcgattccgatattcctgtctttaggcatctttcttgaccctttttttcttctcaagaaactttgagatggttttgtttttctgatattttctagagagaaatggtggtgacttgtgagaagttatataaaggatttggaagtttcgttgatgcttcttctgatgcaggatccattatgacccatttgttttcatctcaaccgtccatttttaaatcgtacggtaccaagctaaagtatttagatttttgtttctttataataattatttcaaaaaaatctttcttagaccgacataacgataatgagatcttctaatgaattaattcataattgtttctttagaacccgtactaagcaacgaatccaattacgtacaaacttgtataaaatttaataaattcatttaacgtatcatttttgtcttacagaagctagtaattgcttaaacttttatctctatatattttatttagttttataaatatcatttaaattttattaaaaactctgaggtgtttggatccaacaaattgatggccaaaaaatatcttatatattgatatgttttgtaagttgaatcatgatccgctaataaacaagtagcacaaggatctcattatatcagatgtctttcgttagtattacctgacatttctggcagtgaatttaattgtaaatgagttgtttaaccgttggattaggatcgacatgtgattgccatgaaattgcacgtttgatgataggattaaatttttatcatatgtatatgtaaaaagaaaaagaaacctcaagacttctactatcaagaagaagaaaaatgatcaactaatgacttaatttttgccatcattgtcgtggttgaatttcttttatcgaattttgggctgccttcatgatacaaactagaaaacatcgaggtactcatctatgtttctttattggtagcgatgtcctcaaaaacgctctcccaagcaagatatagacatttttcgttgacatattcttcatattaatgaattcctgttttgggaatatatggactgctttgcttggtatgatcattgataaatagtgccgacaatgtttagtattcttcaaaagaccaatcaacttatacatttgaaaattgaaatcatcctgcctgatcctgatggtttattactttatttctgtgttcttaaatttattttatggggctaatatgaatttttggaaatacctttgggctgatctatttatatgggcccttatatgggcttttcacgaaacccacgaaatgtgaattctttctataggtgcgggcgtgcggccatttgtaggtctaaaataaattcttggatgcgggattaaagcaactatgctctaaaattattttacatgtaatgtgtatgaaaaaagttgattatttgcgagtgatcatgctataaattgtgtgaatgagttggctagaaatgcatagcatgaacatggataatgatgagtgtgataattatcgacatgatcaaaggccggccacaacgattgtaaaagttgtaagtgtcaaatgacattctcaagaacatttgtggctgtgacaagggtatagtgtcaagtgataggggtcgagggtgtgttcgagggcggtatggtaacactaacaagagaaacatttcaaacattctcaataatgtgctcgaatgcttccgttgatgagaatatgtcatgatgcttcacaaaaccctagagtcaaagagctgcgtacatcttttattttgtagaacttttcatacgttaaataagcgtacattgcaagcaaaacattcgaaggtctctctctctggctaagtctaaagttttgaggaaattgggtatggtctgccgtgtatgcatgtgacagtggagcctacgcaagcgacggtaacatgtgcgatccaaccaagtataatcctaatttttgtttggcaatcaaagctgcaaattaatattttctgtcgttggcttctttatgttttgagtttataattcatctttgcgtgttctgcgcgagtccataatcaataattaatcatggattgtactttgtaccggacattatattcggtttaggtgtctgattaattgtgcggacgaatatattaattagttaattataacctactgtttgcgttccgggttaaagtacaatagcagatggattcgtgaatgtttcaaattacagtatcttttttatttttattttttttaacaacttcacatttcagttttttttttatatatttttttttataaagaattttgatccaggaatattaagctggaaattttgagtagagcatactaagaaattcaaaatgtttctgaaaatgcaaaatagttgttaacatattgttattgctaagctatttctttgttaattcaaaatccaaaattcccaaaatatatatagggttaggttagcgattatgatatatatactagtaatcaaagttgtgtaggtaattagcaagtaaggatcactggtactaagcaacttatctgatcaaccaaatacttttaaaatcagaattgtataaagaaatagttgaatatacgaggaaacaaagaaggtcccatatggttacatggttgggaatagaagctgcagccaattatatttttactttggaaacaaacatgaagtatataataacagaaaaagagggagacaaaagcaaagaaaagggaattatgaaaacaaacaggcttaagtaacctcccaaaatactaatataaaagcatttataatatttgatattctcaatcgtgaaattgttattgtcaccgaaatcaaaatggactccaccaccccacccagaaaaaaaaaaaaaaacaagataacgagaagtaataattaaaacaaaaaatcattggttaaattatatagtcaagatctcttgttcggttcagacagtctcgtgttgtccatgtgatgtggctttaatcctctgtatgtcaaataacatcaaaccctttcaatattgtcgaatgttttcatgttctttaggaaacaaatgtttttctctagacatcttttaaaatgttttcatgatcatattaactggccacaaaattctaggcctgctatagagaaactcaagttatatcttaagaaacaattacgagtcctgtcttttagatgtcatatcagaatgtaattagtatagttcgatgagtcttttatttatttatttttgaatgaatgttcgatgatcagtcttacattcctagctcacatcattattatagtattacataatgtgtttattttaaatattcgtttttggcattctcttaaattgggtgtttgccaatttaaaactagaatgcattgtaaaataaactagaataataatcaccatctacaactaaaagaaatcacctaactagtacttaaatatatgaatgatcatcaatctaatccttgttttgagttggaacccataacccctagaaaacaatttctaatttcttaacatacaactacgaaagtagttaagtacacaaacaagaaccattaataatagtttttccacttattataaaattttgcaacctaatgagcaaagacgggcaaaacaactttgctgaaccaattttatgttaaggtgtgtttttgcaaaagaaataataattctttgggatcgatcgacggcgtcttcgactttattatcaacatacaaagacaagaaagcatgtcatgcacgttttatgggccgggaataatgatctatccacaattatatatgtatatttgggtcacacataacggtgtatattgtaatattttcttattaaaggttcgaagactgatttaattgtatcacaaaactaagtttaagagcctttttttttatggtttaaggctaacatacgataatggagtgggagtattcacactaattaaaaagcatggtcaacaataatatgtgatttagtgagtataaatagttgttattatcgtgataagtcaaggaagtagaaaacgatgttgtaataacttcgtttatctttcggcgaaaaagagaaattgttagcatttaggggaaattcaaaatcgaagctctctctttctgctttcacttttttttatttgcggaaaatgtgttctatgatttcggaaagtttgtggaaggccaatcatagtaacattcattctcccgtcagcacaatccaacacatcatctactctaaaagctttaagcaatttaggtatgaagaatttaatacatcatatgcataatgcatcttttatctttctttttttgtcacacatacattataccaaattacatgtatttggattatccaaagctaacccacatagctaagaaacttataattgatgtctatgatgtaaaataaataaaacatggaaacatttttgccgtaaatgtagagagtatgactagtaggaacataaaagttcgtagtgaaattgatatttttagggaagtggtaaagaaatacagtactcttttgcatagacatgatattgacatgcagatgtaaaacgcatgtaaattcctctctattattatgtttcatacgtacataaaacataccatccaactagataaacatgggaataaattgcaattttcattttcctctcgcaattttgtgactatcttataaaaactaaaaaaaattctcgtgacatctcaagtttatctcatgtcttagaggactaaaaacttttatccatcaccgaataaatataaatttaacaaaatgattattcatattagctttcttaaactagtgggaaaataggagataacttgtacgcgaagtatcacaactcgttctctggttatgccaagtggatattagatggggcaaatgtcgccttacgacactcaacaaatcaaactttgccacgtcacaccatcgtacagtgcagttgagttgtttttattttcggcaccgttattaaacccaacagaatttttgtaacttacaatgggtaaacccgtcatttgcacccgtctcgagaaagtatccattaaaaacttgaaagaaacgcgctttccacgacggtatgtgttaatccttacttaaatgacaataatagccctgtctctctctgctaatcatttcagttattagactttcatcatttaaatcacaataattgttccacgtacctaaagaaagatccgacttgtgtatcttaaataggaaataaaacatcgtatactacgtatcaaaaacattcacgcttcacattaaatgctaactaaaattacaaaagggataaaatcacaattgaatcctaaactccaagttgtaaggataattaagtaaaataaaacaaggcacgtgccagtcaaatgacggttataaccctatcacgtggtagtcaactcgctttacagatattccgagagtgaggtcccacaaagtcacttgccattaccctctctgtattagttagtcgtagtagtctagtagtagttggtagcgcgtcaacttcactttctaactgtaagcgcgtgaagaacgaaaccttttccccaccaccaccaccaccacctctctatactacttcttcttcttcttcttccttctacaaatacatgacagtctctttccctcgtcttctagtatttttttgttttctgttatttttcgcctgagactgggtccctgagatttcacaaaactcgttattgaaacttaacaaaacagcaacctccgttattaaagttcccttctcgatttccgtgaaaatttcactttagccatggaacctcctagtagcgtagtcgacgatgctgagttttggcttccgacggagtttctcactgacgatgattttctcgttgagaaggagaataacagtgtaggaatcgatgactccttgttcccgtacgagcctcgtcatggatttgggacttttggctctaccgttaagcctaacacggtgaaggaagatgacgaggagagtttcttagccggattgactcggcagatggttatgtcatctctcaaagatgatttctccggtggagtttgcggtaatcacgcttttccggccggtaatgaccacaaggtagtttgatttcgatctaaaaccaaattcgttctcaatcttctctgttttcgttggatttttaatttttgggaattttgttctccgtggttgttcaggcgtgggaaatgaatcgttcgcctccgtgtgtcgccggaactggctgttgttgcttgaatcagcggtttaaccagaaccttaattcgcgagtttcttcatgggatctgtactgtgctgcggagaggatgagtatcaacgacgaaccataccatagtggcagaggacttctcggatctcccgcaaaactttccgctaccgtcaaaaaccactctaacaacggcaccggttactacaacaatcatcaatctctccaataccagaagctacaagctatccaggtaatcaatcacaagcaaaactctcttaaacacttgatctttgagtttttgtgtgcgattgtgctgattggtttgttttcatttgtcttcttgtgcagtttcagcagctaaagcagcaacagttaatgaaacatcgtcgccaattggtgcgtcagaacagaggagtaagagttaatggcaacaaaaatgttggtccagtggatttgtcgtcttctgcatggtctaatcagtttccgaggcgtgatgttatgagagctgtattcatcggggaccataccggaaaacgtggctcaaccggaaccggtgtcttcttacctcgaagtgttaaccatacttcaagaactgagactcgagagaagcctagtaagttcctaaaaagctcaattccccaaatgtcaatctttggtatattttagttttatgatgagaactgtttttactcttgggtttagctatatcgacggttttggttccggctagactggctcaggtcctgaatctgaatttaggcgaaccggtccggtctacggctactctcaacggtataccaaattaatctcaacctcgagagcttatttaagttaattgagcggtcaattttatcaccagttggtttaatttttttgttaatttatgtagatgtgtcgtggagacagaggagcaacaatggtgggttctcgagccagatggtcggtggcgtgagggcggagcagtcagtgcaagagcctcggttaccatcggagtgggcttattgactgattttatgttcgtaacttttgggtgtgtttagggggaagattttatgatgggtttggtttgaagaaagattagagttgatgacaggtagtgaaatagtggaaaaaaggttagggttaatgtagagatagtggaagatttggaagaagaataaagaaagttggaagtgtggagaggacgaggttttggatcgtttaaccaccattgatggcttgatagatgaagaaaagagctttgagacagacagagataggtgactctcttttctttttttttgggtttttcttttttacttttttactgggaaatgaaatgtcagtctgtcacggggctgttcctttagtgtcatccctctctgcctctcttttgttcacacaactcttaagcaatggataagtaagtaattagtaaaagaaaagtttgttatatgattttgattcccacatcaggtggatatatatttcctaaaatctttgcatgcgaaatcatattttgatgaaaaaatcaatactaagaaaacatgtactctttttttttttttattgacagaatttgacaatctaattttagaaaagaaattctcacaaaccgagagataacagtaataagtaacaacaacccataactgggtaacacaaattgacgtcaaaaggcaaaaaaaaaaaaggggggtaaatctgaggaaagaacatcctaaattcctaatcaatttggtgtcaaaacacaaattagtttcacaagtatgtattatcatacactataatttcgataaatattagtatattacttactaaatccactaaaaaaatttactatgttcttaagaaaacttaccattgagactactactgacagtctgacagaagtaaccaatacaaaaagataaaaaggtgatatgtactatatacccaaaacctaatgagccttgttattagcaacaaaactcaggtcatatagtagtatttaaacaagtgaaatggtaaaatcgtatagaaaggaatttggcaacctattaattaatggatcattaaatatttagaagcacacgagcacttaaataactcgatttttgattaaatgctgaaatgctggtcttctttgtggatcaacgtgcagagtttgtcctatgccatttgttactccagattaataaatattgacaacttctattagtattgaaatttgagttgtggcagctgtttttagttgtattggttttctcggtgtttgtttccaacaactagtaccaaatcatcatgtccagtttttttattattactagtagtattttctttcgtcgacctatattattgtttcaagttttgtaaccacataatctaattagcacagtaatgtagtcatcaaataacaattcgtcttgctcgagtcctgaatccaataccctgatctaaaccattttctatgggagtatgggaatgggactcacattttcatgtgggtgtttttgtatgttgactgcttcacgcggttcgtatcgttctactaaattattggtaattgttcggatatataacatttatgaaaaccatttgcactttcacatgactcgcattaatgccactttcctcattttccatagttcacataagaacaacatagtacatatactataaactatgtgattgattactattttgaagaaaataaagcttgcatacatacaggtttctgtattcacatttagattttcggattcacaagctcgaagtattcatatttgtattttcaagttattttctctgtgttatactcggaaaccacattggcctatctaattaacaaaacatatgatatgcttaaatggcattaaatgctaatatgaaaaacatgtcctatggattattggtaagtgcgagatttaatgaaagttacaatgcttgatttcttaaaggttacaatttcgtactattgaagacaaactatatttgcaagagaagaaattagctaccaaaattaatacagtatagtattccctcttctgtcactatctgttcactgcttctgcaaaccaatattaaaacaagttgacctatttgcaactatctgtctccaattatgtttcaatttttgtgtattttggattttctttgctcggcctttttccttatatggattctgaatgctaggaaaaaacagaatagagtgaattggttctcacatgcatagaagaattttcaagagaaacatatttgctcaactaacaactaccaacccatcaccaaattttcgtttcatttgttgtacaaattatagacccaaaaatgttcatccacaatcgattgaggtacctcatgtacacctatattaaacatacaacataattccaaaatggtttggatccggtctggttttttactttgaggcaaataacattagattatttaagattgaaagctcacaactagccttcttttagggcaaagtacacgtaaccaattttttaattttcatatcgaacttaacaaattgtaaccatttgcaaaaatgaagcaaacaaaaagtacaaaacagattacatggactattatataattggaagcccgtttggccttaaagcccgttaaaaaaacatatgtgtattttttagcaatatgtctgataaaaaaatttaaaaactaatcttgtttaattcagtaagacatttactagacttttcacaattcaacacagttgttgttggttgagctacccagccagtatcaagagaggaaggtagagaggagtgagagagagctttgggatcgatttcatgtcgtagatctttcactctgggtttgcgttccacaaaatcctaattcgcggaactctggatttgatcggcgatggcggtaggcgatcagacggagcagaattacttgccgaagaagaagaaatccgaaacggaagatgataagaggttcatgattgttttatcttctttgtaatctatgtttgaatcagttgattttattttgttgttgctgggagtagtgagtagatcattaatttgagaaattgaatgtggaataggaggaagaaaattgttcccgggagcttgttgaaagctgtggtgcgacctggaggaggtgattcgagccccgttgatggtgatcaggttaataattttggttttgtttttgcttctcgtggtcaattttggttgtttatgagtgttttttcgtcaggttatttatcactgcactgtacggacactggatggtgtagttgtggaatctacgaggtcagaatctggaggtgagattgattgatgaaacatttctcagtagggtgttgcttttagctttttgttaggggcatcgttgaatgtgttgtttgatgttccttcagggagaggtgtaccgatcagagatgtcttgggaaacagcaaaatgattcttggattgctcgaaggaattcccacgatgcacaagggtgaaattgcaatggtaactctaaaaactctttaaagatcagtgtcgcctcaatgataacgtttgtgtctctttactcggctgcgtagtttgggttctgaagagggtcttgttgatttacctcaagttcaatgagtcgattcgccaaatcttccattagctatttcaacttactttcttgattctcaacggctgaaaagtctttatctttttccttttttcagttcaagatgaaacctgaaatgcactatgcagagattgattgtccagtctcagctccagaaaattttccaaaagatgatgagcttcattttgagattgagttgttggatttttctaaagccaaggcgagatctcatcactaaccaagataacagtgcattagttagccgaaagactctgaaattttgcatttcatctgttttgacttatgctttcctttcctttgtgttaatttccagattgcaagtgatgatctgggggtcatcaagaaggtaggacctgattttccatatatgtagacatatcaaatgggtcagggatgatgtatttcttgttcgtactgatggctcaagcattgctttccttttctatgaaagattctaaatgaaggtgagggctgggaatctcccagagaaccctatgaagtgaaagccaggtaatttattcttgatcattcctgcattttgggtcaaaatatatttaaccttgtttttccatttggggcaacgttgagtgaagttttaatgcatttctgtggtgtatattagaatatctgctaaatccggtgatggacacgtgatcttctctcacacagaagaaccttatttcttcacatttggaaaatctgaggtaattgttaagtttatggggcagtttttactctctgtccatgcaaatccattctagtggaatacatttctgactattgctcgtcaattaggcaggtgcctaaaggtcttgaaatcggaattggaaccatggctcggaaggagaaggcagtgatatatgttcgcaagcagtacttgactgaatctcctttgttgcatatagatcaagaccttgaggaagttcattttgaggttgaactggtacatttcattcaggtaagaaagacaaatgcaatgcaataagaaaacagtattttgtgcatttaagaattgggaaactgagcgactgacattcaagttctcgctttgaaggtgcgggacatgcttggagatggacgtctcataaaacgtcgaattcgagatggaagaggtatgtttcacactttcttttcaactgtctcttatctgtttcaacatggtgcgggtttttgttcttatatatcttgctggggcatctgctagattccagctcttgtttatagtttatccgctagactattctgatctacaacgtttgaccaacttattaggcgagtttccaatggattgtcctctccaagatagtcgtttaagcgttcactacaagggcatgcttctcaatgaagagaagactgtcttctatgatagcaagattgacaataatgatcaaccgttggagttcagttcaggagaaggactggtcagttactccaacgtttataggaaaacctagtggagttctttagacgttttagttgaaatatatctctacgcacggactggttaagattattctgtcgtatttgcaggtccctgaagggtttgagatgtgtactcgtttgatgctacctggggagattgctcttgttacatgcccccctgattatgcatatgacaaatttccgaggttatactcttaactgtgtaaataacactaacacgatagtgtataaactgttgtcggagaaataaacgcatttcatgttttcttttctgatagaccacctggcgtgtctgaaggtgcacatgttcagtgggagattgaactccttggtttcgaaacgccaagagtaagttggtctagtgttgatacttaccatggaaattgtaaacagcttccgtttcttataagtctagagattctgtctcaggactggactggcttgaacttccagagcatcatggacgaggcagataaaatcagaagcacggtatggataaaatattctgctaccatttataatttgacctatagtcctaaatttttatcacttcagaatttgctattagctaatcttttctgcaatcaggtcacaccagatctattaatttatggttcttctctccttttggttatactatgaacttcagggtaataggcttttcaaagaaggaaaatttgagctcgcaaaagcaaagtacgaaaaggtaatagaagtcatgtgataaccaattccagtattagcatttgtttcattgtgtctgagcggtaaatccaaaaccaggtgctccgggaatttaatcatgttaacccacaagatgaagatgaaggaaaaatatttggtgacacaagggtgagttccatcttctcattacgtttgtagttgcagatacgtctagatttgataatattagaagtattaagtactaactagctctcgtatccttgctctgctgatatttgaagaatatgttacatctgaatgttgcggcttgcttgcttaaaatgggagagtggaggaagtctatagagacatgcaataaggtagcattcaataaacaattctcttaagaaggcttgattctggaataagaggttgggatttctgagaccttttgtgcaccaatttccaaataggttctagaagcaaagcctggtcatgtgaaaggtctataccgccgcggaatggcttacattgcaggtggagagtatgatgacgctagaaatgacttcaatatggtatattatgctaaacctgcatatcattatctagtgaatagattcagaaatctgcttactcactgacttatgtgtctgtgttttagatgatcaaagtggataaatcatcagaagctgatgcgaccgctgctctattgaaactgaagcagaaggaacaggtcagtgtttgaaaactatctcaaccaaatgtccacccgaatcgagttcattaaggctacttatggtttgggcttgttttgccaattttgttacttaatataagatctctgagttgttttcttttgagctcacaggaagcggagagcaaggctagaaaacagttcaaaggattattcgacaagagaccgggggagataaccgaagttggttcagaaataagagaggagtctaaaactatagaagaagtagatgagacaaaggataatgatgatgatgaaacactggaagaagaaggagctacgacagtgagcacggaaaggaagaggaaatggtcggagaaagcctggccgtttctgaagaacgtgatgctccaaatcggaatccagcttggtgttgttctgatagggattttgattttccagtttgtgagcgccaaatttacatgagagagatatgaatgaataaacaaaccaacggcactgtagactcagaaaatataaaactaatggattaaacgttaagcttaatgtatttttgtttggtttagtttatgaaagtagttgctcaaagatggaattatttgcaccactacacgatcctctcttgcttcctcaagtgattggtgtttgtttgtttcattcaaattctacgagatgatgacaagaaagaagatgttaatgtagaacatgacttaattgtataatctcccaaaatttattcattagtcatctttttatcctataggtaataggattatcctactgtatagattgttgtaatgattagtgttaggtttttgttgaaaaacagtatctacttttctattttttctacttttagtataagatgttttgggaaaacgaattattttacaaagaaaatgttttgtacatatgcaaaatatgtatataaatatgctttaacgaattttatgttgtaggaaatgtgtgattatataaatcaactttagataacacagagtaattaatcccacccaccaatcatccactcggctgaataaaatgtcgccacttttaaaaacaaaaagaaagattaaaccgttttctccgtgtggaactcgcgttttatcgtacacccaaaacgttgcttaaattgattttgcaaaacgctgattttgcttcttatcggagatttttttgggggcaacggagaaatttgttttagggctttttgcttatcatcgtcgtctcagatcctgctaaaaggaaaaatcttttgttctagatttcttcactctcgtcttttgatctcttgggtttttccctgttggtgtcaccatcgttctcgtttcttcgatcgatcgttgagtcaccggcgttaagcccgacttgagttccttagataattttaagattaggttgtaaaaatttgaatttggtgggtttggtttgatgatgttgacccaaactgttggggtttgaagtaatatggaagtggaagattaacaaagaagaagataatgacgctttatattcgccgcgaagcttccaaggttcgtcgttttttttctttctgattttgcttccttgcgatcatatttgtcgtaattggctgaattgtggtggttttgtacatttgtagctatggaggagattttgttcggaaataacaacggagattggtctcctcgctgagaactggaaataccttcttgctggtcttctctgtcaggtttccatcttttaatctgaattcgacagctttttgatcttagtgttgaatgattatggtttgttatacctattgtaactttaggctgtgggagagattaaagcacaagacttgaaatttaccctatttgttttttgtttgttagttgttggggtgtatactttttaccaacctttatgggttcttggcttcagtttagtttcccatttttgacacttttatgaatgaatctgttatgtgcagtatattcatggtttagctgccaggggagttcattatattcatcggccaggaccaacgcttcaagattctggcttttttgttcttccggtttgtctcgattatttcagctggtttggttgatccctttactcttttgaatatcatacttaagctcttcttgctttgtttggggttttaggagcttggtcaagataaaggcttcataagtgaaactgtgttcacttgtgtatttctttcatttttcctggtgagtttcctcaggatttatgtctagttctgttctggcgaaacagcgttatatgaatggtttgttttgtgttaaaaattgcagtggactttccatcctttcatcgtgaaaagcaagaagatatacactgtgttgatatggtgcagggttctcgccttcttagttgtaaggactctttgccctttgctacttaaatgcaatttaaagcttgctcgtcttgaagtttgtttgccaattctatccatcaacaggcttgtcagtttctccgtgttataacattctattcaactcagcttcctggccctaactatcactgtcgagaggtaaaagctaaataaaggtctattaaagagggtttcatccatattcatgtgtttattctggtgagtctcttgtgttaacttacagggttctgagcttgccaggttgccaaggccacataacgttcttgaggttctcttgctcaactgtgagttctaatcatttctccttcccttaatacaatttttggacgtatgtttcttctagttcgtatgtgatgatacgctgatcttttcagttcctcgtggtgtgatatacggatgtggagacctgattttctcatcgcacatgatattcacactagtctttgtccgcacttaccagaaatacggttctaaaaggtacaaagtttctctagtcacatcgtaaaacaataaccggacaaaataatagcttgtaaatgtctctctcacaggttcataaagctgttaggttgggtcattgccatcttgcaaagcctcttgattattgcgtcccgtaaacattacactgttgatgtggttgttgcgtggtatactgtgaacttggttgtcttcttcctcgacaagaaattaccaggtctgatcttttacttgagtgtttacttgcataaaacccacaaattttcttatatgattttgttttaaaacagaattgcctgatcgaacaacggcattgctccctgtgatctcaaaagacagaaccaaagaagagagtcacaaactcttgaatgggaacggtgttgatcctgcagatcgggtacgcatttgaatttgtattcagtgataaatccgactgaaaccccaataattgatgttaatgtgtataaatttccttgtggtatttcagagaccgagggctcaagtgaatggcaaagacagcaatggaggtcacactgataatgctactaatggcacatgagatctctgctcgactctagttttcaggtttttgattgttgttaaatgttgatgacatcattattgatccagaaaagagcgcgatgcagtctgtatagttccagttccttgtttctcaagcaatccgatgtttgtgtagtagtggcttttagggatttcacaatttgacaaaggataacatgactaaaaacagaaacataaccattttaggttaacatcaaacgttcgcttagctatacaatcaactgcccaattgggacgatgacttttttctgtttattctagtcataaattcatcccaaatcagaatttattagtgtacgtgtttttttggtttgtctataattatgaaaccgcctacaaagatcttaatctcaccgtctaaattttagttaacaatccaaacctatatatacaaaaagagatagttagggggtgaagtttgaacaaacagaaacaataggggtgaaaaatgggaagaaaatgaaaatgagaatgagaaaggaggtgggaaagagggaacgtggagtatgtcggtaaggaatgtggtcaaaggcacataccatgtgggctcacatgtttcactatactttgtcatccaaaatctctctgtctctttcacgttttttcggtgctcgtacaatttttagttagtccctaaaatccatctagccaaatgtgtattctcggatattttgactaccttcatgatataaaagtaatccgattctaatttagaagttctaaccgtttcgtatgttactaattgaatttgaaatgaagtcgtaaccgataccgatgtttattaatgtatgtgtgacaacttcaaaatacaacatgctaattgaatatattcaaaaaaacaaatgtaggatagaacatgctaaatgatagtccaacatatcacttgtgtttacaaatactctgatattttggtaatatagatcactagaaatgttataaaattctcttaatagcttttctagttactctaccgatcgaataatatttcggacccactgcttgaatgcatatatatttgaatttgataaagttgtcttctttctgttgtaggtggatagtgtttcttaggtttcggtgtcacattctcaaagattatgtggcgcttgacaattggcttgaagatacaaacacactgacatagagatgtatataataaacatgtatggttggtatgcatgcaatgataatgatcgttaattaattgttctatgtttcacaaacgagtgatttcattttcatgagtcatgatgccctttctttttggctggaaaatatttttctttctttttcactttttctttgtggaattcttctaattattgttgtagtattcgagtgattatgataaagagggtcctttggtgtgtcatatatgggtagtaaaatcattaattcaaaatgcagaaagaaaaagacattatcattataacaactgtctggatatggtgttgttttatgaagttcttgattttcaacctttattatcaccactttaattaatgagctatatttatcactcacgtttggacaaagcatggccatgggggctctacatatatcagagaccaatcgaacttaagaagtttaacgtggaaaagttatttaacggccactttacccacacacacatgcagtaataaggtcgagatattgtggcctcaagacaattttcaattatgtgtttttgttcaaactatatatacgtccttttcaaaaaaacatcttaaatcatttccaaaattcagaaatgaagattacgtgtatatgtaaaacatttcttcacgaaaacgacaacttttgaatcagtgaaagttgttcgcaacaataatggaaccaagttcatgtatatgaatatattttttcttcgtaaaaagttgttcatgagatttgatatatatgtatgaaccaagttcacatgtaaatatgtaatatatatgctcttcatatcatatacatctccaaggtttgatcatttgcaagtttggtgggtattttgcttgatctacaatcagaatcaggatggagatcttctttatattcgttagcccaaacaatgttagacacaacaacaatgtcttttttgagatcgtacatattaaattatagtgcttgaagagaacggaaagaatatatataatgtcagccattagagtttttagttcatcgttatacatccgttaatcgtttgctcaacaaccttaacatatatatgcttttataatagacactacttttataaaaatctattttcataaaaaagtctcaatttttaggacaagaatagcactatgcaacttaataataggtgagttttcctagttgaaatatttaatataagatttgtgatatttttaatttcattacaaagtatgaattc
